United States Patent Application Publication US 2011/0014706 A2 - sequence listing, part 6

SEQ ID NO: 8519 - DNA, 1132 bp, Arabidopsis thaliana landsberg
tagtctttccgaatctgaacgagctagcaaagctgaggctgaagttgtggctttaaaagattccttgtctaagatgcaggctgaaaaagaagctagcttagcattgtttgagaagaatttggagagactatcaaatctagaatctgaagtatctcgtgcacaggcagactcaaggggaattaatgacagagccgcaaatgcagaagctgagatccaaacgctcagagaaaccctctacaaactagagtctgaaaaggaatccagctttcttcagtatcataaatgcctgcaaaagatagctgatttggaagatggactctctgtagcccataaagaagctggggagcgagccagcaaagctgaaactgaaactctcgctttgaagcggagccttgccaaggccgaaactgacaaggaagctgctcttattcaatacaggcaatgcttgaatacgatatctaacctagaagagagactaaggaaggctgaggaagatgcaaggcttatcaatgagcgggctgaaaaggctggggtagaagttgaaaacttgaagcaaacagtctcgaaattgatcaaggataaggaagcttctgaacttcagttccaacagtgcctgaatataattgcgagtctaaaagtcaaactacaccatgctcaagaagaaacacagagtcttagccatgaaatagaggatggagttgctaagttaaagttttctgaggagaaatgtcttttgcttgagagatcaaatcagaatctccactctgagctggatagtctcttggagaaactggggaatcaaagtcagaagctcacagagaaacaaaccgagctagtcaaattgtggagctgtgtgcaagcagagcatttgcatttacaggaagctgagaccgcgtttcaaaccctacagcaattgcactctcagtctcaagaggagctaaataatttggctggggaacttcaaaccgtgtctcatatcatgaaagacatggagatgctaaacaatgagttgcatgaggaacttgagcaagccacggttgagaacaaaggtctcaatgaccttaatctcactatggaaaagcttgttcagaaaaaccttatgctggaaaaaactatatcttatttaaattct

SEQ ID NO: 8520 - DNA, 1405 bp, Arabidopsis thaliana landsberg
gttttgtcaattaaacttgtttaaaaataaaaaatataattggtcaaagagtctctgagaatccaaacttccaaaaccaagtgcgaaccatggttgagttaaccaaataacctaatcaacgtttaattacgcttattttatctgtggaaaaggtcaaaagaaaccctaaatccccaaataaatggcggcttgattttccctcccaattcaaaccttcttctccactccaattctcatcttccctccaaatcgtttcgattcgctctcagatttcgaaaatttcccaacttttttggagcgaaactcaaatttatcttcttcaattacttacagatcgatttacgagatgcagaattctcccaaaactaaaccctagcttccacttcttcccctttccttcaattcttcacaaaatccgttctcggttttgttgttaatggcggaatttagtgacccaccaccatctaatctctcttcttctcataaattaactaaacccaaccaaaccctagatgagtcttcaccaaccgcgccaattcgagaccttgttactaactcgctctctctttcctcaccgattcgtcagattcaagccctttctccggcaaaaccagacgggtcttcctcttctccgccggacaaaaccctaaatttcaatccagaggaaaacagagatgtgaacccagatgagtcttcctcttctccgtcagataaaaccctaattgcgccaccagctcagatttcgcctgttagcaacaacaatcatctccagatcacgaacacgtcagattcgtatctttatcgtccaccaaggagatacatcgagtatgaaagcgatgacgacgagcttaataagatggaaccaacaaaacctctacagttatcatggtggtatccgaggattgaacccaccggtgttgtaagtttctcttctttcctttttatctgattttgttttggtatccgaaattgaatcattttggatgttttatacaatttcttcagggggctgggctatataattcaggcaacacttgtttcatagcttctgtgttacagtgcttcactcatactgtgcctcttatcgatagtcttcgttcattcatgtatggaaacccttgcaactgtaagatttgcttatttggtttgatttgagtttggtgacttgtttcgttcatggttttaatcttatagtttctttgggttttcaggtggaaatgagaagttctgtgtaatgcaagctcttcgagatcatattgagcttgctctgaggtcttcaggatatggaataaacattgatagatttcgtgataacttgacttgtatccttttttaagtgttttttgtttatatatgtgcatacttttgtgttgcaggtttctttatataattgtagccttaccaa

SEQ ID NO: 8521 - DNA, 1368 bp, Arabidopsis thaliana landsberg
tgctggttagtatttattcacatgcatgtttcggtaaaactataaagttttaaataactaagagaaataatgattgatatatatacataggattgttgagatgtgggaaaagttgccgactaagatggataaactatctgagaccggacgtgaagcgaggcaactttagcaaaaaggaggaagatgctatcattcactaccatcaaacccttggaaacaagtttgtactctacctattcatctaatttctttataataagacaatatatagtatgtagagactaattgatatatgtgatcatcaggtggtcaaagatcgcgtccttcttgccgggaagaactgacaacgagatcaaaaacgtgtggaacacgcatctcaagaaacgactcactccatcttcttcttcttcatccctctctagcactcatgaccaaagcacaaaagcagatcatgacaagaactgtgacggggctcaagaagaaatacattcagggttaaatgagagccaaaactcagctacttcgtcacatcaccaaggcgagtgtatgcacacaaaaccagagcttcatgaggttaatggactcaacgagatccagttcctgctcgaccatgatgactttgatgatataacctctgagtttcttcaggataacgatatcttatttccgctagactctcttcttcataaccaccaaactcacatttcaacccaagaaatgactcgagaggtaaccaaatcgcaatcatttgatcatcctcaaccggatatcccatgcggatttgaagacacaaacgaagaatccgacttgaggagacagctggttgaatcaaccacacctaacaatgagtacgacgagtggttcaacttcattgacaaccaaacttactttgatgattttaatttcgtcggagaagtatgtctatgaatgtcaataatatatgcatgaccagtgttgtatccacttttgaatgttgagtaaattactattttacatggattgcccatgcattgagaagatgctatgttttatgagagctctatgatattggttcgtttttcggctagattcacacaaacaactcttctcttttccttctcgatcactcttatggctgctctcagagtctccgttttcagaggccaaaacaggtcgcaggttgatggctggcaatggcagcatcgactgcttccggtgtgtcgagatcaggcgccacaccaagcatcaggtcctgaaatcgaattaggtgtgtgtaagtttcttagcctcgatactcgcatcaagacatttggctcccactgtacttttcatttcaatcactcgatttttgcttccttttggcctcccacgataaaagctaatgaatta

SEQ ID NO: 8522 - DNA, 1147 bp, Arabidopsis thaliana landsberg
gattgaagctctatactctacacagactgcactcttagttaaattcagctcaaaagatttctacattgttagcgtctctgtaatttctcctgtacagtagcactatcttctattacatattactctcccagtgtcttccttttgagtggtcctgtattacattagcaggttcttcttgctttgacttcaccttcttaccacggaccggtaagggttcttctcaagcattgtcttttggccagcaatggaggctgcttcgaaaattcctttagctgcaaattcaagtactagtatcagtgaactgtgtgtcatcagaatgacaatagagctacatttagacagacacaaaatgtctggtaatgtacagacaatgatggtgtatacatgaaatatacataagtagaggaaaaacgttattacctcactattatgggttttcattatttcagcctgcaacatagagagaccgcagttaaataactgagccagctagactctctatggagaagcaataaaaatggtagaagaaaaaaacctgtttcttctgcaaatcttgattcactagcttgagactttcaatctcagcttccagttccaaggtataagcctgaggtttagccaaaacatcaaaatgatttcaaagttcttgaaaagaaaacggtaatggcagtttggttagatgatattgatatcaaagtttttgagaacaaaacggtaactttacctgttttcgagcccttgatctagcagcggattcccgattcttgatcattctcttttgccttctctcaacaaccttctccaggcccgtattgcttcttcttccccgaccaaacacgtaaggaactggtgatgaccaagtattgttttctgcactgctcgtcccaggagaagtagctgtaacagtaccccctgctcctcccatattactgttggctggaccatctgcgctagtctcaaataaacccctgttgaccatatttacaggcgccgcaaatgttacattcgcttgttttggaaagatagttggaggcagtctctgatgtggctgctgcaactgctgctgatgtggctgctgctgctgctgcatggttccaccaactttgaggcctaaaccaggtgcttgattcatgatcatagaactatt

SEQ ID NO: 8523 - DNA, 782 bp, Arabidopsis thaliana landsberg
atgcagtagaagcatacatgataagcacccacagacactatcagagctacaacttaagtttagtcttctgctgctgatgttggtcctaatcaagtatggtcaagggtttcagaatgaactcaatgaaaagaaaagttcttaaacaattacctcattcttctgcatttccaccatttcagcctgcaatacaggggaagctaggatcagagccaagttctaaaagtctgataggggaaaacagaaacacacagagaggttgtaaacagaaagaaacctgttttttctgcagttcttgattcgttttcttgagcttttcaatttcggcttccagttccaatgtataagcctgtaattagtggatagttaaaaaacatggaagataaagcatctttcataatacaagaagtggttcgggatagaagatatctttgctggttttatgtttctgtttaatgcagtcttgcaaaatataagaccataatagtcaaaccaaacaaaagggactagataagtttagttagatttatattcacctgctttcgagctcttgatctagcagctgattcccgattcttgatcattctcctttgcctcctctcgataaccttctctagacctgtattgcttcttcgtcctcgattaagcacatacggaactggtgataaagaattattttctgcgctgcttgttcctggagaagttgctgcaacagtgaccccggttcctccgtaactagctaatccattattattggtgatagaattatttgcagccccagcaaa

SEQ ID NO: 8524 - DNA, 2352 bp, Arabidopsis thaliana landsberg
actaccctgtaagttcatgatagaggatcaataactagacatcataagaggaagcaccaagtcatttgcaagaagagcagctatatgaatccaactatgcaaagcagctaaatttaaagcaaatatgcaatactatgtgcaataaactttggcaaatgagggacacactaaccgcattctcaatggactccagcctctgattaattctagtttcattgtaatgtcgtaatgagtaacctgcacaatcattcatccattcggtagaacacggtcataaaactcatttgactcagtacaaacataaacaaaagaccaatgagatacctcttccaacggtcactagtatcacacaagaaattcagtttctaacttgttttatgtcccagcagaataacaaaagacctagaatatcatgtagagatctcaaagtactaaacttcagttattggaagttttggacagattagttattgaacatcatcacagaattctgaccaagatgatctccaaacacttggaaacttatggcagatcaaatcaactaaaccgtaatctatagtctgatccggaaaaggcctcaaatttatcacagaatggatttcacccctagagatcaagcctgagagctaaagctatcccaatgaaacactcatgaattgaagccaatcaacacccaaaatctgaatcacttcactaatagccattgctcgcctttcaaagcaatccaattcagaaacttaaacatcaaaatacgtggtaagaggtaaagattctctaattgaagataaagtaagcaaaaaatatggaattgtaacataccaatccaagccgtagcaacagatgctatagaagttccaactgtaaacacgaccctgtgcctctcgaacaagtcctaagagattaaacgaaacccattataagcagattatagattgacattttaacaaaaatcctgatgcaaaaaacatttactaatcccaattcttcagaaaccggtatgaattgaaattcttcgatcaccttggtggatagatatgaatcctggacggggaccaatgaatttagggcttttttcttcagctggggcacgagtgcggaacccagaatcggtgtacctcggcctctcagccgattcatgattccctcgtgcggctgtagaaactcggattgagtcgactcggctaattaattagattgagttctgtggttttgcttgcagaaatcgtaggcagccacaaaaccccaacggagagattccctgtcacgcaaaggacgaagcttcttcccagatttttctccgacaaaaaatgcctaaaaacaacccttttcagtttttttttttttttttctcaatagtggactttattcaataaaccgtttgctacaaggccaattacagcccaacacacataaacagattgcgaacaaaagcaagctcaagaagagcccaataatacaccgtttacagaagaagattgcatcaagaaagatcatccaaagacacgtaataatacacgtgtaagatgagccaaaaaagattcccatcgtcatccttcgccatcggagatatcgatttctggtgaagaaaccaccgtcgaatgcaaatcgtcggtagatcaactgtttatcaccagcaatagcaaaacagcaccatgaagaaatattggaataattaaactcaacaagagagtaaaatccaattattcaggaactgttggttaaaactaatcgaatctctaaaactcattaacagctaaaggcaattgtaataggctgaggaaagttttcaactcttttctttacttttggaatgttcaaatgaaatatgactcatcgataaaaaaaatttggaacctttttagttttaaaattgaaaaaaaaaaataagcttgaaattggggatattactgatgtaaacacttgacaaaagcaaaagatgtaattttacgttcgagttgtcattcataaagagctcttagtgagtgtcacaacacaaactctatttttcctctgataagtctgattaaaatttattaacagagtcaaaaacagaagagaaacctgtgacaacatcactggtttcatcctatattgttttcagccatggccatctccaagccaaaaaaaaaaagaaaagagaaacacttttcacctcccctcctcttccacaaaaaagggcagagagagatcattggggtttttaagaatcatgatcatggtgatgacgcatcctcagacaaatcctgcacttctccattgtctggtttctcagtctctgagctttctttcttcacatcaggtttaccattagaaagagactttgaatcagagcggtttggtgttggtgagatc

SEQ ID NO: 8525 - DNA, 1427 bp, Arabidopsis thaliana landsberg
aatattgagactagattgtttaaaaactacaggaaaaactttccctactttggatccaagaaatggagaagtgattgctcaagtgtctgaaggtgatgcagaagacgtgaaccgcgcggttgcagctgcacgaaaggcttttgatgaaggaccatggcctaaaatgacagcttatgtatataacaaagttgttttgtgcttatcttctgtgttttatttgtgcttttgacatgactcttagctttgttaatttcttcaggagagatcaaagatactgtttcgtttcgctgatttaatcgagaaacataatgatgagattgctgctcttgagacttgggataatgggaaaccttatgaacaatctgctcaaattgaagtaccaatgcttgctagggtgttccggtactatgctggtgagtgaaaccactgatgcatattgtataccttaatgactttttcatgatctttgtaaggatttttgtatgttgttcttcgatgagtttctcaggttgggcagacaagatacatggaatgacaatgccaggagatggtccacaccatgtgcagaccttacatgagcctataggagtcgctggacaaatcatcccatggaacttccctcttctcatgctttcttggaaacttggaccagctttagcttgcggtaacaccgttgttctcaaaactgctgagcaaactcctctatctgctcttcttgttgggaaactacttcatgaggtaacaatgtgctcttcagtgagattctgttttattgatgttatgttttgctcaagtaactgaaattttatgacacaggctggacttcctgatggagttgtgaatatagtttctggatttggggctactgctggtgcagctatagctagtcacatggacgttgataaggtttaaaagacaaactttgaaaaattatcctattaaaaggcaaaagttatgccttctatagagtttctgataaatcctctgcactctacaggttgctttcaccgggtctactgatgttgggaagattattcttgagttagcttcaaaaagcaaccttaaggcagtgactcttgagcttggaggaaagtcaccattcattgtatgtgaagatgctgatgtggatcaggccgttgagcttgcacatttcgctttgttctttaaccaggtactgttttttttatggtttcatggttctacagtctttagaatctagccttttctgataggtataactgtagggacaatgttgttgtgctggttcgcgtacatttgtacatgaacgtgtgtatgatgagtttgtagagaaagctaaagctcgtgcactcaagcgaaatgttggagatcccttcaagtcaggaattgagcaaggtccccaggtagtcataccatcatttagaaaccgtagcctaaccatgtgtcgg

SEQ ID NO: 8526 - DNA, 1797 bp, Arabidopsis thaliana landsberg
  unsure (1)..(1797): unsure at all n locations
ccaaatagataaaagatcttaaaactgtcttctgtcttaatctcctaaatcccaaaaaaaaaaaaaaaaaaaaaacacaagtcgctgtcatgtctgggatgttagggttaagcgccgtcatgggaaaacggccgaagcagcaagtcaccgcccgtccaaggaagtgtccaatagaaaaaccggaggagataccagatgatctcttgattgatgttttctcaagattgtccattgaagacgttgcaaggtgtcgttgcctgtcgaggttttggtcttccatactacgtcgtcgatatttcacggaactgttccacaaaatgtcatcgacccggcctcgtatactattcaccttcctttactatggtaagcgactcttttactccatgcctcaagatctagaccccagcaaccactactcgcctctaccttatttttcgatatcatactctcctatatctgcccattaccagatgcatttccctaaagttctgggtgcttcagcaaaggtgtgtccccctatacttggcttgatctgttgcaaatctagtaagacgatgatttttaaccctagcacaagagagtcaaagttcatttcaacaacgaagagggttggcgtgaagagtacttcatttgggtatgatcctatcgacaagctattcaaggtattgtccatgtccgatgattttgtgtgtcgagtttcaacattaggaacggaagtagtgacttggagaacggtcgaatgttcggtaccccatcaccctttacatagtgagatatgcatggatggggtattgtattatttagctaggcgtgtgggcgatgaaactccaaaaccttatatggtagcagcctttgaagttagattagagagattcaagtttctaccaatggatctcagatgtaaacacattggttgttcagcagtcatagattacaaaggtaagttggccgtagtatggctaaatgtggatcgtgacaatcacgacancatagaaagttttgagctgcgtgttctaaatgatgttgatgaagtgaaatggtctcaaattatttacgaattgccaaattattggaataatctacctgcggatatcgacgtatccattgttgggatgactagtgcaggtgaaattgtgttggcgacaagccatatacggcatcctttctacatcttctactacagtaccgtgactcttgctatagtacaacttcgaatcgatttcggaattgaaggttcggaggctaatcactgctcaacgatgtcgacatttgtaaaccatgtggagaatgtagagctagcttgtggattaggtctttctagcatagccatgtagcttgccttctaaggttgcatccatcttgttcggttattgtttgaatgttctatttatgattgtttgttgtaagctatgttttagctatttgaacttttcttgttgtaagctactttaaagctatttgaacttttatattcttgagcaaccaattttgtcttcgtggattttactgttagttttatagataaaattaaaatagattttgatccatagcttgttgaatcggtctttaaccagtatccaacctctagatttctctaaaagaaggaatttggtaacaaagatacagtcaatcaatgatcattctcatcattcatttcttctcaccatcaatcaattatccaaacaggtacaaggttgtcgagtcgtcaaatcaactgtccaaccgaatttcatttatagtaccaatagtatagaattgtacattatcaaattaaagttcacaaatcaagctacaagt

SEQ ID NO: 8527 - DNA, 2293 bp, Arabidopsis thaliana landsberg
atgtcaaacttctctgtttaacccaatctacaacatctcaccagtcgatggtttggttcatcaatccatgaaaccaacgatacagtccgttgatagttctctcacattcaacagcgacaacaacgtcgattttcttcgtcctgtgtcgtcgagaaaacgttctagagaagaatccgttgttctaaacccttccgcttatatgcaaattcagaaaaatcccaccgatcctcttatgttccttggccaagacttgtcttctaacgttcaacaacatcatttcgatatcgatcgtttgatctctaatcacgtaagttcttatctaatatgttttgagtatattttttgttaatttttctggtttacataaattgatgggttcttcaacaattccattattaggttgagagaatgagaatggagattgaagagaagagaaaaacacaagggagaaggatagtggaagccgtcgaacaaggtttgatgaagacactaagagccaaagacgatgagataaatcacatcgggaaactaaacctctttctcgaagagaaggttaagtctttgtgcgtagagaatcagatatggcgtgacgtggcacagtctaatgaagccaccgtaaacgcccttcgttctaacttgcaacaagttctcgcagtcgtggagcgtaaccggagggaggagccctccacggtggctgacgacgcacagtcttgttgcggtagcaacgacgaaggtgatagcgaggaagaacggcggaagttagcgggagaggcgcaggatacgaaaaagatgtgtagggtagggatgagtatgtgtagaagctgtgggaaaggagaagcaagtgtgttactgttaccgtgcagacacatgtgtctatgttctgtgtgtggctcttcactcaacacttgtcctatatgtaaatctccaaagaccgctagtctacatgttaatctttcctcttagacctaaccaataccagtaaaatgtaaatgcccccaaaaaaagtaaatagtagacaaaagtttcttggttaaaaactgttcattctttttttctttggatggtgatgatgatgatggaacacgaatctttgacatatgtgtcagatctttaaatttcgtaaggggttcacgagggacctctgttgctaaaaatcgtgggttaggtttatacccactttcaatgtcatttcccatctttgtatgaattttcaccaaaaaaagtggaaaagttttgtgtggttcaactactagtcttttaacatagtagtagtaggggtataacgtcgcttttcacaagcttgaatttttctttaacatatacttttgcccaatcgttttttttttttgttgtgtttttctagaaaatgatatattcgatacaaagactaaagtaagtggtcgaaatcgtgggttatgcgtgacaggccattaaaccaaaagcaaaaataaaaagccatatcaacttttcctctatacccgagagagaactgatgctaaaagacttcaggagtgggttggtgcaagttagtgtgttaaacactgtgtagcagggttaaagcacaagttagcttaatagagacaccaaggtttgactagccgttagaattggtgcgtggagaaataacggtggagtggcaaaagctgacgtggagagcgcgcgcaaatctcgctgggtaaaaagagtgggtctcatacccttatagtattagtatcctaaagtaaaactcgttaagtccaccaaaatctcgtcttgtgttctgtctgttccacttcttccggcgtttttacttcccaaaacggctctgtttaccaaataaatgttaaaacagttttattagtgttgctttgtcatatttcaagtaacaatagaagcatatcttccttttggaccaaaatattcgaaaaaccaagatgtagtagattcgccctagtcttagcattaaaaccaaaaataaaaaataaagtaagattcgtacgttggttaaaaaaaaggcttaaaattgataagataagggttaaaaaaaagttttggaaacgtactgatttaaatggcccatgaactgataggtttcaagatatagctttagattaggaagaatggaattaagatttaagagaatggaattaagatttaagagaatcaaggcgcgtcaagaacacgcctgtgttgtccctttcatatcaaagaaatatttaagtatttgactgcctccaatccacccaacacaatcaccaccttcctttcgtgtaataggcggggtccaccccagcatatatttgatatcgagctt

SEQ ID NO: 8528 - DNA, 417 bp, Arabidopsis thaliana landsberg
tgagaattagatttagattgagtcgattgatttaaaaagttgatagatttgtaaaaatttcaaaagtcttgttaaatttgcagggagtatcaccacattctgtcttcaagaactcttagatctaaaaatccagacgcttgttatgatggtttaatcatatcttccacctttacacttttcaaagattggtaatgcttctaccacatttatgacaggtaattctacaattgtattccacattcatatttaaaaaggatgttaatggaaattggatttagatagagttgattgatttaagaagtcgatagatttgctaaattttgcaaaagtcttgttaagttttcagggagttttgggaatttgtgaatctctaacagaattatgttgttaaagattttgaagagttctatctatatc

SEQ ID NO: 8529 - DNA, 560 bp, Arabidopsis thaliana landsberg
gtgtatacctttgtaaaattacctgtcatgaatatggtgcaagcattaccaaccttcgaaaagtgtaaaggtggaagatatgattaaaccatcttgacaagcgtctggatttttggatctaggagttcttaaagacggatgtggtgatactccctgcaaaattaactatcattaatgtgataaaatatatctgtcattaatgtgatactccctatagaatatacatgtcattaatgtgatagaagcattgccaaccttttaaaaggataaagatggaagatatgactaaaccaccatgacaagcgtttggatttttggaatctaggagttcttgaaaacggagtgtggtgatactccctgcaaatttaacaaggctcttgaaaaatttaacaaatctatcaaattttaaaatcaatcaactctatctaaatccaattctcattaatacccctataaatatgattgtggagtcaattggagaattacctgtcagtaatgtagtaaaagcattgtcaatctttgaaaagtgtaaatgtggaagatatgacttaaccatcatg

SEQ ID NO: 8530 - DNA, 755 bp, Arabidopsis thaliana landsberg
gacaaagaagacagaatttttacttttaaaaatatcaagtttattgttatcgtatgctagttataggaagacatacttttcacgagtaaaagaacttttttttgtatgtattacacttctagtataaaaatacatgcactataatttctgattcataatttcataatcccctaccacgttatctctctttttgtttttgtacgtcactattgcctctcgatttttgagatacatgttcgtaataaaataaaataaatatttttaaaagtgatgtgtaaacgttttattggatcatatattttaacattttaatataaatagtgatactaggggtttgaagcaaacacagcattcaaaataagtcgctaaaagtaaaaacaaaagaaaaatggagaagtggatgaacttgagagacgaagacttaacggaagaaacaaagactctaatctcttcactttcttcagagaaagggtacctcggtcgaaacctctgcaagtaccaaggctcttggtattactacaactttctccaaggtgttctcaatttccagagaggttttaagcctcaagacactgatattatcgtcgcatcgtacccaaaatccggcaccctgtggctcaaggcactcactgtcgcgctttttgagagaacaaagaacccttctcatgatgatcctatgagccatcctctagtatccaacaatcctgacagcctggtacctgtccttgagatgaatctttaccgggataccaaac

SEQ ID NO: 8531 - DNA, 225 bp, Arabidopsis thaliana landsberg
ttacatctgcagggacgcgaaagattcgctggtgtcacgttggcatatcgtttgcaggagtctgaataaagaagaggacagaaccattcttgagtctatgtttgagtccttttgcagcggagtctgcttgtttggtccgttttgggatcatatcctgagttactggaaagctagcttggaaaagccaaagcaagtgcttttcatgaggtatgatgagataaaaac

SEQ ID NO: 8532 - DNA, 1465 bp, Arabidopsis thaliana landsberg
  unsure (1)..(1465): unsure at all n locations
ggaagaataacaaaaataaacaacgcgttgaaaaaaactgcaaaaaaaaagagaagggggagggcgaaattaaaacaaaacgacgcgtagtctacgtagcattctaagaaacggcacaagtccaaagtcatctctatcaatattcttcttcttcttcctcacgcggttttcttttaccaccaccaactcaacacacacacgaatcccttaaaaccgatcagatcaaacaaaaacgaacgaatcaaaattcaataaagaaaagaacctttcgatttctctcatccaatcgaatcgaaaatcttgttatctctttctctctaactctactgcactcagaatctctctgtatagaaaaaccctaagtaagttgtgatgttgcgagctttagcacggcctctcgaacggtgtttgggaagcagagctagtggtgatggtttactctggcaatcggaattgagacctcacgctggcggtgattattcgatcgcggtggttcaagccaattccaggcttgaagatcagagtcaggttttcacatcttcttctgctacttacgtcggtgtatacgatggtcatggtggacctgaagcttctagattcgttaacagacatctctttccttatatgcacagtaagttataatcccactcttccttccctaaacttgttttaggattctttcttcttttgactctttgactacgtttttgatggtcaaaacttatgagatctctattaccctgatcatttcaatattaaaagattcgaattttgctatgaagttttggtctttgtgaacatgttcaggtttgtaaattgcctcttgaattgattttgtagtcatgttcttgttagtgaaatttacaggattggttttatgattgcagaatttgcaagagaacatgggggattatctgtagatgttatcaaaaaggcattcaaagaaacagaagaagagttttgtggtatggttaaacgatcccttcccatgaaaccgcaaatggctactgtaggatcttgctgtcttgttggtgcaatctctaatgacacactgtatgttgctaatcttggggactcgagagccgttcttggaagcgttgtttcaggggttgatagtaataaaggtgccgtagctgaacggttatctactgatcataatgttgctgttgaagaagtgagaaaggaggttaaggcacttaaccctgatgactcacaaatcgtcttatacacacgtggagtttggcggattaaaggcattattcaggtataacttagttttgcttgcctgcttgttaaattgcgtgtgattacatagcatctgtgatgaagttataatatttaaaaggtgtaatctgatgttgttttttcttttctcttttcatttatataaatgggggcttgcaatgttccaggaatccgtcacacgggctcctgcaacgtttcttcncccagtggattttgtgct

SEQ ID NO: 8533 - DNA, 1016 bp, Arabidopsis thaliana landsberg
ctcctccacttttcgggacaatgaaatatctatcagagaaaataccaaaagaaacttcaagtaaagtcaggataaaccgtgatctatactcttatgaaaagtgagtttcagtttaaagctttgtcgagttttatctcttcttttgctatgatattttaagctcaatctttccatttatgccgaattataggatcatggagacagcaccaacgcttcctgattttgccttggcattgaaacccgatgagtaccaacttccgtctgtcgatgcgtcatggtctgaagccagtctacggactaaaaacacatcaaatcacatatagggcaaccaaagatagagcagtgaatagaatgcatatcaacaccttatagagttacaaagccaatggcctccatagaaacacaaatggtatagctctataactaccctagtgattctccaaatgtcaaataatatatgggtgtgaaaaaagtaccgaattggattagttttcaggtaaaaatatgggaagatgtcgtctgttttctctgtatgttgttgtaattttgtttgtttagtgcaataaaattcgattctttctgttccacattcattactattacttagacaacaacatctacaccaaacaatagcaaactggtaagtttctgcttttagctttgtttgacctactaatactacaaggtttggtctacagaagttacaaaattacagaataggtagaagtttgaactttaacacgactaatcgccagtgagagctcgagggctatggtcaatagtggaaagagacatgcccgactgagccacggctctgacaaacgccatgtttgcagtcaaggtaggagctccccatctatcacctgtcccaaacacagtcttgttcttcatcgctaacttcctcgttgttgggagactcatcacacgctctgagggattgtcatttaccaccctgtcaaaaatcacatcgaccatcaacaacaattgtaatgagtcaaagtattgaactttgagat

SEQ ID NO: 8534 - DNA, 1723 bp, Arabidopsis thaliana landsberg
tttgagattacaaacttatgctgattggattctaaaggcaaaatttaatctttaaccaaaagctaacgatcaagattcaggaggctcgtaggcaataacagtcaatgacaaaaggaaaacaaatgggcacaaattcaggcaaaaaatttccgatctcattgaacagagttagcgaagagacaagagaaacgaatcaaagactcgaaaggattgagagagatagagagaggtaaaccgcagaaccaatgggaacaattggcttgacaaggagcggtgaagtgggaatgacatatcgaacaaagatcgttctccggtggactattcatctcttagtttcttccgtttattcttctcctcctcctcctcctcgtcgtcaaagatttacgtggtcgctggtttttttagtcggtgactatggcggtccatcggaactctgattggttcgatatttttttaatattattattctcttgtgggaccctctcggttatttccggtttgaaaattttcaacacataaaaacgacgtcgttggcatgatgatccttgttgaggttgaaaaaatagaatgggtgattgatgcaacatttttgtattcacttgttcaaaaccactgggagagagatagagcgaataaaaaaaggtttttacatttgacattatctcaatagactcttgtctttgcaggtttaggaaacaattcaacaaagcattgcatgataatagctctgtttctgaacaccccgatcattggatgtgttactaacttccactttatcgacattgtctactcgtctgcagcctgcaaaaataagaagaataaagaaaatattcaaccttatgttcttttacattctcatgggtttaagatgatcgattcgtcagaggtaaaccaggcgaacgacatatatctttagtactcatagacaatgatcactcatgaactaaccatcactcgtatttgcaattataactttttcctgctttttacttgtgttactctgcttatattgaacactacaaacaatggaagttgcaagagggaactatgctatgaaagaaaggatagatatctagtactctatgagtcgttatttaacaattcgtagttcattagcaatcactacgacgctaacaaacatgtatatgttatcttaagacaattctcaagatgtctagtgaactataaagtttaacaaatgccatgcttaactttctcaatttacttttaatcatctgcaaagaagttggttcttaacttcttatatccatcagctaaacgataacctttctaaagtttaacatcttctccctagtatcaattttgtaccaaactaatgcattgcttcccccaaacaaatgcatttaccaaaagagattccaactaacctgagatactggagaagtctctgtaatattattcttgggagctgctaaattagctgaagatgaagaaggtgaatcaaaagcacgagaacaatctgaatatgcagagccaataccaattccagcacctaaagcaatcgatgcccatcttgtaacaggactccctatacaaaatcagaaactaaattatgcacaataccaatctcaaggcaagtaataattcaagaactggaacaatatatgattcaaattggagaaattaaacactctaaaaccctaattcatagtgattctcgtaataacactacacatctatcataaaacagctacaagcaagt

SEQ ID NO: 8535 - DNA, 1683 bp, Arabidopsis thaliana landsberg
cagagtcggttccatgcatcttctaaatacattttatagataaagtatagtgaacacatcagacttgcacttaactgagaccaggactatgggctccatcttttcttctttgaccttagcatctttaagataaactcgaggaacagcagcagggtctagctcaaaagagccagctgggactccttctttctcatctccagtcattttgaaagatggaactctatgagaaaacctaagcatttcatcacatgatatcatgatttcgacaagaccattttgcgcagcacgttcatacactgatgtgaatccttccactctccctagataagccactccaatgcctcgatcactgtcaaattcagtcacgacttccacaaagtcgtaactgtaaggagtcttttgttgctcactgtgactcttccaagtcttggtccaatctccgaaaagtgcccacgtctcgccttttctcgggtttatagtgacatattggcctcgtatggtgtgatacatctcatgagaaaacatcaagtggctactggtctctgattttccatgttcgaatctcccacaagcaggaattggttcctctgtggtctgtaatgattcgagccatgtcacccgtaaactcagctgaggttgcaatactttcctgatctcagcatagtatctaggcatatcatctacaggatcatatagagcccatacttgacctacagcgaaagagctcattgtgttgttaaaatcgtgaaagtctggatcaggacagttgaatggctcatcttcatcaatgtagataatttcatgagcctctcttttctgcacttgcttttttccagggcgaatcagagtctcagcatatctacccttctctgccgacaatggagactcatattcaagcctagatctcttacgagtctctgctcttattgctggtttttctttttttctctgtttcaactccaaatgttgctccctttcttcaagtttcttttcctttaactcaagaaacttgttcttcacttcagtctctctggctgctgcttcatgtttcagttgaaagttgacttctttcttctccagctccatcgatttcccttggatggtctcattaagcaacctaagctcattctccctggcttcaagttgcttaagagatgtttccatcagctcagtctcttttctcattctctcagactctgttgtttgcttaagatcaaagtctttgactttcatgtctaaatcacaagtcttggcatcgatcgtcttagaaatcaaagcaacctcatttttccttgcttcaagctctgtcattagctcttcatgcttcttcatcatcgaatcatggagcgaaccaagaaagttctcttgggcgttgagctgagcaaccaccacttgttcaaactgcatttgaagaaccaatctcatcacattcgcttccattaacagtatcagatcagattcatttcctttctcctgcaatgtactgaaggatgcctcaatcttcctctctctttcttcaacaagcctcagtcgctcttccttcttctccagctccagaatctgattccggacagagacctccttctccatggctcgttgctttagaaaaccaaacctgtcgtcgatttcttcccacttaagtgagaactgaagaattaatgaagctttatcctgaatatcatc

SEQ ID NO: 8536 - DNA, 1136 bp, Arabidopsis thaliana landsberg
tagataggccactccaacgcctagagaatcgtcgaagctgactagaacttccacaaagtcgtacctataaggagtcttgtgctgttccgggtcattgttccagcttttgctccagtctctgaaaagagcccacgtttcgcctttactcggattcacagcgatgaagtgtttgccacgtatgatgggatgtatctcatgagaaaaggccaagtgactttgtatggtatctgtattctcccatttgaacctgccgcaagcagcaagaacagattcctcagctttaggttctaaccatgtcacttgaagactcgactgacacttgttaactttcttgatccgaccataacacctaggcatagagtctataccatcatacagagcccatacttgaccagccatgaaagagctcattgtcttgcggaaatcattgaactctgaatcaacaacacacattactggctcatgatcctcatcattttcaactgtggagacaacaattcttcaatatctttttcatgtgcttcacttatttgcacagaagctgaaagtacagaagccgaatctttttccttgtcttcatcattatggttgcgttgttgtgtaagaggctcagcatccaccgaaggtccatcttgtattgatcgttcttgtacttgtctctgtttcaattccagctctttctccttctcttcaagttccttctcctttaggtcgaaaaactttctcttagcttccacctctctggctaatgcttcttgtatcagttgaaagttctcttctttctcctccaacacaatcgatttctgttggatggtctcattaagctacctaagctcattctcccttgcttcaagttgcttaagagaagtttcaatcagctcagtctcctttctcattctctcagactctgtacagatttcttctgaagaatcttgcttctgaatctgctctaaatcagaaaccctaaatattcaaaaaaaatcaaaagaaacgaacaaattagaaaacaatctgtcatgaaaagtaaaccatactcagacattcatgtgaagaaatataaacacacaacagtaaaccgaagttttcagagtaagaaaaactgaaaaaaacccggacaaaaaaaaaaaaagcaaacc

SEQ ID NO: 8537 - DNA, 1429 bp, Arabidopsis thaliana landsberg
ggccaaagagcttcttggttgggaaccaaaggtggctctacgccaaggactcccacttatggtcaaagatttccgtcaacgtgtctttggcgaccaaaagcaggattcttccaccacttcatcatctacagagtaactgtcgctggagattctcgtttctcttcgttttcatttttaattttgatatttctattcctgtcaatgtagtgatattgaaacctcaccgattttaaagttttattttttttaatgcaatcaccgtagttttgagcttggacatgcgagctgaacaaacaacaaacaaggaacatgtctttaaaagatctttaaaagatcttgtcaattcggacataaacgaaaatgagacgaataactttaaaagatgctactacctacaagaatttatcagttttagcacaacaaacaaggaacatgtctctaagtctctcttcctctcattttggattcctgaggacgataatgaccgagtctccacgtagaaacatcttgcttatgaaccgatctctgttcaccggaagagctttcttcttgcctttcccagttttcggaacctaaaccaaaccaacgccatctcaggcaccacaagttatatatgtagacaaaactgatttcaggataatgaatattggctacctcagtccacatctctctgacattttcaagaaccatgttgcagtgtctgtcaaacgccctcactcgcccaagaagtttcctgttgttccggcaattgattaaaacctgaacataaaaaagttgaccttgttaataacctttccattttaaccactcttcgttatacatttcaatatttcattgtctaacacctagcccatgaaggtcaaaaacatctatccatttaatcagttttcatatacaacatcattatctaacatcagaagctcaatacatctcctagagatctctatacctgagtgttattcttgacgctcatcataagaacagagagtggcccggtgttgaattcctcttcctcagtcttgccctgctaaggacagtatcaagcatgatgattagaaacaacatttaaggagagaacacatccttaagagtatcatacaagcaggaaactaatggagtttataacagcaacaatcaaatgacattacaacaaagggcagaagtgatgaaaacatccaattctctactgcccattcaacgcagaacggaacaaaaattcagtgaaaatctttagtggcacagtcctactcaagtactagagacagctaagattgatgaaactggaaacagtagatgaattatggcaaacagcgaatcgagaaaagcagtagcgagagaaattagaaggaagcttacattggtatcctcttccattggcttgctgcgagaaaaaatatagaaaatcaagagaaacaccacagtgttagaa

SEQ ID NO: 8538 - DNA, 506 bp, Arabidopsis thaliana landsberg
gtacctttacttactactattcatggacctcactacagttttaaaagtataaaagaacttctcttttgatattacaaaggtgactggctgcgtttcaagtcaaagatagaagacaagtgaaaaatacaaggcaacactagtagatttaaggctcataatcaaaacatgttctcactgttgatgcaacaattaggatttgacaagaagaagcgagaattatcataagaagagcttctttcacttggggttcctgaggacgataatgactgagtctccacgcaggaacatcttgctgatgaatcgatctctgttaacaggaagagctttcttctttccttttccggctttcggaacctaaaaaaaaacacagagaacccatgtcagaaacagcacttgtctactagtaaaccacaggcagaaaacagatacaaaagatgttaacctcagtccacatttctctgacattttcaagaaccatgttgcagtgcctgtcaaaagccctaact

SEQ ID NO: 8539 - DNA, 1692 bp, Arabidopsis thaliana landsberg
gacgcctttcaaggtttaaggctggcctgccattagctgaaacatagatatatatacacttttcaaacatacacacacacacaccctctagaaacaaaactaaaccatctaacacagaaacatcctgtgaattccacggcacagtcatgtttactatttgtttcagtgccaaatgttcacttcactaagcaagttcatacctctactattgctcactcagggagatgttttagaccaacttaaaagacaactttaagaggcagtagacaaacaaaagctcgtctctttgtatacatagcaagatactataataaacaaactaatagtgatagataagtaccttcaacggatccaaaagaaatgctcgtatcatcaaaacctacaatgaaagataaagttaccacttaaacaaaagaaaattaaaagcacaaaatccacataagcagattcatttaccaaaactatcatcttctttaaagataaactgaaaaaccacattaagaaacctactctaaaatgttgtatcttctcagcctaagatacagataagaattttcccaaatagtagcaacaaaaaccataatcacagttacgttctctgaatccaaatcaagaaatctacaattcatgccaaagtttatacctttatcagtaaattgcataaaggaatcaactttggctgatgtaggtggtgtattagggctcttattatactgtggtggtgtcactttcttgctcctctctctaagaatatcttcaatctctttgtaatacgacatcttcgccgatccatttcctctatcatgatgcttagctttcttaaactctttcaacagattcctccacttatcagtacacatagtcggagatcgatcaaaccctttttctctcatcttagacgaaatctgttccagagatgttaattagatttggatgtattgaataaaccatccttacctctacggaacatgattaagctacgagtttcgtcttgaacccatgtctctgcacgtttcttcggtgctttaacttcgtgatcttctccactgctttctccgaggagaatctgttgttgtggctgagattggtggagatgatgattgtggtgattgtgattgtggtggtggtgagattgtagatctactgattcgttggtagtggtgagtacatcgatcatcatatcgcgtgtggtgctggtggtggaggaattgtgatgatcgtctttgtagaaatcagtaggacgagatttgtcggaaatgaacattgctgtgtttcccggacagaatggatacgatgttcctttgttcccaccaccgtcaacacaaaagccccctcagaacaaaatgaaaaaaaaaggttttaactttaagttaggttttctctatcttttagtctagagatttggttttggataaggataattacaaatttaaagttttggttatataaattggtttgaatgtctctgccatataaactgtgtaatgtcaatctgttattgcaaatattaccatgtgacgtttgtatcttgatgcatcaaacttcatcaccttggcatgtgatatataactgacatcttgtgtgcatccataagaccaaatgcatcaaagattctaagggagaaaatgtcaaaaaagaaatgagacactcttctttggaacaaaacaataactaaaaccataaaaccgaaat

SEQ ID NO: 8540 - DNA, 972 bp, Arabidopsis thaliana landsberg
gttaaccctgcatacaataatacttacggttattctttctgttatccaagctgttttggaattaagatgccaccatgcgcctaccattgttacatggtttctggagcttttaagaacgtttgcaacaagtgttacctctggccgtgtgctaggcgagtaagccaaatgctctaggtctctcatttgtacgtgtgctagtagtgtacacagacacgtgtttcaagttcgtttactgtttggtcctatgtatttgtttctgtttcaatgatatttcctatttcgaagtaatgtttcaagttctattatgtagtttgactctgtttcatataaatttcctacttgcaagttgtgtttctgtttctgtttcatgcggtttggttatctcggttaagaataatatatttgttatttctcaagataaacatttattgactaattacattagaactatatctttcaataaatgtaagtatatatgttagtacattgacgcaagagttccacagttgtgacagacgtacaaagggttaataaatacagtttactccgatgtgacatatatccaccagaatttaatatacgaattcagggttttcatagacatacacgtgttagattgacatacaccacacaaatatatcatataaattatcttcggtttgcatcggtaatagaagattaaaatatgtacgtacacttataatcgatacgtacgtattgagatttaaactatttaaaaaaattggggctatgtccttgattcttcccaattaacaccattcactggacgtacatcgtatagcagataggtgttcactcatacatctggacgtacaatttttcgaatggtgtgtgtgtgtcagctgaaaaacccaaactatgttccatcaaagtaaacactcatacattgaattgaatcccaccagtgacggacacgtaaatgacattgattgcacccataaattccccaaa

SEQ ID NO: 8541 - DNA, 504 bp, Arabidopsis thaliana landsberg
atttaagaggaaaatcacggaaaaacaagacctttcaccagcaattggacattctggaataggagtacctttcccgatatttaaggtgatctcgcatggacggatacgcttctttagttttcccatctgaaagacggacagtagatggttttaaaagagattacagaatagaccatgcctcaactgaatccacccaaacccgcaacgtcaaggtatgttgtttacaaaaattagtctctgggagacatgactaaccttgggatgttctccacggcctctgaaaaggccaggcggttccactctgaaattaccaatctgaaagataaacagaagttgagtgaggaactcccttttggggaaaatgacaacgttatgggaagatttaccttctctttgacaccatcaacaacagcccacatatatttctcctcttgcttcattttctcctctttcaaagcttttttctcctgtaccacatcaattaaactatgatataagtctcac

SEQ ID NO: 8542 - DNA, 1158 bp, Arabidopsis thaliana landsberg
cggaactttcctggagagttcttgaagacatgaggtggaatcaagaatggaggagatagtgaggaatttgattcttgatgcttctttgtgttgaggaaacgtccaccagagcctctaactctcttgagtgcatggaggtgccgcgactcgtgaagatatggctgcatagtttcatacaaaaaattggtcttgagtcaagactcttgacataataactgaaactttctgcatataattctatttatcagagtggtgcaatatagataaacaaacatactttgcggactttgatgagcttgttctgagcttcaagctttgcacggcgctctctgccgcggagaatggcttggtactgttttgcattgacgaaaattggttcgttctctggaatgttgtgaggcaaaggcattctagacggaaccaaccctctgatttgaggatgctgcacctgcaaagatttccataacaaatactttcataaagatacaagaaacagtattatcttgaaatgttacaattgtgtattaccgtgtgttgtgatgcataaggaaaagacaagaaaccattgaaatgtggcgttacattgccgtgtaaaggccaagaagccgcctgtgagcatatatagacatcattaagatagtattcagctttaaactcagtctcatcttgaactactacaaggtttataataaggtcaaagatgatagtctaataattaacctcaataggaagaaccactgaatcttgagacaccttcgatatcgaatgacttccaataggattctcagggtcttctctgtaacctgcaccaaaacaagaatccatagataagctgtaagtaaatgcagttgccgcagcaatgtgaactcttactcaggcgaaaaaggttaaaaagtggtggacctgagagatgagtgacaacaatgttgtggccatagcgattagtaggttcacttaagctagcaacttcgctatatgattctcctccagtggattgagtagaggaggaatcatagtgctgcatttgagacccagtgttgtttcatctccattgtcaagcttatagtgttgtcaccggtaaagaatgatgatccctggacatttgagttggtgaagccagagttatcccaagaaggtgcaggccaaggcaagtaatcg

SEQ ID NO: 8543 - DNA, 2214 bp, Arabidopsis thaliana landsberg
cattcccattagttacacactctgtcagttacaacaagattaaactttttaggttagtcttcttcttcactctttttatccattcctcacaaaaccaaaaaagtcttcacctttgcaccaaaaaaaaaaaaaaaagtcttgacattgtttcgtcggtcgtcacttttgctagctaataaaagccagaataaataattggattaaatcttttttttcttttcttactgtttattattggaacacagctacaaggagggtaaagcttcaatctttcccactcacattcattttctctggtctttgattgcttttcttttcactgcttaggttctttgtctgttaggtttagagagatcctttccaaagatccaaagctggaaactttctagtcaatgctgcttaagatctgactttttcccttcaatgtcgctctgaaatcccctaaatttttgggcccatcaggttggttcttctctcacttatgaaccctagtttctaattgtaagttcaattcttgaatttctctagactctgttttttgggtgtttatcagacaatgcgacggatttttgtgtgttctgaatagtttctattgtcggtagatattttttagttttcttcagctgtagttttctttccagcatagtgtttagctggcgtttggtctgagaactgaatattctggcagctggcaattcttgggacttaggtacaaatacaatgttggttttgttgaatctgatttttcttagtccttttttgttcaatttcttgtctttttgcttgttcctttccaattttgacttcttaagagagaggctatgtgcattttctttatgggtttggttagatttctatgtctgagtagctcaaatctaatatttggtataagctttgtgtttctggtttgttttgattactttgattcaggtcttgaaatgattcttctcgaacttctttttttcttgtttaagcagcaaaagttatggtttatacaagagttttgagtttaaaattctctgccttttcaggtgaataaagcggaggtcagaagatgggttctggtttaaatgacacattatctcggaactacaatggtttggagctatgggagataatagtgattgttctctctgcgatattccgttgcagctttagctatatcgctatggcttactttcagaagaaaaacctctagatcttcttctaatctaatccctggtagtcgccagattcctactagtgttcctgaagagattaaagagattagagtcgacgaggtttctttcagcaatggtgggaatgaatacccctctattagtaagaaatttggcgataaagaccccgaaaaagggataaaagcagagtcagaaaatggcgatagtagccggtcaggctcgtttaatcacttgaagaaaaaagacggatcgagcgtatcttctgctaatcctttgacagctccatctcctttgtctggtcttcctgagttttctcaccttggatggggacattggttcactcttagagatcttcagatggctactaatcagttttcgagggataatatcatcggtgatggtggatatggagttgtttaccgcggtaaccttgttaatggtactcctgttgctgttaaaaagttgctcaacaatttgtaagttttttttcacaaatggtgaatcaagattcaagatttcatttcttgaatcctttttttttttaatggtgatgtttttgtatttcttagaggacaagctgataaagacttcagagttgaagttgaagctataggtcacgttcgacataaaaacttggtccgccttctcggatattgtatggaaggaacgcagaggtatgtatgttctgttgttgaatgatctgcagtttttcttctgaattttcactaaacatcaaatgcggtaacacttaattaggatgctggtgtatgagtatgttaacaatggaaatttggagcaatggctccgtggagacaatcaaaatcatgagtatcttacatgggaggcacgagtgaaaattcttattgggacagccaaagcgtaagtcttgtggcagctatatcattttgttttcttgattgtgttttttctttattctcatctgaggcgatgggtggtgacgcaggctcgcgtaccttcacgaggcgattgagcaaaagtggtcacagagcataaagctagtacatctgattgatgc

SEQ ID NO: 8544 - DNA, 872 bp, Arabidopsis thaliana landsberg
cgtaagatcaaatttgatgtcttttgtgttttgcatactcagccctacaatggtgagtttctgcttgttcttccgatgattgacagtgactttcaaaccaatcaattcctcttccacatcacgcctcctaaactgacgcatatcagaccagttaaagtacaacttcaggtattcaatgaccgacattgctttgcggaacgccaacaccgagtaatccaaacacaaagacaaaccttgtgctgtgggcttcagagtgtggcgataccctttcgcagctataaccccgaaacgaaaatcttcatctggctcagtttcacgagtgaaaaagcttttaccaacagtgatcatacacttggaaggatgctccttcatcacaacatccattccttgcaacacatcacgcggattgaaagacgatctccctgtcatgtactctttcaagtcacctagcttcagcacattcacctgtttgatagtgaacgtatagcttcgacctctcatctcttcagttttaggatactccaccttgtatgaccccgtaggtaactcaaccgcactgaaaatgttcttctgaccatcataagctgtcatagctaagggaaactcatcgggattgtcagtgaacaccttgtccctaaccatagctagctcaaacctcgaaaccttcttggtaggaatttctcctttgatttcaacatcataatgtcttataacactttcaggattgaaattcactttataatgattcacatatagattaacacgccgcacagccacaactccgcctctatcaggtcgcttcattggttctttcctatcagaagtcgcaacttgcaccgatggcttcagattcataacttagctactgtcac

SEQ ID NO: 8545 - DNA, 1087 bp, Arabidopsis thaliana landsberg
  unsure (1)..(1087): unsure at all n locations
ctatcccttctatacatactcgaagacctagtttgagcggataaaccaagccgcatcaaaccctaaccctaaattttttcttcttcttctctgatctcttcggcgccggagctcttcttctccgatctgattccgtcgccgcctctcttcttcttcttctctaatctgttatactcatcgccgcctctcttcttctccgatctaattacggcgcagagtctcttcgccgcctctcttcttcttcgatctgtgctccagaaccgccgcgtctcctcttctccgactcgatcggttttgcctcaaaggtaatttatgtttctccaatctaagttcttctctcaaatccgacttattcttcttctccgatcttactctttttcccagatctaactcttcttcttcttctctaatctgttatactcatcgccgcctctcttcttctccgatctaattacggcgccaactctcttcgtcgcctctcttcttcttcgatctgtgctccagaaccgccgcggctcttcttctctgactcgatctattttgcctcaaaggtaacctctgtttctccgatctaagttcttctctcaaatctgacctattcttcttctccgatcttacttcttttttcccagatctaacacttgatttgttttttgtgcaagatgccgtcggataatacttatgtccggtttagacaacagcagcgtgacccgttgcatgtcaattctccgcttagtggtgggaatatctcaggggttcaaggttcaggttcaggttcaggttcaaccgttccaccatcgcctccaacgccaacgactcagccttctgtcaatcattctgatgttcaagctgaccgtctaaacaatnnnnnnnnnnnnnnnnnnnnnnnnnnnnntggtcgtgctggcttgacaaggctagacccaaagcgtcctccgggaactctatggtaaggttaagcttatagtctctggaattaggtcttgtaagttggttagttctgccttagaagtttggtaagttggttggttctgccttagaagtctctggattttggttggttctgccttagaagtttggtcctgcc

SEQ ID NO: 8546 - DNA, 2149 bp, Arabidopsis thaliana landsberg
tagtgatccttatcgatcagaagctcccatactcctgcagttaatgcagcgattgcaccaattcccatggcgctaaagaaacagatggagctggtgatgtcaaaatcaatcaactgctcaaattcagggattgttctaaacctcctccaggtatcactagacgcttgccttaaccctttgttgtgagctcccacgtgaacaaatccatatctatttccacccaaaatgatatgattggcaatccagttgcagcctggggtacttgcataaatgtcccgattacaacaccgaatcgttcccctaaagagtacaataagtggaacaagtgttgaaccaatacaaacactcccgagctgctttttcagagtgacgccaagagcatcacatgcattcatgagatcatcacggctaaagtatacatatatggctttcgaaatcgcgacttcttgtacgtttttgataacctgcattgtccaggcaaggtttatcacgatgatggagatgaaaagaatatcaagacgtgttcctgtagcagtagctccaccgattccagcaaccaagaaaccagagtaaaagacgcttatgatcactgatacaactgctattgctctggttcttgcgggtaatatccctgtggcggttgacatcgtctggaaggtgaattcatgcctgttcgtgacgtgaagcgaaccatacactgcggtgacgatgctatagaagacaagaagtgcacctatccatagaacgacgggattggatttgtcgaggagaattaggaagagccccacggagattgtgaataacggtgtgaaccagagcgttgctttgactgtggctcgtatgttgcagacgaagaagcagttccaggctatagagaggattccggagacagcaacagaggataacagaggagtgtaccatttcttgggatggaagtttggtgatttggtgcagacgagacctcgtagcgtgagaaggatcacaaagatcgagattagggttagttgcgtgtagaagatacaagtgaagaggcatctgaagaatcttccggatagtgtttgcggttgctgttgctgttgctgtgcggcgggaggagttactggttgttgttcgatttcctgcaaaaaagcaaaaagataagatgaagaatgtggagacacgacgctaatgccgatcggggaagaagaagaagaagaagaagtagagtaagaaccattgagaaagacgaaggtgggtcacgcacgtcacggttgaggaagacgaaggtgagtcacggttttcttgcggcggaaacggtgacgaaaagtcaaagagtcgaagagagcgagagatgaaggagaagaaccgagagagttaaagtgaagacagagaaagaaagagacgaagaaagagagaatgaatttatatagacagaggcaagggaaaaggagagagatctttttggtcttggttcttgaaatcttcacgtgataagcaaaaggccgttgtttgttgttatgggtagttcttaaaagtctctacaatttcgatttgaaattgatttaagtctctatcgctctctcattctcgattttccccagtgtttcctcgtattgcgtttcttggtacacaagtttcacatactactacatcatttggttgatatttgtattttttggcgtcatgtattattattaaatacaactttccaaatcaaaatcatgtattaatcttaaattgattaatctgtgtaacttcgttccattaatgtatttttttttttgactcgttactacattaacataacaatttgtagtcatgtgtgcatgtatgttattatttttttgtccaagttcatgtatgcatgtaattagtgtacatatgtagacgaagataattaagggtctaactaatggatatatctttcaaattaatgctctaaggtcaggctctaaatgcaagtgatgcaacattcacgattggttttctctgcagtgaaagagagaatggtacagtaaacagtcaagttttatttctgtattattttaagtttttccattgctaaatttagatgaaaatggcactatagtaaatataaaattttaacaaggaataaatgtcttcccgaaacatgtgtggacgttattcatgttttctcgctttaggaggt

SEQ ID NO: 8547 - DNA, 180 bp, Arabidopsis thaliana landsberg
aacacaagtggcctaacgtgtccaggaagccgtttttcgaatatcccttggatctattgggatttgatggtatcccgaggctaagtcgattttagaaaaccacttcgccccttttaattgacccaataactcatctatctggggtataggatacttgtttttcacagtaactttatttaa

SEQ ID NO: 8548 - DNA, 1423 bp, Arabidopsis thaliana landsberg
tgtcgtgaacaccatcatcccaagcaactccaccatctccaccttgtgctggaatagtattggaagaaggagtcaatggtgtggacgaaggaataatataagctcctagagaatggatcagatcacttgaagttccatggaatccaacgattttgccgcctcctagctcagcttcttctccagaggttagtccaaacggctgagaagtttttcctttgaatgtcttgaatataagagctgtgacgatctctatcggtgacccgaaaagtttctcgtagtaaactttcacataggtgatgtagtcttcaggatcaatctcaaactgcaaaaacaaaaacacatcaatactagaaagaaagaaaaaaaaaactttttgggcaatttcaagaaatacaaagatttgtgtacctcctctgttccaagtagtgtttgcttcccatgttcgtgtgatacgatttttccatctttctcgtaatcaaacttgacataaacaacaccagagtcaccttgtccaacataaactttctttacattgtcataagcaccaccgtcgtcccaaacatctccaccacgaccaccttgagcttccaatttggtcagaccacctgataccggcggagtcagcggtgtagtcgacggaattatataaactccaacagaatggatcaaatcacttgaacttccatgaaatccaacgattttgccacctcctagctcagcttcttctccagaggttagtccaaaaggctgagaagttttccccttgaatgtcttaaagattagagccgttacgatctctatcggtgatccaaagagcttctcgtagtaaattttcactgatgttatgtaatcttctggatcaaccacaaactagcaaaaaaaaaaaaaaaacaaccaaaaatgatcagttaatgttgatgacaagagaactctcattgaaaacaaaatatttacctcctctgttccaagtagtgtctgcttcccatgttcgtgtgatacgatttttccatctttctcgtaatcaaacttgacgtaaacaacaccagaatcaccttgaccaacatacactttcttgacgttttcgtaagcaccaccatcgtcccattcttctcctccacgaccaccttgagcttccaactttttcgccatcttttcttcttaacctaaagttatagtacccatttcttagaaactgtaaacgcacaagagccatgaacagacactactcaagcactttcatgatgatgaaactaatctaatctgaggactataatacttccactaggacattactttaaacaatggtatcatattctcatagattcattatcatataaagaaattcaataattcaaataaaactagtaaaaatcaatataacgattttgtgaaagaaagaaaaaaggagtacattaaagggaag

SEQ ID NO: 8549 - DNA, 992 bp, Arabidopsis thaliana landsberg
catacaatataagccctagaatgttgaactgtatttgttcttctttggagacagagctgacaaggaaatcagcttcgaggacaacatcaagtgacaactaccttttctgtcctgaatctctcggtgtcttgaaggaagaagagcttcttcattttcaagagcattgggcaaaaggcgaaccagtaatcgttaggaacgctcttgacaacacacctggtttaagctgggagccgatggttatgtggcgggctttatgcgaaaatgtgaattcaacatcaagctctgagatgtcccaagtcaaagcaattgattgcttagctaattgtgaggcggagatcaatactcgtcagttctttgaaggttatagcaaaggaagaacatatgaaaatttctggcctgagatgttgaagcttaaggactggcctgcttctgataagtttgaagatcttctacctcgtcactgagatgagttcatatccgcgttacctttccaggaatatagtgatcctagaactggaattcttaacattgcatcaaagcttcctgaaggatttatcaaaccagatttaggtccaaaaacttacatcgcctatgggattccagatgagcttggtagaggcgattccgtgactaagcttcactgcgatatgtcagacgcggcaaagctttcaattattttgtttttaacactcttggtttggttttaaatagtccatagactgactttgcgattcatgtaggtgaatattctaacgcatacggccgaagtgaccctaagtcaagaacaaatatcctcagtcaaagcactgaaacagaaacacaagttacagaataaggtcgataaacagagtactgaagactgtaacgaaaaggaagaagaagaagaagaattgaacatgccagagatttcgagcaatgaaaatgaagaaacgggcagtgctctttgggacatatttaggagagaagacgttcccaagttagaagagtatcta

SEQ ID NO: 8550 - DNA, 2293 bp, Arabidopsis thaliana landsberg
cacgctgcaatgacaatagtgtacgttctttgttgtaatttagtcgagaatccatctccgacgttaggaactatctatcatctttcctttttttctttgcacaaatatcgtaaaagtgatacgcacgattatctacaccaaaagtggtcactgacaatgtacgaaaaaacttagaaaacaacttaaaaaaaagacagttcaaaatgatggtatttgatcagtgagtagcttcttcagtattaaagctcaattacatttattcaacctatggttatgattatataaactctgttttctctccaatttaccctgaatatgttagcacttgtaactaacctaattctttctattaatttcacatttaaacaaacatatataaatggattaactaattcttggatccagaatttagcttaccatacttaagatcaatccatggatctttattataaaacttgaagcgaacgctaagactagtagagtcaataaaatagtaaaccaataaacctgaagcttttacaacaactaagcaagtcctaaaggaagtctccacacaaagttctgtgctttttaactctcgaatctgaattctgaccttcactatttgaaaaccattcaaacctatcattcttctttacctctgcgaataaacataactcttcttggtttcttcccgggtaagcccgactagacccgacatctattcttgtagacggttctgaagatataccgagcctcaaggataaatcacagaccctctcagttgcttcttctgagggctttataccaataggcatgccaatgattatgggcgcttcagggactctaaaagacatgtcagcttgctgcgtttgattattaccttcgtaatacaaaggatagaccgaacccaagttgactggagctggagcaggagcagaagcaggaccagttccttgtctaattgccaatggcttttgatgcatctgcatggattcatgaagaaacgggtaaccgcgaggagtagctacacgcttgttgctgttatcaagtacatcaacagggactgcagcttgaactgtctggcttggtttggttgatgattgttgagcttgctgacgatattcatgatggtaagacggctcattagtcgacgcagaaaccggttcctgaattttaggaccgaggtaagtccttccgctactatgtcgttggcttcttgaagctcttacagcaatacatcccaaattaagagcagctaaccatataaaaaaaaaccacatcaacaaacaataaacagtacaaagcactaacttctaagtagtttcaataaggatcactagagctaaagagagaaacaaaaatgacaattaccttcaacacatggaggcaaaagaggaccagtttctgtactctcatctcttctaataattgtatcaatggcatcatttactctattccacatagtatcagcatctgtatactcttcctaatggaaaccgaaacccaattgtcattttgtgaagctgaaaacacactaaaaaaagagaaggaaaatttgtttaaaacctcggaattggctttagagtacatgatttcttcagcttttaacacaaccacaggcaatttctcctgccattctttgttcttcctcgtcgctgcgctatgtgcttccattgcgagtctgaaatcaaacaaagaaaaccccaaattaagatacaaagaaaccctagcgtacggttttgagaaagatgagtgaatgaaaaaaacctgaaaatctggcgaataatcgaaccacgaataggttgatgacgatcgctatgccaagctcgtttcacacactcgtaaggtcttggtcctggcctcggcattttctccttcttcacacacttgagcagtgacacactcagctacaaatcgaagtaacaagtcactcactcatcaaactaatcggttcaatttctatccgggagtattttccgatcagcgagttcgatgtacgagtcgccaaatggtgtggaaagaaaaatcaaccttaaaactctttttaaccgatccaaggaaacagatctgaagctttgaagctctgaatcgtttggagatttcgtctacttgagctcataccggtcacatcttcgtcatcatcatcgtcgtagaatctccgattgttgtctccatcgttgccgcttctggaaatggaaatggaaatggaaatggtgtgattcgggaccgcttctttaaaaacgaaccagttttgtgatttgtctattatacccctatttgtactaactgtcgtttttttttttttttttgt

SEQ ID NO: 8551 - DNA, 436 bp, Arabidopsis thaliana landsberg
gttgtcccatatatatctgcaatactatcaaggcacttcttcttgtgaagctccatgttcagatttttcaagtatctgaattatccatacgtattagcttaacttttttaagcaaaatctaaatgtctcaaacacaaataatactagttcacatactatgtttgtactatgttgctacttgttaccttaaatcggttttgtagcgcttgagggcttcagctttcttggaatggtgaagagggccgattagcagcatttgaggagtgtaagcctcgaggttcactttgcgcaaccggtctggtactctatagatgcaacaaaactctggtctaacggaagaagaccaaagaccgggaatcttagaatccgccggttgagtcgtctctttagaaagccgtagatattgaatatatccttcgcccattggtcttgttag

SEQ ID NO: 8552 - DNA, 687 bp, Arabidopsis thaliana landsberg
cctctctcaagtctctaaaacatgtcaggagctatgacttgctctgcggctgatctctcagccctactcggcccaaatgccacggcagcggctgactacatttgcggccagttgggttccgttaacaacaagtttaccgatgcagcctacgctatagacaacacgtacctcctcttctctgcctatcttgtcttttcgatgcagctcggcttcgctatgctttgtgctggctccgttagagctaagaacacgatgaacataatgctcactaatgtccttgatgctgcagccggaggactcttctactacctctttggttatgcatttgcctttggtgaatcctccgatggattcattggaagacacaactttggtcttcaaaactttccgactctcacctcggattactccttcttcctctaccaatgggcgtttgcaatcgcagccgctggaatcaccagcggctccattgccgagaggactaagttcgtggcgtatttgatatactcttcttttttgaccgggtttgtttacccagttgtctctcactggttctggtctccggatggatgggctagtcccttccgttcagaagaccgtttgtttggcactggagccatcgactttgctgggtcaggtgttgttcacatggttggtggtatcgcaagattatggggtgcccttatt

SEQ ID NO: 8553 - DNA, 815 bp, Arabidopsis thaliana landsberg
accccatactatcagacatcaaatcagagggctcaccttggctagcagtagtacgtagtctaagtggactgtgatgatggaccactactacttgatgttttctgaaaacgactactatactccttaaacaaggaagtcaaaacattgttgaccttttcagccatctctttagcatcagtagtatctttcccataaagctttgcaaaacacatattagcaaactgcattttcttccttggatcaaagacacttgcaactatcagataaacattaatgtttcttgttccatcccaatacttaacaaattttcctaacatagctttagccttaattttcagatccctgtcaaaattattgcctagtgacaccaaattcgtctctatagtcactatctcaccatagcacttataagaagctactgaattagaagcagacacgaccaaagtggagttgtagaatatgatcagaaatctcactaacctctcgactgcattccaatcagctcttgtaggtggcccgatcttgctgtttccatcgtctacttcattgaagtagtcattatacaacttatcttcagcgtccattttatcaaatgccaacctgaactccatagcccttttcagcatcaagtaagtagagttccaccttgttttgatgtccaacggtaaactccctctaatcatcttgcctgagacaactttctgggtcaatgaatcacaccttgaaatagaagaactcacatactgcactgaattgcgtatgggttgcacatgatcacccaattaaccaaaccctcctggcaaataaattgatta

SEQ ID NO: 8554 - DNA, 1514 bp, Arabidopsis thaliana landsberg
  unsure (1)..(1514): unsure at all n locations
atgtaaaatagtttgtaaaagctgaattaagtttcaactcggttagaatgtcattattcatatatagtcagagactcataggtattaggtaaccgattattgactgaatgattaatcatttcattggataaataccgactgagaaagagaataaacctaggcataagaggttttgcgtaatttgcagatcaacgacatcatagtgatattggtgctccacacgtgtggactaagtgtcttcatgtccatctattcctccttatagattctttgcacccatacgtttttttcttcggatttagtactttcttatcacacatgcatatcttaatttccgtttcttttaagttatagacttctaaattcaaaagacttgaacctacatacagaaaaattactatggtttaattactacaaatctatcttctcttattcattgaatatttatttgattgtggttatttttactgaaaaaataaattgtacagagcataattagagtagaagaagctgagaagtgattacaaaaatcaagactaatgtgataatatatgatagacaaaaatcagtaatgcatcatttgcaagcgctacatggatcatattgttgcacgaagacctatttggaataatgatgcaacttcgttgagataaaaagctataattataaattaatttaaaaaataactataattataccaccttcatggtgttgcttgcaagtccaaccattaaacaaactttttttagctaaagaaatctgataagatgtcaaattaagatgattatttaataacattcttattcttttattgttttatgtagttttaatacgtaaattattttaactagaagtatgtttttgttataggatttacatgacttttaatcagtataagagcatacatgtggtttggtttgtttgtttctatagttaatgcaaaagatttgtaagttttattttgtatgtctgcttttgttgattcattaatggatattttggattctgcaggttagtcaagttgttacctcgtacaaatttctttaatactttttctctttctttatgaaattaattatgtgatatacagtgagactatacatcctaatattgtgctctttatatattacgaacaccaatactacaccataacaacatcaaatcatcaaagacagagatgatacatgcataagtttacaagacgtaccgccattattatcagcataaaatgtacacaagacaaggaggcggtttcatcatgtacaagacaaacacaaacgacacacacacatatatattaggatgtttctttatttatttttatcttcataagtatggtcactatgatgattaagccttgctctggttcttgagaatgtggtcatccatgtcagcagccaagctcgtgacgaacttcatgtacttgatgggctctggagagtcttcgtagcgcttctcccaaaacatagtgactttgcagacgcaaccttcctgagacttanggacgaactgga

SEQ ID NO: 8555 - DNA, 2218 bp, Arabidopsis thaliana landsberg
aaagggaagggggccaacataccttttccagggggctggtcaacctcaggggaacatggaattttcggttcttccactacctattagcaacacaaaaaacccagcaataagattcaaggggtaagggaaaaagctttttgatcatttcacggtgagcgtgctatctcgcaaagaatgagacagaaggtcatcataacatagatatttctggctttatgccaccatgtgatcaagtagctttcttctttctccacttcaaagagaaatctccatgtttataaaatctcttgaaagcaaaggaaaccaaatacattaattaagtggtgtagctggcccacttaccagatatggagtccaaagccaacaagtcataatctgaaacaagcccaacctgcagcaacaaagaatccctcataagcatccaacctccatctgtagattagattcagctccctttcaaaacttaagacctgaataacaaaagttgatactaaccaatttccagtcttcgtcaattacaggaaatccagtgattctattctccacaaggagttccagagctgtagagaaggcacaaaagaggccataagtatgaaaacaaggcagtatcttatgctccaaagaatctgatgaactttaaaggataacaaacagctaccttcatccacagtagtcgtaggtttcaccacgtgcaagtcctctttctttgtcatgaactcaccaacagtgtacactccacttcttggctacagtaatagtcatatacaaaactcaaactaatcctctacttgtacaatattgattaaccttccaaccagtggctgcctaaattctcaaaatctcgattccaaaattggtcactatctcattacttaagcgagtaagcgactttgcttcctcaaatttccactaggctaagatcgaatcccgtatctaaaatgtgcaatctcgaagaatccggtctaagctagtaactagtataccattcaatcgttacatagaatcgttacaagaagctaatctacgaaaattctcagaatctaagacacccaatgatcagatattcgcttgcataacaaaattcccaaaacggaaagaggaatttggaactggaaattgagtgaaggagcttaccgaagaggaattcgtcatcaacgtggaaccggcggcggaagaagctgagggaatccgggatttggaagggaagcttcgagagaaggtgaatttgtgacatggctgaacggagagaaacctcggcagaagaagatacggcgaggaaggagaggatgattcgcgtaggggagtgaaggagagtggaacagagtaaaggacggcgtccattggccgtcggagagagatcgccggaagtaaaagagtgatgatacaggagatatgcgtcaccgcttgttcgtattgggaaaagcgaaagtgtgactgtgactttaatggctaaacctcaaacgatgtagttttggaattacaatacaatttatgcgttaaaaaaaaatcgaacacgtggccttttaacgaaatctgcaaattgagattagaaaaataagaccgttgtaaacgctccttaattgtgcgattcaatttccttttttgttaaggtccaaatatgaaaaaaggaaaacaaccggatgtttcctttttttctttgcgtgagcctttccttataaatattcatctgtcttgtgttgggaaatcataatttttctttaagagacaaaaaaacaaaattcttcttttctctgctactgttttacaaagacgatcgtcgatttcgaaaccgtgaaattgatgatccatatacgtcgccgatctttaccaacgccatgtcgagagaggtctctctaatatttcacaatctctgatcaatcatggaggattaatccgacaaggttactggttagagatcatatccataccaacgccacttggagtggtctctcgtgtttgatcaatcgatgctgatttctagccaaccatggatgcatcttatgcggacctgtcttttctttctgaaaagcgcaaagaaactctcatcaacaaccgacgagtaggtttggagtttcaatgactcagaatcagaccgttaaggactcgccctaggagagaagatgaagatgactcagatctctcatctacaatttgcaatcttggcccaatatgatatgggcttcgcaaaacagcgtatgggcttttagcaagcaacaat

SEQ ID NO: 8556 - DNA, 2944 bp, Arabidopsis thaliana landsberg
acgtcctcgagttttttgaatttatggggtttaagtgtcctgaaagaaaagggattgctgattacttgcaagaagtgagttttccacaaacattcgtgttttttttcatgaaacttatttattaactttcattgtactaatcaagactacactattcatttagattttatccaaaaaagatcaagaacaatattgggctaatccagagctgccatatcgttatgtaaccgcaaaaaaattcgaggaaggcttcaaaattcatcatttcgggagagcaatgcggtctcagcttgcaacgccatttgatcgattaaagaatcacagagcagccctgacaaggacaacatatggagctagcaagttggaactactaaaggcatgcttagaacgagaaagcattctaatgaagaggaacttacgcactttcgtcttgaagtcacttcagctaattatcaatgccattctaatcggagttgtgttttggcaacaaaagaactatcccagcacggtcgaggatggaatcatctacatgggagctatctacttggaagtgcaaatgattgtgttctcggggtttttcgaacttccaatgactatcgataagcttccagtgttctacaagcaacgtcattttagcttttacccgtcatgggcattctcgttaccaacgtcaatcatcaccttccctttatccttcgttgaagtcttcattgtggtcttaataacttatttcaccattggatatgatctaaccgtcccatcgtaagtttatcttaacaaaccaaaaaaaaactttggtctatacttactattaatatatgtgtgtatgttttttttgttactataggatcctgaaacattacttagttctagcattgtgcggacaaatgtcttatgggctttttcgatgtatcgctgcagtgactcgaaatcatgtggtttcaaacacaatgggatgtcttgctgtgatgtggctgatgacattcagcggatatgtgttgtcccgaagtaagttttaaagaggttgctgctggacatattcattctaagtagttcatgatacataacctaattagtgatcaattttgtttcgcagatcaagtgcataaatggttgacatgggcgtactggacatcaccaatgatgtatatccaaacagctgtttcggttaacgaatttcgtagcgagtcttggaaagatgtaatttctaagaaacctttctttaagttttcaacgtcacattttaaagatatcaaacttaaccgtgtagtgtacgatttccagggtctaggagtagcggtcttgaaatcgcgaggtttttttgtagaaacttattggtattggattggacttttagcattgatcctatccacaatcttgtccaacatcattacatctttgtgcctggcttttcttaaacgtgagtgtcctcacatagtcttcctacatctatgaattagataaatactaactacatcatttaaacgtcattttttctctcttgtagaatatggaatatctaagactgcggtgttaccggatgaacgagaagaagctgatagcaacaatacgaccggcagagactatacaggaactacgatggaacgattctttgatagtaagacctagaatatctctctcttttcatctcctttaaagtctcatgatcccaaaaatagcttaaattatataggagttgtaacaacaagaacttgcaacgacaaaaaactgcgtatacctttcaaacctctatatatgacgttcgagaacatcacatattctgtagacaccccaaagggtatgtgaatgacatatttaataagagtagtgtatttgggcaagaagttaaaagaaaatataactttgtaggaaatgaaagaaaaaggcataagagagaataaactagtactattgaatggattaagcggtgcttttaggcccggggttcttacagcacttatgggcgtgagtggtgcgggcaaaactactttgatggatgtcttagccggacgtaagaacacaggatacatccaaggggaaatatatgtctctggatttcctaaaaaacaggatagctttgctcgtgtttcgggttattgcgaacaatctgacatccattcccctcttttaactgtttatgagtctcttctttattctgcatggttgaggttgcctcctgatatcgacacacatactcgagaggtttgtgtttcttaatgtatgataatgagtaaccattataagatccaagaaatcatttaactaatagaaatgtgcagctctttattgaagaggtgatggaattgatagagttaaaagcattgagggagatgttggtaggatatgtgggaattagtgggctttcgaccgagcaaagaaaaagaatgacaatcgcagtagagcttgtagctaatccttctattcttttcatggatgagcctacatccggcttggatgctagagctgccgcgattgtcatgaggacagttcgaaacactgttgacactggaagaactgttgtatgcaccattcaccagccaagtattgatatttttgaatcctttgatgaggtaactatgtcttacttataccttttaccttttattacttttacctttagctatgcacctaactttctttttttagcttttcttgttgacaagaggaggcgaagagatctatgttggtccaataggccaccattcctctcaactaatcgaatactttgaggtaagaagaataagtaaagttattcgttcaacaccatctcattcttcgcaataaccgaacaatatactttttagggaataagaggagtaggaaaaataaaggaaggttataatccagcaacatgggcccttgaagtaacaacaagggcacaagaagatgttcttggtgtcacatttgcgcaagtatacaagaagtcaaacctctatagggaacg

SEQ ID NO: 8557 - DNA, 1220 bp, Arabidopsis thaliana landsberg
gaatggtggtgaaatacgatatcaaaattatccattttcctcccatatttcatcagtgccagccaatggttttaaaataaataccgagacaaagaacattcttggaatcttttggtcaaacataactatttggcttagtttaacttttacaagttaatagtattaaattcgggtagttgggtccagctctaccatgttgagattttgggaccaaaatatccattttaattagaatcttatttcgatatttgttttgtggatataacacgtgactcatttcgatactaaggaaattagctgtgagtaacacgtgggatttccgtgggaactatttcttagtactactacgatagtacttgcacataacatgtggtgattaaaactcattaaatccctctttttatcaaactaaattatgaaagaaaaaactaaattatgaaagaaaaaataaatcaaactttggtattaaacagaagatagaaattaccacattgatcgttcagttgaaacagaaagaatgtgatgcatatctcgagatctattagaatacattaacatgcaagttttatttatcacattttagtctcaattaattaaaaaaatgaatgtttagtgaattaatgaattcctctaaattgtagatgctcgctaaaaaactttcatgcaaagtaatagacgatagtgacgatggtgatgttgaatgtttgataacgagatagagtacagaaagaaatgttgaaattataaagtgaaaactttagagagacaaggagacaacgtcggccacaagaattaaggcttcatgctgtctcgtgagtgtcacatgcgcgtggccacaagaattaaggctaaagagttaagattattttgttcaaaaacaaaaaagattatatattttaggtgaatactttaatgttcattatagccaattatatgtatattccgtgtattagtaatttgccgaacttactaactaaacaatttttttttggattattaactttataagatatcacatgataaacaatctgtcaaaaaaaaaaaaaagttatgtcagcaatgataatatgctacgtcaaaaacaataaaacaatgtgcaaattatatacttcctaactaatccctgccaatgacaatatctttgttgatttagtagacaaactatggaaaatttcttaaatcatttctttcaacaatttatgagcgcaatcccatatgtc

SEQ ID NO: 8558 - DNA, 574 bp, Arabidopsis thaliana landsberg
  unsure (1)..(574): unsure at all n locations
ctaattaatccctgccaatcacaatatctttgttgatttagtagacaaactatggaaaatttcttaaatcatttctttcaacaatttatgagcgcaatcccatgtgtcnnnnnnnnnnnnnnnnnnnnnnnnnnnattgtaagtaagagcgtttgctcttatcccctttcttttcattttactttgaaagtttcaatgcttcatctagttgttgtttttggcagagagagtgaatgattgcactgaacatgataattgacacactacaacaaaaaaagtattttgaatcgtttattttttatatttgcatcagttataattgatgcaaatgagttttatatcacttttataagtgactctgaaattggtgatgcaaattatgtgcatcgtttcaaataattttgcattaattgcaaacaatgatgttaattttacacaaataatataaatgatattagtatttgcatcaatttatcaaaataacgttaataattgttatggtaataataagtaatgttaagtgttttatatcaaatataaataactaatgttaaaatttgtaaaatcatattaa

SEQ ID NO: 8559 - DNA, 1501 bp, Arabidopsis thaliana landsberg
tcttcaaattatggggcccatactctaggcaagcagtatccacatcatcatacttatacctccgactcctgactctgtctgattccttcacccaattcttgtctcgtttccatcaatccattgtctttgattccagaggtttgtttctatttcttgttgattccaattcgggtttcttcattgtgcattctcttgtttatgtcatgattcttattctttgcttatcaaagctctatactttatgaccatgatttgagagattctctgaaaagatcacacctttgcctctgaatttgagaaattttagtttctctgtatctgtctggtttagttcttgaagccatttgtgatttaatgtctgaaggttttgactttatgagttgagattgaagccactcttgatttgcaacaagatttgtcattttctatcatagccttattttatagctttggcatcatatcttaaattgagaaagactctgccttgttgcagttccaatgaggacaagaaaaacagtaatgggtcctatatattctcatgtgtttgtcttccttttggtctagacaaactgataagtttctttttgtagctggtactttcttttgaggcttttttaaaaattatccaacggcttgaactgaattggattcaatgtttctacaaatgtctcttatatgtaggttcttggtttatttggatgtggtgattatggatatggagtcttggaagttgctcagaagtgtttgtgtgctttcttttctccttggctcttgttttgtgtatcaaagccttcgtgttgttgatgctcaagaagatccaaaaccagccgtgactttgcaagtagatgcttctaatggaggtggacgacccattcctgaaacgctatttgggattttcttcgaggtttgttaatgttacggtctcaaatagatctttgcaatgtacgcaatgtgttcaaatcaatcataaactttatatgctctatgttcattataggagatcaaccatgctggtgccggtggattatgggccgaacttgttagcaacagaggttagttttttttagcttgttactactgaaatccatgggaatcaatcgttgtttggcttcattttctttctttacatgatgagaaaaaatgtggtagtaacttttaaggaaaaactttggtttccagggtttgaagctggtgggcaaaacacaccctctaatatttggccatggtccattgttggtgatcattcatccatatatgtagctacagaccgttcatcatgttttgaacggaataaaatcgcactgagaatggatgtgctttgtgatagcaaaggttgtccatcgggaggtgtcggagtttataaccctggttactggggcatggtgagtgtcaaattgtgaacactttacagctcggttttttgtttccctcggtgtcaagagcatgggttaagctgtctattcattctctatcttctgtagaatattgaagaaggaaagaa

SEQ ID NO: 8560 - DNA, 381 bp, Arabidopsis thaliana landsberg
aatccgaattattcttgctgtctgaagaatctgtttggaagtaaatttggattaatcttgcttagctttgtatctcctgtgattgatcgcgattacgttggttcttctttctgtttacgcataattttactgattcatctaaattttgttgcggctttcttatgatctgtgttccagagtttgtggattattacatcaaactatatgtttttagagttgtttgttttattaagaatgtatgatcttctgctttggatgtttgctcacatatggatatttctcttttgcaggtattctagtcgactgagtaaacattcatgagaatcagaaaaggaagtagagttgagggatttagcaacaaagaggcgccttatggtgcgt

SEQ ID NO: 8561 - DNA, 2078 bp, Arabidopsis thaliana landsberg
  unsure (1)..(2078): unsure at all n locations
tgcactcaatctctatgtttcatgctcttcgttcgctgcttccggtgccttctgatgttgaagcttatgatgaatctcttagccccctgttttcgttcctcacaactgtctcatccgttgagtgtcttcccggttttatctgtcttcctccacgagatgcagcatcatcgtccccaagaagatcacttactttctcatcaacacaaagcgagtttcttgtaggaacactacttcgtctgtgcccttcctctcgtttcctccaaccactgaaccatcctttcttctcctgtttgcaatacccgttcccatccgttactggaatttctcgatcctcgaaagaacaactattctgcttttgagaaatcctagagctctcgccgttagaagattcttccggtgagtccaacttgagtgctaactccagctgcctcttctcgtcttccgtcaagatatctccaagatcctcgctttctgtgtcgttttcttgattagtgtttgagaaaagctcctcatcagtcattgcacccggtactcttcttgattttatgctaacaactacattgtgcatatcatacacttttgctttccattgcccaaccatttctgtcttctcttgacgcctccatgttaattgcgggaagagaacagcctgagtaacatcgatcccgggtctgaaaatgcttgttttggacattgcagccacttcttgacgaacttcttcttctgatgcggcagctccagcaccgtctagagcattcatgatctccttatccttatgtgatatcataagaagagaaccggaaggaactttaccatcctctgacccatctccaagaaaaagtatagtctgatccgatctttgaatcctgaaaccatcaaacccagccagtgtcatatccgctctaagattcgcacccctcttccaaatcttataagtatccgaaggcgccactctagaaatgaaaggtataacagaactctcgaaatggaaagtgatctccatgtagaaatctctcattctatgcatcgtagccacaagccgaggcagcctcctgcaccatttagcccaagccagaggctgataatgcctaacgataatcatagcgatcctctcttctctaccacaaatagcttcttgtagagcgctccatccatgctcattctgcaagctccaatcagcaccagcagccataagcatctccgcggaggtctcatcaccgagctttacagctaaatgaagtgccgtgtctcgattaaccacatcacgcctgtctataacagctgcgattgaatccgcttttgtctcttcagctacagaagctgcttcgttttgaacctcagacgggtcacgcatcttcggaagagcggataatagtttcttgagaccggcataatcccttgtgacaacagcgtgatgaacaggactgtgaccatacttggtaacatcaatggtgctgcttgccatatctcagaagttggatataacaaacaaaagctttacaaagactcaatctttcacaaggagaaacacaactcaagttccatcatcttaaaacctaaaaccctctcaactgggaaacacaaaagattgcaaatttcctccaattcataaaaacctaattgcaactctccgatatatgattagagtaaacaaatctgaaaaattggagataaaacccaaaacccaagcaaaatccccaaatgcctagagtaaagccgacaactttgaacagatataagacagtacgaatcgaaattcaatcactaaaacacccgagagcagatcgaaattcgaaaccccaaacacagaaataatttgccaaaaaaggaaatttgtttgtaaacccagatcaagaaggagcagaccaagcacgaatgaagctaatcagctgaagtaaggaactttatgtttaatctccgtaaagagaaatgattccagcctttccccgaaagccaaaaccaaaaagaagcctcgagattcgttgcttccgaggaatcagatccgaccccgatcggngaaaaacccaccgacaggatttntgtatcgtgggaagagagatctaacaaagagagatgat

SEQ ID NO: 8562 - DNA, 1094 bp, Arabidopsis thaliana landsberg
agagtttcatatctcaaaccaatcaggtaacgtggagtttttaacaattaacgtggaagaataaagattagaaaagagtttcataccacaaacctaatcagataacttcaatattcttcatttttcatgcaacatcttggaaataggatgagatctcagttaaagtttgaatggagataaaaaaacttggcaaataaggaacagctaagccatagtaaccagagaaatacaaatgataaaccattgagtcaggatcaagatcaaaggcgacgagtctttcttgagacgtaagtgagaggataactttattggtgtccttggaaatggttaaaggcgtgagaggccgcgaggtgataccaccaaaccaagtggaagtagaatgcaaatcaaccgagaagatcttttcccatgtgttgttgttgtcttcaactctccaccaaaactcttgcttgcaatctttcttcaactcagagatacagagacgaccatcaagattgcataaaccaatcttgtcagcagagacattacgtgtaataaaaggcggtgtttggatgacttgaaacatctctgtgtgaatatcgaaaactacgagttttgtttctcttgttggatctccctcttcatctcctgtgagccagtgaagtgatccgtttgcaaatactggtcattgatcaaacaagatgtgatggtgatcaagaggagtagtattcacgaatctccaatttttttcctctaaatccaaaacctcgcatcttaccttcttcttacagccaaactagtttatacctccccgtaacgcagtctttaccaaatccaaaacgagtaaataatgtgaatggaactggttctatcccccgatagtctataagaaatttttgaattttcgctagacggagtgttgtgcacgtaaatgcagacaaggccatcgcagctctcggagatgtcgagaaaccctttgaactcttggaattccaaacactctttagtttcaacagaagcagacgtggtctccaactccaaggccattgtcttaaaaacagagcgctgtctggatgatttaccaaatcatcacagacaaaaaggagttttggaga

SEQ ID NO: 8563 - DNA, 550 bp, Arabidopsis thaliana landsberg
tacggactcttccatctgttcacggtaattaaccggacagttcgatcaaacaaaggtttttgtgttatttggtttctgaactgagtgattgtttttcacacaggaacccaattctgaagatcccttgaaccatgatgctgcagcagttttgagggataacccaaagctctttgagaccaatgttcgcagggccatgaccggtggatatgtcggtcagacctttttcccgcgttgtatctaacaaagctctggtttgtcttcttcaaggaaaaagataagaaccaaaccctttgtccgccattgtatttcttctctttctcaaggaccctcgtttgtttgtttgatcttgtaaaattacattccgcgttaaagtaaccctttccttatatcgaaatcttgtcaacattaagttcgtgagaattcgataaaggagactaaaaggaattgtataacatgtttgatctttgtcatttcttgggttccttataaatcatttgtttaaatttcattcgaaatactgtttgaaatatagccttcataactggatttt

SEQ ID NO: 8564 - DNA, 1402 bp, Arabidopsis thaliana landsberg
  unsure (1)..(1402): unsure at all n locations
ctaaatgtgtcctaatatcctcttgcacattttgaacatctcaccaactaatataatataatgttttatttctataaccaaaacacatacatttgaactaccatgtcttgaaatcttccagaagaacaaacatcttccaacggcttgaactaccaaaaactgaaaaagcagacatttacttttgatatgattcagagaataactccatttctagaattacatatataaacatcaaaatactaaaatagaccagagtgacaaaaattctcaaatttcaaattattttttttcataacaacaaagtaaaaaagaaaaaattacaacaactccctaccaactgattcatctagagcctaaagcctaacccaacttttttttttttttttcatgtaaatataaaaaacaaaatgtcagcttttgatatttcatcatctatggctgcagaaatccaaaagctttttccttccttcaacaatctcatcgaagaaatcatcgatttgcgccactatactctctgtcccattccttaaattaccaaaataccctttcagattctcaactctctctctcagctccctctcgtcctcctcctcctcctccctctctcccccaccaccaccgtcaccgtagaaccgccgctccagctccgctttaagctcctccaacgccgctttgctccggcgatactcgtgcatcaatattcctttccttatccccatcctcccaacctcagccgccactctctgttgcaacctccccattgctccggcgaaacctccgacttgactctgcgtttgcgttatctgcgtctgcgtttgcgttgccgcgtctccgggaaaacagtagacgagaccgttcattaaaaccataaggagaagcgaactcatgttcctcgtcgcgtaaagcacgccgcgaaaaccactgaacccgttttgtaacttcnnnnnnnnnnnnnnnnnnnnnnnnnnnnnnnnttccgaccaaaacggaaacctttgaactctgttctccattaatgctctgttttcttcctctatccctatcgcttctcttctacatcctgatatcgcccttatcacctaacccaccattaaaacaacaatcagcaaaaagattcaaatttttggaaaaagattcgatttttacgatcacccacctgacgagaaagctgaggagagagacgacggtcgagggtggaagcgatcgaaattccggcggaggagaagttttcgacggaggagacggcggatttgatgacgagacaagcttcccaaagtttggagctttcgtccatatactcatcgagccatttgtcaccgacgggaagttgaaagttttgaactaagagagtgagatgagagtgagaggtacggagaagacagagagctctctgtagaagtgt

SEQ ID NO: 8565 - DNA, 1628 bp, Arabidopsis thaliana landsberg
cgttacttctacaaacagtactagtccatatttactctctgttctgaatttaaacaacaacaacaacaatagtaataaaacatatattttgattagatatattttaaaacttcaaataaaaccagaggagattcccattaattaacaatctgattcatctctaattaaaacctaataacactcatttttaattcatcacctgtggctacaataatccaaaagcattttcctaccatcaacaatatcatcaaagaaatcatcaatctgagcaacaatactctctgttccattcctcaaactcccaacacttcctttcaaattctcaattctctctctcaaccccttctccaccgcctcctcctctcctccgccgccgcaacaccgccgttccagctccaccttaagctcctccatcgccgtcttgcttctcctatactcgtacatcatcattcctttcctcacccctatcctctccatttccgccttcactctcttttttaacctcatcatcgtccccgtcggaaccgtcgtgtctccgggaatgtaataaacaagaccttgcatcaagatcacgagaagtaacgagtttatgttcttcatagtgttcatcactcctctgaaaccgctgaaaccgttctgtatcttggaagactccatccccgtcgtagtaacttgctccgaccaaaaaggaaacctttgaatacgattctccattaatgctctgttttcttcttctatccccaccgcttctctcctacatccagatatcgctcgtatcacctgtcccatatcaaaaatattccaacttttcaagaacataacaaaaaaaaaaaaacatttcattaattcaacttggattttttattaacaaaccaaaataatgttgaatatatattattattttttgttactaggacttacaaataatttgtgacagtccaaaaaaataacattgttttccgtgtatatacctgccgggaaatctgaggggagaggagacgacggtggtggtagtggccgtcgagggtggaggtgatggagatagcggaggagcaaaagctttcgatggtggagatagcggatttgatgacgtggcagacgtcccaaagcttggaagtttcgtccatgtagtcgtcaagccacttgtcaccgacagggaggttaagtttctggacaagaagtgtgagatgagagtgagaggttcttagaagacagatgactctctgtaggaactgtaaggacatgaagttgttggagatataaaccctttcgagatcttccattgatctgtttagaaacgagtagaatccgtttactgagtttgaacaagactccattattgacccttaaaaaatatttggtgtttgttggtttgtttggttgattattggtgagattatagggagagagatttgggaaggagagaattaaaaggttatatagagatttggatgtgtatgtatagatgaaaaggagagtgagagagaaagagaataataagaagaagagaagaagcagagattatgtaaggatgaaagtgattgtttggagcaatgatggttgtttcctatagaggaggaaaatgatcattggtatatgctaataccaatatctcaatttttcatatc

SEQ ID NO: 8566 - DNA, 485 bp, Arabidopsis thaliana landsberg
tatactaatggcaaaaatgatattttgataatggaatatgtggattacccattaggattgtaatgattttatatcaaatatgatttcaaaaaattggttttcgaatgcaagtaatttgtcccagaactcaatatcactttagcatactagcaattttagttcgtgataagtccatcaacacaagtttttcctacattatgttaatgagaaagattcatatttgagactttttcattaaaacaagtacttctctcttatcactcttcaaactctacacttttacaatagtaacttctagcaaaagggtagcgtggtcagggttcagagttattacagatcctaaagaggctacgaaattcactgttatcaagctattatatggagaaatgtggctgaaagcaagtcaaattccatacggcagcgaactctgatgatattgttcctcttatacttcacatgtatcaattaatttacttaataaaata

SEQ ID NO: 8567 - DNA, 2039 bp, Arabidopsis thaliana landsberg
aagcccatccaggttatcaatagaaatgtcacaagaaattctctggtggccgctcactactttcagaataggaactcgcgcatgaataacaaattgcagtttgtaccatagacctgttttttgaatgataatggatgtgagacaaatcggcacatgaaataatacttaaactacttaagtagtatataaggtaaacaacagtgaagcaaagagaaaaccaaaaaaagaagaaaaaaatagaagctaaatgaatcaccactcgctctcagtgctcgtagtaaatgtccgagtaaagtttgtttctgcttctttccagtgaacaagatggaagaaccgctgaataagtcaacagagatatctaagtctccccatcgtgtgaagagatttgacacaaaggatccaaatggttgaacagtagcacctaacaattacagaaccagacaacgagcggctataagcatcacatgaaataatttgtttccagaacgagaatagtgcgaaagagtaacatgaaccacttctactattctgcagctacaattccagcagatattaccttactgaaagctcgaagtatctcactttcatatccaatatcataatcacatccatggctggtatggttcaaggcagtactagacagtaagaaaaatgggagaagcacaaaagtgcatcaagagtcatcacctcttaaacattctacggattgtaagacgtcacgcaactgatcaatgactgtgatcctcgtatccctatctgctcgtgtgggtttaatcacttgaagaatttcttgaagagtaggatccaggaaagggtttctactcatcgtcttgctccctctacaataacaccaaacacacattgccaagttatctcaaagaaaacatcatgcaacaataacacaaggacttcacaagctccaatcaaagtaaattcttgagattaaaggttcagtttttctgatatcttgctcacttactactccaaaggaacaacctttgtcactaaaagcaagattcttcattctctagacccagtggcccacattttagtatcatcaaaactgtgaaaactctacccaaaaccttacaaaattcctaataaaaagaatcagtgagtactgggttttcacatccactggacttacaaaaggatgattcgaaggagatgaagaaacctttagcccaagaacccagaatctaattccaatctagggtttttctctcccaaatcagtaatccgtaccgaatcacccaacttgagaatgctcggagataattttagcgctcgcaggcgaagacaatgaaaagtctttggaaggtttactttattttattcaatgcgactaaggaaacacttctttatttcattttatttaatgaatgatgtgaccatcttttttagcgaaccaataacattattacaaaatatactatagaaaattgttggatttttaaaatcaatgctaaattaaagggtatatattcaatcaaatactttgagataatttattttacatattaaaaaagttgcatgttatttgatcatagattttacaaagtcatattacatatgatgttaatggttagtatttgtaaatatctcttaaaccctagttattaaactgatgaattttctttacatctatttttattagaaacattttagacaatgtttatttatgattttgatgtggttgcatacttgcatgcacatggaaaattatccttttgacaaaaactagttggctttcttctttttgttcaattttttatcctcctctacacattgtctcatattttattgcaatggtaacctcaactctttttacagttaaacctccataaattaatattcgataaattagtaatctctataaattaataaattcactagatcccaagttaggaccagtgtaaaaagtgtaacacatcgataaattaataagataataacttttttgaaagtcatatgtaaatatatagtctcatcaatatcataaattataattacataaatgtatcaactatatatataca

SEQ ID NO: 8568 - DNA, 969 bp, Arabidopsis thaliana landsberg
gcaaacctgatacagcaactgagaaagaattgaataccagctgtttaaagcttttttgcctctgcggtggcccaattggcaaattcatcggtttgtccttccacgaatggttcaagtttgattttcagtgtagtgacgagcttgtctactctgtccttttgtatcgcctgcaaaaaaaatcccaagaaaacatagagaaatataaacattaaggcataagaaaacagtaaacagagagggaaaacaacctactttgatcttttcctgaagcatctgttttctaatctcaggctcatacgattctaattcagcatcgattgaggctgctgaagcaagggcaagttgcccaacgtaatcctcaaagagctcgctaccaaagagcataccaaacacagctgcaggatcaaccattgcatccctgcaagaaaatggaagtgaaattaacatactatagcaattataccaatcacattctcaaatgacatataaacatcacagaagttatctctaggctttttatgtggggaaaaccgaaaatcttcaaatgtagaatgaatcatgaggaatgaaagtgtgaaaacttactgttgaaccccttcttttccatatttgtcataagctgtacgcttctccggatcgcctagaacttgataagcttcacctagtatcttcattcacacaacaccaatttataggttagagtgatccagaatatcatccaatcaaacactccttgaaaacccttgtgaaagtcgttaagcaaactaataaacatagcaatagagatgattctatattttaaggtgaaaggaaaaaatcacctgaaagtttttagcagcttgaggatcaccagggttcttgtctggatgaacttgccttgcctgcagaaaaaatgagagccctaaaatgatcaaccaaaattgatcttacaatcaaaacctaaaaagctaccaaatttggaaaacacac

SEQ ID NO: 8569 - DNA, 1588 bp, Arabidopsis thaliana landsberg
  unsure (1)..(1588): unsure at all n locations
gaacccggaccgttattgttatactcgcctttgtaaagtttatcaagtgcttccccaccggtccattggctccaacccgaaccgtcaataaactcatcaatataagattccattacaactgttcttgaaaattctctccacggacgtcccaagtagctcttcactttatttgagctattaaataaatcctccgacgcaaggatggagcagttttgcatcgagatcccggtatcttcgtcctgagtgtctcgtgactgagcagtaattaccgtgaattgtcctggcataggcaactttgaaacgatgttacagccttggaagacaacggctgcgtttccaaagatataatcaatggttccataaatatcgcattcacggtagaattgtcggaatgagtgggtgtaaagtgtgtcctggtaaccatcaatgacacatcggtataaggccacaaaatccgcgttcactcgtagtgcaaccgcttggtgcttctcgggtcctgctgtgtttgttatcattatatccctcgccaagaatccttcgccggaaaccgctgtgacaaaagcaagtttgaaaagcattactatctcgatttagtaccaaccactttagttatcgcttttaatttttgtcattgcaacaaatatggctccaagaaccatacaagattacttatgttcacaactatttcacctttttttcctaaaccaaagattgtaagatttaaaatattactttttaatttcatagaaaattcatatataattatttaaaattaaattatatggtcctagttgacaaaaaaaggcaaaaattctacggtcctaaagtctacactatgccccaaacaataccacttgagtcttgttttatataaacaagatttttaaaagagtcaaagatgtttaccaagagtagcagatcggaaagtggtccatccatctccgacacttcggtttccggtaataaatgtaacatcggatccatctcctatcaaaacaatattagtcttgtagatcggaatatcaatgttctcgtcatacacaccttcctttacatatatcagcaccctgtcgttactcatattaggagcaaagcttatggcctcgttaatagtcgaaaaattccctgttccatcggcagcgaccacgaggctctcactcgggtcatactcatcatacccgtcgctagaatcttctaaaaaccggtgatctttcttatagacccagtcaggaaataacccaagtaaccggcggttcttagtgtttccgccggtttttggatttgtggttcttctctgttttggaagagcagagagggagttgcttatgtgtttgtaagtggtcgtgaaggaggtcacgagctttggcttgagtggacctgaggctgattcaagaccttccaagcatgtgatcttgttggtgagagcggcgcttaggtacgctctagcgtcggctagtttccgtgaatcgttaacaccgtcttggatcttggagattgatcgtttcaagaaagaagcacccatgtggtgaagatctttgcagtcttaaanngagccgcgatgtccctcaactaggttgttgagacccca

SEQ ID NO: 8570 - DNA, 1548 bp, Arabidopsis thaliana landsberg
tctttttattcatttatttagaaacgttaaatttttatttgatatctgttttgaattaaatcagataaagaacatcaaacaaaaattgaacgtttctgaatttctttggttgtgaccacatttcttgcagccatataactcgtgactctaaatcttaaaagctttggttgtgtaagtgtttgaagtggagttatattctacactttaattttgagttgttttgtttgaactctatatctgtacttcacttttcaaagcatctactatgtctctctggaaagttcaaatttgttatatataggcaaaccaattcttcacttggcttttcaggtgtattggtttgattcggaaatgcttgggaggttgatccgaagaacaaaggattgatgagttcgaatattttctatatataccatagctttttgagattatgatttgtttagataaacaagatcgtgttgtgttatttgtctttgcttctttatttaacatacgtatggcatcgtaacatcttcatatgtttgtaaatacaattattttcacttttgttttgatattactttcgaaaatatatgaaagtgttatctataaactatatcaggaatcagtggttcaacaattaatgatatccaagaaaaacgctgtgtattataatgtggattacgaaagttctgacaaaatttgtgtgaaattttgtatgtccgctttttctgttttctttcttatgcattttcgatcattttatctgaaatgtgttacaatcaaactaaatattcctctactacataactcaagctcacatttttttttttgttacttcggcgcaaagtcttcaaacactaattaacaagatttcccgtgtggatgcttagcatttttctccaccctaactaagatggaaaaattactcataccagtaaacgaaactattcgtaaaaactgatttcctttttgtaagtgtagaacaaataatttttttcaccgacaacttccatttttttactatctctaaaattttcaacacgtattccaagtatttccttttattttgagtaatactcttgtttccaaaaataagagttaacatgattagcttatatacttgatcttttgggttcttgttgtgattatatgaatgatgaagacaaagaagaaagaatcgagaggagaaattgggaagaacatgtcgttgatatataagaagaaactaacggtgttggtcgttgacgatgatccatcttgtcgtacactccacatgggaatcattcaaatggctggaggattcccttacatggtgaaaaacggcgagaaataagaagctacgtgacatgaatgtgacgtcaatgatcgtggggatgacgtcacatgaggacgagactagggcattcatggaagctggagttgaccactgcttgtcaaagcccttaacctttggaaagatcgcatccatcattgaccatctcaaaaccgcataatctaccgattaacaaaatattacttggtttagttcggttatgtgactactgttataagtcttttcaataaatt

SEQ ID NO: 8571 - DNA, 1673 bp, Arabidopsis thaliana landsberg
atttttccgtgtcacatagaatattaatttgttggcagccgccccgcatttggttactcttctaattctccctaagtccagttccctttcagagaggtggtttaagagttccagtatttgttttgttcttttctatccatatttttttttatgtcgtgtaagcacagaaaggagtcaaggacttattctaatactgacataacggaagtagtgggtaagttgtagttgtagcaacacccaatgttacttgcttaaactcagcaacccattaacaaaaaaaaaaaactgagagatggaggaagaaatcaagagcttgatcaatgtagggtttttaacaattatctcagtatcttactgctactgcttaccaccaagaatcaaatctggtgttcttcgattactctctatttttccggtctgtgttttgttagttgttcttcctctgttcttctccttttcaattttcacttccaccacagcgtttttcttatcagctattgccaattcaagactcatcctcttttcctttgatcaaggtcctctttttccactaccttcaaatctattcagatttacctgctttacttgcttcccaatccagcgtcaacaaaaccctaaatctcaagatcatttgtccacgtatgtttttcccgttaaaattgcaatctttgttgtgttgttatatgtgcataacgacatacaaaaccttcctcctacttttctattgtgtctccatccactgtatgtatatttgttacttgagattctcttaacgctccttagaattctaatgactatcattcttggttgtgacctagagccacattttcacgaaccatacttagccacatctcttcaagacttttggggtcgcaggtggaacctcatagtctcggcaagtcttcgggcaatcgtctacactcctgtgcggcgtgtctgccaacgagtaatgagctctgattatgcaatgttgattggtgtttttgcgacgtttgtaacctctggtgtggctcatgaagtggttttcttttatataacccgtgcgatgcctacaggggaagtcgctttattctttctctaacatggagtttgcacggtggcgaaagtggcagcgaagaggacggcgtttgtacggaggtggccggtgagaccagtcgtatcttggatgttcacgatagcgtttgtaaatgtgaccgctggttggctgttttttcctcagttgattcggaacaacctgggggagagatgctccaatgaaatctccttgctcattgatttcttcagaagcaagttattttattttccccagtgaattacatttctaaatggattccgtagggttattgttaacaatcacattatttaatgatatacttacaaaaaatgcagctatcacattatataagaacttagaagttaacttaaaaattaagttgctatgtatctcattctgtaagttaatattacaaaatctcaaatttgcattacaagactaaacttaactatgacctcaccacacgcaacacccaagttataacctagatcagtgattgaaaaacgccaaaaattcaaaaacaaaaagaaagtctgagacatggaggaagaacaactcaagagattgatcaaaatatggattctagttgtaatctcagtatcttattacttacttatca

SEQ ID NO: 8572 - DNA, 1375 bp, Arabidopsis thaliana landsberg
ggggggtcacttgccaaatagacaaaaaggtcttttgatttttgcaaaaccgcgtttgttgacttgaaacggtaatctcatggagaattcatcaatattttatctaaccatagaatttttttatttattttgattaaaataccgctttgtataccataatagtcccagaaattaccctgttttggacacacaaaattctaactgagacaatatcatgcaaaatttcaaagtgaaactcatttcactttatttcctcctaacttatcgtattcgtacgtctatatagatgtttcacacaaccgctacaacggtcggacggcctattccagcaccaaaaagaccataattcaacatagaaaccctctgctttgccaccggaaacatattctcctcagtttcggatactggcgacacagattttctctcacaagttccaaaccatttagcctgcatgtatttgtgttttctccaaggacccatgtgcatcttcttgtctttcatacacttcttcgctgcggtgcacaatatctttattaatgattttagcctctccgttttcccgacatacacttccggtaacattccgatgagtcgcttgtactcttcactgcctctcgccatctcaaactccgccctaaaacatagttcgatcaccacccggatctcgcctttctttgaaaccgatttgtccacgacctccaagtattcatgctcacctaaatttgataagtaaacgtcatggttaattcaaattgttaattatagttaatgacaacttgttttaggggcgaaaacgttcaagatatatttattctatttatttatatagaatatatagataattccgttgatgtggtttcttaattagtaatgttattgataaagatacgtgaaagtttcaaaacatgtctaaattcatacggaatcttcataaacaatactaatccataaaagaatcacaaatcaccttccataattaggaaaataagaatactaggaatttaaagataagagtaaaattgggtttgatttattacctgcagggatctcatgagagcttctccacatagatttgaaaatgacgcaatcatagccagcttctcggaggaggcgagatacttcgccgcgtaaacagctacgacaaccgtcggtaaccggtctccggcagacacataccaaaccctttgatctaaccactttcaacgcttccttagttgcttgtcttatctttgtctcaattgaacttgtcctatacagtgtcgcctacacatttcaagatttggtccaaaaagaaaattaacttataagaccccacaagaaaaaacaaagagagtaatagtttccttaagagttaaaaataataatataccggagg

SEQ ID NO: 8573 - DNA, 2004 bp, Arabidopsis thaliana landsberg
atgacatgtctctctctgttgtcatcctatattctctataccttcctaatcttttctaaattctaaaacaaggcaattgtagcaagtttttattggataattctacattccagaaaacagtactagaggaaacatggatatagtagaaacaagaaagagagtgggaaagaaggaaaaagaaaaatttgtattctccagtgagggtgagtgaaatatataaatgacttaatgtaacttttccagttgatttagtggactgactcttaaaagaagactatattacatgttttggtcctccacttgagctaatgaattaaattttagatgacacaaattctatcgcgtttaaatccgatggtgacatcggtacttacaaactatactacaaattttgtggtcaaataacataccatgtccctaatttagatttttagctattaaataactttgtgtttaacatttttagtcaccagtgttttcagtatatatagattattcggtgactagttcatatatgattaggaaatttagagtaatgaaactaaccagtacagtactaatctctaaataatctaaaacaaaaactaaccgttactacactagctaaaactttatggaaaagatgacacaaaggtgacaacaaacgcagaaagcctttggttatgggagttgcttctggtggctcagtctttcttactatccacatttgccgtcagcctgcagattatattgaaaattttaacaaactatatcgaaatttacataacgacttcaaattcaaaacaggtaaagaaaacgaccttgcacgctgcaaagttatcgcaaccgcatatcaaattgccattcgcaacatcaaccgcttgcggagctcctccaccatcgcttctctgaactcacacacacacacacaaaaattcaataagacaagatccagacaatcttcaaaaactagaaatatagatgtaccttgtagaaatcgactgctatgaagttaggccatcgctgtcccgcggcttggtaacatgtctttatggattcaagaagagaagctgagttttgcttacatgctactatcacatccgcagcatcagggaaatggttcacaagaacaagagattttgatttatcgctcattggcgctgattgagctctatttggacacactcctaccttcaaccctccatttccatctgcaatttttttcattcattaacaaaaaaataagatatgcatatatacaaatgtaaagataaaatggtttgcatcatatataggactcacattgattctcaaccatatacttccattgataggcgatcccttcggttgcttctttatgtgaatcggatgtaaaaactagcaaccgttggttttttcgcaccatgtcatcaagccttggccagtcccctccatttttgggcattctagataccggaaacatgaactttcgtaagccagccgcatcaaacacttttgtgagacctttaggcgatttcacataatcttcgatgataatcgttacaacttcctctttgttcttctctagaaacacttgaaactcccttaaaatgttaatagccggttgctaccacattgcacacaaaaacaaaaaaaaatcttcaacatttttggcggtggaccgaccttaatatacctcatacttacaacaaacatatattgtatcaaaacttacaaaagcggggaaattgaaacatgttccatcgaaagaatggcaaagccagatatcgttttggaagtcatacatgtcgagcataaaccctcttacaccattctgcaataatccaacaaaaacattcaaacttatgaaaaaaatgttaaaagggtttactaaaaatttgaaactttgtttacattgagttggctcgcgattgaatcttgctgggtagtaggagccaaaatagcagaaccggtccgtgatactttccccaaacgagcaaaagagttgtgtgtggataaccatgaatacttgcaaaaggcaacccc

SEQ ID NO: 8574 - DNA, 1153 bp, Arabidopsis thaliana landsberg
tatttgacaagagaatttccttcctaaacatagcattgcattcgaatgttaattcaattaattatttttctttcttatatccttttctttggcaaaatttatttcttatatccaagcacatttttcaatagggttttgtatgtatgaaattatatctacatgcataaaagaataatatagtgaataactgattttctagaatattgtaaaaccttctttttgggtccccatttatatatataactcaataccttactatctctctctatatatataatcttctctctcacacaaaacctaaaatctctttactaccagcaagttgttttcttgctaacttcaaacttctctttctcttgttcctctctaagtcttgatcttatttaccgttaactttgtgaacaaaagtcgaatcaaacacacatggagccgccacagcatcagcatcatcatcatcaagccgaccaagaaagcggcaacaacaacaacaagtccggctctggtggttacacgtgtcgccagaccagcacgaggtggacaccgacgacggagcaaatcaaaatcctcaaagaactttactacaacaatgcaatccggtcaccaacagccgatcagatccagaagatcactgcaaggctgagacagttcggaaagattgagggcaagaacgtcttttactggttccagaaccataaggctcgtgagcgtcagaagaagagattcaacggaacaaacatgaccacaccatcttcatcacccaactcggttatgatggcggctaacgatcattatcatcctctacttcaccatcatcacggtgttcccatgcagagacctgctaattccgtcaacgttaaacttaaccaagaccatcatctctatcatcataacaagccatatcccagcttcaataacggtgactaatctctcttatacatgcttttttatgaatttattcaggtggttttttataattactaagagaaccatttacaccactagctattacatgaattagcacacaaaaaaaaaaaaaaaaactaacaagatctacatatatgactttgatagatatatgtatatgttaattgttaaaaagattttaaaaaatgctgttgatttatgaatttattcagatggttttgatttaaaa

SEQ ID NO: 8575 - DNA, 1048 bp, Arabidopsis thaliana landsberg
ttttatttcttaatacggaaagaaaacgtcgtcaacaaaaagaacctataacgtatggactacaatttttttaagattataaaatagaacgtcgaagattagatacgtataagtaagagaaaaggataagaactacgtgccgtttgagcaaggaggggggtagaagaaacgggaggttttgtggaggaggcgattgaagtaagccatgcgctcctgtttctgcttttggcgttgcctagccttatggttctggaaccagtaaaagacgtttttaccttcgatatggccgtacgcacgaagcctaccggtgatctgctgaatctgatcggcgctcggagttcgtattccttccttgtaaagattttccagtagcgtgatctgatctttcgttgggttccatcttgaactgcttgctgttcctgcgtttacttcgtgttccatttatttgtgttaaaggatactttttttgagggagaaaattagggtttaaaggcgatggtttgcatgtaggttatggggtttgaatgatgcatgaaattcatggggagactctcatatttatatagcgagttagtgagggattggaacagagtcaaatgaagagagagatagtgacatgcgtgttgttttttgtgctggagactctgaaaacatcgcgtggagcggctgagatggtaaaaaagaggctacttttttatgagaagacaaatagaaaggaaaaaaaaacattttggatctattcgttttttttttttaataaaagcatgttgcattggcacatacgcggaaaaaaaaaaaaaaagcatgttgcattttataattaatttatcaaaatgcggcaaatagaaaaagagataacacagtaatacttgtctttaacatgtaaaaatgttttttctatgtgaataatggatataactctctctttattttccagtagatacggtgtataattgttagttgtgaaatgtgaccccattagcctttcttattctttctggggattacatatgttaatttttgaagtgtactaataagaagagccatt

SEQ ID NO: 8576 - DNA, 1446 bp, Arabidopsis thaliana landsberg
tctaacgtcagaaatccaagttgtttaagtaccaaaagaaagtttctgtaaaattgttttacctgtttcgagtgggacaggcatgattaactcgaaaacagctgtgacattgtcaccaggcataaccatcttcacgttttcgggtaattctactttgccagtgatatctgcagtcctcaagtaaaactgaggcctgtagttagagaaaaatgcagtgtgacgtccaccttcatcctttgtgagcacgtaaatctctgcttcaaacttcttgtatgtcttgcatgaaccaggcttagcaatcacctaatacgtaaaagcagaggattaaactttagttcagttggttttcagtaaagttggttttcgtcgtaaggatgcctaagcttaccattccacgctgaatgtcttctctctttagcccacgcagaagaagtcctacattatcaccagcctagcataatagaagccaaggtttgatcagtatcttacatgcccagaacttgtctttgtaatcttttgatattggctttacctgtccattatccaaaatcttcttgaacatctcaaccccagttacagtcgatttcagtggaacacccccctgaaaatcaaatctcgcagttatgcttaagaaaatgcttaattgtaatagccccccagaaaacaccagtttggctgtacaaacacaatatttatgcactctcacctcacgtaaacccaatatctcaacttcttcacccactttaatgactccctgttcgatacgaccggttgcaacagttccacgtccctttaagaaaaagaaatgtatcagaactgattttttttttttaaagagtgaatcagaaaacaacaaggatgtagactaagtgtacttgaattgagaaaacatcttcaattggcatcaagaaaggcttgtcaaggacgcgaacagggtcaggtatgtattcatcaacagcatccattagctttaatatagcttgccttccaatttcatcattggtgccctgtaatgcggacagagcagatcctcggatgatgggaatatcgtccccaggaaacttgtagaagctgaggagttctgtatagagacaagacttgatgtgagcaagcaagtacatacttcatatgctgaaagaagaagttttgtgaaattaaaaatgtacaaaccacgtagttccatctcaacaagctccaacagctcagggtcatccaccacatcaactttattcaaaaagcacacaagtgagggaacaccaacctgtggaacattgcataattcaaattgaggcaaacaacataactcaactgagtatcttcaagtgttcatggtttaataatacgaacctggcgagcaagtagtatatgttcctttgtctgcggcatgggtccatctggtcctgaaaccacaagaattccaccatccatttgcgcagctccagtaat

SEQ ID NO: 8577 - DNA, 1934 bp, Arabidopsis thaliana landsberg
  unsure (1)..(1934): unsure at all n locations
ttcaagaattttaaataacatgtagagttttagacaaagcagacttctaanaatattcaatagaactcgttagtaaacgcattacagtatgctggttgatgttttatattctaaagatacggaagaactcttcgtttaaactttgaatcagtatgcttcatacattaagagaatgtaaatattgatgaaagtgacaaagtctaatagaaatggaattattatttaatggataaataattagcattacatatttcaaagtccactattattagtaagttacactgatgaaatcttttttgttttgcaaatttattattcttcatgttatttgtcaagatataccaaaaggatagcgttacctacaagccagaatataactacgctaaactaattatatggcccgggacacaagtgaagcaagctaatcattcgactgtgatgatgtttacagcttaaatcatcaaaagttcagtactttacagcttgaatatatatcacaatctgacgacaaaatccaattctatgtatattgaaaggacacgataatattatcaaaaaaggaaaaaggaaaacacgatatataatctttatgaaacttaaaaacatcattttctgattgggtgtagttaactaattataacctttatggttcgtttgcttctctataactgtgtcttgataaagatagtctagaaaaagttgcttttattcccacacgcatgtaactttgatttgttatagctattcagaaaaataaaataaaaaatcacctccacaatttcattattattagctaaattgaaaatattttaaactatttagcattacatgcattcgaacgattatgaatatttctatcgtaagaaattaacaaaagaaaaacaaatagcaaactagtgattgccttgtcaccaaatagatatagtcgtcggactatatcgctataaaaatagtctaacacgtatcagatatttatatataaataggtgcatacaattaatattatactgatgttcaatatcattccatttattatccaaaaaaacatgatttcatttgcatataaatatatactaataatacatatatacatatatatatatatatatatactaataattaagctactaatattgactttgatgatgataaaataaacaaaggcaatcgataacacattgtagagtatcgtacataatcttagtgaatcaactcgttttgtacgatctgatattgtgttggatttaatgtatcacatgcatcattttcttgaatcaatcgaagatttaatagtttatatactatcttttttgtttttttctggcaccgagatatatatccaagctatcgatgtttggaaatagttcatataaaaactgttttatttttaataaaaatttacccaaaacatataatatattgatttgtgttatatcaccactcaattcaattccacatattatatgttgttgaacaaaatacgtctaacgattgagatttatcgtcatctctaaaatctgaacaaaattttgaatgtttttgatgcaatttattagttattgaccatttaaatatctgaatactgaaaaagtgaaaagcgaaaatcaatctgaatttcgttccatattatatatatatattttttgtcaaaccgttccatactatttatttataaagaaaactatggctaaaatcagggccggctcaaataatttaaggaccctgagctgaaaaaaaaaattagtcatcatttcatgtgttttattctgtaaaaaaaattttgaaccctgactgtaatagatttacatatacaaaagaaaattttttgggtgaccggtacattagctcctccagcactggtatagagccgggcctagctaaaatgtgggaagctcatgatttcttgccgggaaagtagcatgaactaacattac

SEQ ID NO: 8578 - DNA, 1978 bp, Arabidopsis thaliana landsberg
  unsure (1)..(1978): unsure at all n locations
caagtgctttttaagtgtcatgtctttagctaatgccatctcaaagtatgtgtgttatgcaacatttgtatcaactgtcaagcatattggttatttaatgtgatgcatatcagaccattgttcagattgcggttgtaatcacgtttacttttatgtggttcaggcaaaaacagagcatatgcagagacagtcagtaccttgatgaactggtcaagttgcatatttttgtctattgaggtcaatccgaatactattatcgagtggctgaaacattgaagaagcagctacaatgctaccactagcagaagtcactgaagagttgcgttcatcgtcatcataagacagtctaagaccagttgagactagattctctttaggcacttcttctcggacactaaaatgttgttatgattaatagttcaaagacaattgaaccatctgttgtctttgaatgttaccaatgctttcggcttcccctcctcttttgttaaaatccaaagacaacaagtataaaacctgcagctaaggaagaagaagagacaaatcaagatttgacctgttgcttaatattcagttaatgaagtccttggtgttttaagatttatctaatctttgatttgtctcttcttcttccttagttcagctctgctcttggtgtctttaacaccatgactttaatctggtgttttctaagtaacttttgttgaataaccagagacagaggttcaagggataaaaagaaaaaccaaaaattccttgaatacacgtacatttttttatgtatccgtccattgtcttaattatgtgaggaaaacaaaacagaggtttaacttgatacccaagtaagcaaagaagaaatgctttttgagcgtcctgtctccaactgaatccatctcaaaactattgttgagattgattggactctaattccaatgccagggaaggttcgctaaatctgatgacaccagaaggattcaaagcaaaaccctgcaagggtaataataatacctaaagattttcatgagaagccacaaaagttgcttcagatttgagagaagaaatttagggttggggagaaattaaacctctgtgaggaatttaaatgagtcagaacgttgaaatctgaccagattttcatgagaactcagtttgaggaacactagattagtgtgtcctttaagcctcagaagtacaagaccatttgggatatcagtgaagctttcaaaatctgtaatgtcacggtctatagcttgtaagaacgaagttcgggaatagaataagtcatcagcatcgagagttttgacaactgttgttgctgcttctgtcttctttctctcccttgaggcaaatagttcattgaccttggtcacaatatcactaacgaacacgtcatcagtgctgcaaaaatatagcccattagtgagaaactaatgttgacatagaagaaacacacacacacacatatagttatatacctaagctcatagctcagacccggtcttgaggcaatggacgagagagcatctctccatccccagattttagcttcagtatcaagtatagacttatcatccctcgtcttgatgttcttacgcacttcattctctatcttgagaagcctattaaggaaatatcccttgagattcttaactggttcatcctttaagctgtaaaaaacaggcaagggatcgattttccctgcgtccataagttnnnnnnnnnnnnnnnnnnnnnnnnnnnnnnnttcagaattagggtacttctttgagaagaacactactgcaacccctgactctttgatcctgctcttcgtctcatcctctacatacactaatatttggttcgattccaattcttcttttagagagctcactaggaattttccgagatgcntttctncaagaccgatgaatactcgtcgagatagagggtcgattttcatttcactacgtttcagtttgtacataagaatgaaaac

SEQ ID NO: 8579 - DNA, 972 bp, Arabidopsis thaliana landsberg
gctataacgaacgagaagcttaaatgtctttgaactataattataacaacactagtgttcgagaagaagtttctaaagtgaatctagtctcaactggtctgagactatcttatgacgacgatgaacacaattcttcagtgacttctgctagtggtagcattttagctgcttctccaatctttcagtcactcgatgatagtcttcggattgatctccatagacaaaaagatgagtttgaccagttcatcaagatccaggtactgattgtctctgcatgtaggctctgtttttacgtgaaaaggttcttcgattctaatgtttttgtttgcttttatgtggttcaggcagctcaaatggcgaaaggtgtgagggatatgaaacagagacacatcgcgtcttttctcacaacattagagaaaggagtgagcaagaagcttcaagagaaagatcacgagatcaatgatatgaacaagaagaataaagagcttgtggagcggataaagcaagtggcaatggaagctcagaattggcactacagagcaaagtacaatgagtctgtggttaatgtcttaaaggcaaatctccaacaagcaatgtcacacaacaacagtgtgatagctgctgcagatcaaggcaaagaaggttttggagacagcgaaatagatgatgcagcttcatcatacatcgatccaagcaacaataacaacaacaacatggggattcatcagaggatgagatgcaaaatgtgcaacgtcaaggaagtatcggtgttgatagtgccatgtcggcacttgagtttgtgtaaagaatgtgatgtattcactaagatttgtcctgtatgcaagtctttgaaaagttcctgcgtccaagtcttcttttcttgatttgtgacccaatggaacacaaggaaaaagagaatccattatataagtctttcacactccttttaaaagaatattttgttatataaat

SEQ ID NO: 8580 - DNA, 1664 bp, Arabidopsis thaliana landsberg
cgttattctgaaaacattagatttccgtattataatttaaacgaaggtttctcacatttcaccaaattatactgaattatgtataagtgtgcgtttagcagataaagaaataacagaagaagcttcattgtctatccaaaattaacttgaaatataaacaatttgaaatattttgtccaagaaagaattgtggatacaaacgaatttgaaattaaatagcttattaaattaggttaaaggggtagaggtaataaatggaaattagaccaagcatttaaatggcattgaaatagaaagtattgaatggtactatggccaaagagaagccattgtctacatatttaaatatagtcatctaatttcgcaacgagtttcttttctcttttaatcttgccataaaaaaaaaaaaaaaaaactgctttggtgctttttactttttgatctttgtttgaaaattatccgaattttatatttttctctaaataaaatgtggctaagtaaaatgtgatttaaacatgaatcataatcaataagagcttttcttttcttccctttaagtaatttaatttagactatacacatcaaatatgaatttgaagaagatactacaactacaaaatgttaaccccaaaaccaaaacacatctctttctgctggtcctttcttctataccttcttctctgaggcttataaaatggagtaggctcggattacctcgatgatcggtgctctacaaagcggacattttcctccgtttcttacaagctcatttgcacattttgagcaagtacacatgtgtccgcatctgtaattttaaaggatttgttcagttttgagtttaagagacaataattttttttttgagcaaagagttagttagttacctatacaagagagcatcaatgtggttgtcacaacaaacgcaacaagttcctttgcttacatggctccatcttgaaccatcctctgatgtttccgcgctcatacctgctgcataattcgtttcttaagatactatatacataagatcacaaaaatgagaaaccaagtttgttggatagaataggcaccgaccttggtcacctgcagatcggtttagggctgcagagacctcttgtctaaccgaacgctgcagctctaactgcatatccatgcaggcttcaagcatcctctgcatctggctcattccttgctgcagtcttgccacgtctcctcttaggtcgttcattacctcccattcctaatggaaccaagaagagcaatatctatgttacaccttttaaccaagcttatgatatgtcattgagcataattaattagctaaggactcaaggctaaaaccctcaatggaaggcttacaatttcagaccgatgcatagagtgacgagaccagctagtgtggtgcaaatcttgatgccatattggctggggtggaggcgcgggtggagtgggaagcagttgtgaaccattgacgccattaagttggttatcgttccgcacaaatacttggtggtctgtgtcacgttctggagaatctgggattgctgtttgcaggttagcgtgcagatcccagtctacgtgagtgtgtcctctcctttcagcatatgactgtatcagttgatcaagactttcacggaaaccactatgtagtagaatagaaacac

SEQ ID NO: 8581 - DNA, 1723 bp, Arabidopsis thaliana landsberg
aaaaaaggaaaatgaggaaacccttagtaattgcaactcaagaggaagaagagatggaattgaaacagtagaggaataatttttaagcttcggatttcgtgaaaattagtttttggtttctgtgtaagtgtgtgtgtgtgaatgcaagcttccctgactccctgtactgtttttgttttgtggcgcggggaacagtggcacccaactttactattttgtccctttagtttcattttgtacaacttagtccctgacgcgtaaaacgttatccaggcccaaaaattagatattatccagcccaaacttagatattatgttaaaaggtcaatttctcttgacagttttctactatgatttctgtttgaatcaatacatatacagagacaaaagagatcattattggcaattgatcaatttcaatcttcaatttctttaagaacatacatccgtggcagataaagtttacgagacatgacgaaaaagaaagagaagagattatttataatgacaaaaggttccaaacagctttgtttttcttacatcatgaaagattcctcgcaacaaactactacgccattaaaccaaaccatacatagatatagtttttaggatatggtaaagcatgtggactggagagaaactgcgatcagcttttgttgttacctttaagagctttgttctaaacttctacttctttccacggagtttagcaccaagtgccctctccagctttgaaaggatctgttgattcggaattgctttccccgactcgtattcttggatcacttgtggcttctcattgatcagctacagaatcaaaaccattcaatgaattcaattactgacgaaaaacagcaaaagaaagagaaagatacagagaaaaatgaaagtacatgggcaagttgggactgagtcagcttcttctcccctctagcttgcatgatggctttcttcaattcagtgggcacacgatcatctgatttcaaaaccatacacaaccaaggtgttaaagataaccaacactactaatcaatctaagacacatatggaaaacacagtgatttgcggataaatagtacataaagcatcagctcgtggcatcccaataacccatcaacaaaaaaagacttccactcactagtacaattcaaacattgcaagaaaacagaccctaagaatctagttcacccactgtgtccaagggatatagagatagatactaacattactatatcaatatagaaatcagatcaatacaccttgagaaagagattgaataactcacgagataagttctcagtatcatcatctagcttctttgtgttcaaggaggtgccgcttgatgcagccttgttcgatccagcattgactaaacccagcaataacaaaaacaacaaatctcgttagatgattacttgcaacaactagaaatactcatatagaacaaaggagatttcacgaaaaagaaaaaatgataaaggcatattcaaatgtcaaaacagaaacatcaatctgatacgaacaagaatccataagtaaaatcggacgaactgttactgcagcaaacgaaattcgaatcacaacaggcgaaaaccctaacacagatctcttctaagacaaccacaataatccagtgacggcgacgaaggcaaataaccctaatcatggaaactaaaacacagcgtgataaaactcatctagattcaatcgccaaatttaacct

SEQ ID NO: 8582 - DNA, 541 bp, Arabidopsis thaliana landsberg
actcatcgcagtcatcaactctgtctcactctattgccgtgtaggactctgcttttcatggcaagctctcgcctactttgtgctcgtaatctggatcattgtcctaatggctaactcttttgtacttttcttgagctctctcgcgcctaactacattgctggaacatcttcagtgaccattcttcttgcggctttcttcttgttctctggttacttcatctctaaagagagtcttcccaagtactggctcttcatgtacttcttctcaatgtacaagtatgcgttggacgcacttttgataaatgagtactcgtgtctgctcaacaagcgcctggtctggtttgaggaagctcctgtgaaaagctgcttagttactgcaggtgacgtgttagacaagaatgggcttcatgagagacagaggtggattaatgttaatatgttgacagggtccttcgtacaaaatcgagatcagtgttttcttgttatgctaaacagggtctcaggctccaaaagataaatgcttctcaatttcttaagctta

SEQ ID NO: 8583 - DNA, 810 bp, Arabidopsis thaliana landsberg
gtaagtcatgttattacgaatggtacaagaaaaaatcggaaacgaaaacccaaaggtggtcctagtgatgatggcgagtctctgtcgcaaccccccaaaaagaaaaagatttggtggacgaatcctcttcaagacctattcttacaggctatccaacatatcggttatgatagtaagtgttttgattttcttaaaaaaaatcgatatatatatacatgatagtatgatacacacggtttattttcttacaattcaggtcaccacacactaactaatgttttacgtttgtttactaatcttccaaagaggtggtgccaaaaaagatcctcgcgttcatgaacgtaccatacttgacaagagagaacgtagccagccatttacaggtttgacatctcttgtcaaaaatgtatttggattttattgtttaaaatgggaaaaaatatattaaaaaaataaccctctattaactcgaatcaaacaaaaaaacattttactatcttattaagcataaaaattttccaagtttgagttgattttttgatttgaacctatccttagtcaacaataagagctcgttataacaccctctagagaaggtttaaacttttaaaagttgtcgaaaagaaatagtgtttggttaattaattggcttttaaaagcttgggaattttttttcatcctctttaaatacatcataccatagattatgtgacattctactttttatttaacttaaaatcaattgctacattttgcagaaatatcggatattcgtgaagagagtcctgcatcaaggtaggtttagcatgt

SEQ ID NO: 8584 - DNA, 631 bp, Arabidopsis thaliana landsberg
ctacttgctggtatgagacaagtcttaacaatagatcattctatttcgaatccgtacatggacagtctagactcttgtgggaagcacgggagcccgtccgctacaaccaaatatcttacaactacatgaaccggtcagccacctatgagccgcaccgtattggatctggatcaaccttgacgcttcccatccaaagcaacatcagtttcgaaaaccaaccatctcaaaacgaagaaacaagaaccgttttcgagccacccgtgatggcgaacaaaatcagccaaacatctcaagttcttgggtttggacagcttggaccgtcagctatcagtggtcataatttcaatactaacatgatgagtagctatgagatgcaatcgggaactagccacttctcctatgagatgcaatcggtcttaaacaatgagaacgcaacatataaccctgagccacctgccaatgcaactacacagccaaatcttgatgaacttcctcaactggagaatctcaacttatacaatgatctcgccaacactagtgaggttccttacagcataagtaactttcaattcgatgacaacaaggtatattttcacaaccctaattttacaatgatatatatacatgaagt

SEQ ID NO: 8585 - DNA, 2498 bp, Arabidopsis thaliana landsberg
  unsure (1)..(2498): unsure at all n locations
aaatagctaatatatatataacgtggattttacttaatgttctgaatggtaaataatatgaaggaatcacatttttcaaaacgtgaaacataaataaatggtatatatcattcatcactaataatatttggatatgttgaacatgttttgggctagaagaataaaagaaactaattaacgagtaaattgtgtaccgttgaggtggcaagatcattagcgagacggagaatggtggcacagctccggacgacagagtggtttttggaaacatcggttagggtttggtcggagatgtggtcggataggacggagaaaaggtggagcagtatcgttgggacagaactcgagatcacaccgttttgcatgtattcttcgaaacttggtttgtgtccagttttgtaccacttggattcagttaggaacgttttaaatagatccgcccactacgtaaataaaattaaaaatttctaagtaacatcattttctatatactaaatgatttgtagaaaaacttacaacttgtttgaggtaagggataacgttaagtcctttgtctctgagaacatcgtatcctatttggttgatctcattgtatagaaaaagaaaacacattctcatgtagttgggaagtctttcaacatggttcacatcccatctggaaaagagtatattatatggattataattaactgatattatgactgttgaaaaaaataaaaattatcatgggagacacaattcagaatatgatctttttataccaaaaatcatcttaaaaagttttcaaacatattgttatttaaaagtttcttatacttatacgatatacttacttttcgaccacatttgtgaaaagctcgagctcctctaatgtaccatagatgtcgtagatatcatccataatcacaattaacatgaatattttggtgagtatcttgcggcagtatttaaactctggttcgtaaaatattccaatggtccaaaaataactctctgtgattcggtctctcacgaaatcaagttgtttcataagtcctgtgctgttccaccaactaaattgacaatcacataattaattaaatcatataaacagatataatccactttgagagatataacacatgtatagaatttagttcatatttacctagaaataagtttaagttcttcttgatgattagcttgtaacatgttgaaatcaattgctgcaaactctagcaaaagagggttcatttcatgctttttttcgtacacatttatgtaccatcttgcttctaatcttcgtatgctccaatggtacggcgtctctagtgctcgtttcaccatctctaatatataagtttcatcttctctgcaaatagttttgctactttccgcgacaaactcacttaaccgcttgtttgcataaattctagtctccttgagtttaaactccgaatccattgaaaaataagaagcttcgtatatagagagtaaacctttaatatcgctgtgtaaagtttttctgaattctccggtctcacttatgaaaacgtcaaaagcatctgcaataggaaatacgaataattttattatttatacgaaagaatatgaactactcaactcctttaagttactacttggtatagaaacgataattactaataaaaaaaaaaagcagctgatttagtgtcgcgggctgcaatacgggtttggtgtcactatgttaattaaaaatggttgtttaaataaaatgaggtaatatgtaaaaaaccttgcgagacatcaaaaccatgttgccttaggagaaaaaattcaagtgatgtagcatgaagatcttgtgtttccctctcaatttcgccgtgctggtcatgaaattttctcaaaatatcatggatttcatgtttatagtgatacgagattccgagtctttgcagagaatcgatcatttctagctgctcaatagaaccttcaatttcatttaatgtcttcctcacctcttctttaaacaatatagcnnnnnnnnnnnnnnnnnnnnnnnnnnnngtacatatcaagagagagcattgtaagagttactataatatactaatcaggtccgatttttagcatacatgttaaaaacaaataaagttctagcttcggcaccagacttataacgccaatttttgggagaaaaaagaagtggtataattttaggtcatgtaatgagtctttgaaaacgttagattgtcctgataatttgcatgtttggatgaattgtgcacgtatagtatgatatgtaatattacaatttaccacatatatattctcaagcgagaggagatattgatgatcccatagaggtggacgataattggcggaacggcggtggaaggtgacagcatgggtcgaggtcgttttggagacagcgttacaagggaaatgctgagtcttttgatgatgaacgttgcaaacaaaagctgaattgaagcatagattatgagcagccatttgtaaaagttaagggagctgataaa

SEQ ID NO: 8586 - DNA, 1527 bp, Arabidopsis thaliana landsberg
ttccaatatggaacctgttaattggttctacttccggatttgtaataaactagttgataacgtagtgtatctaaatttttgagagtaacattatataggtaggaagcatagatgtgctacattgttactatgcacatggggaagccaacgagaatttccagagacgttgctactggatgcttgaacagtgagtctgagtttgtgcatatttcagtgttttgttgttctctgtgtatactgaccttctagcttggacggaaaaaaatagtgtttatgatcataactttgaaggtactattatagaaaagcctcatctcattgggttttagtcgctactttgtctttgttttcctttggatatctgaggccttcgtgggttaggtgtggaacatggaaatagtgaacattggaattttctttagtgtctcctaaatagtttagtgtctcccttgtacgagttgactttgctttttgagtctgttttcacttttgttcttatatactttgttttatgctgtattgttacagacatttgatgcatatcgtttttgtgcactacttggaggttaaggtatagctcgtcctgtctgtgatattactccatcatttaacattaaaattatcttttgtagtgtagttttctactgataagtgttcttaagtttattttatattgtaaattatacagggtaaccggaccagtataggaatgaaagaaaacaattcaaattctgtaaatggcacagcttcagtgaatattgattcaacagcaagcccaactagcacattgtcatcattatgtgaagatgctgataccggtatttctttctctattattttgtatgtttggtactttggtaacttttgtttataatatagttctttccatggaagaatcatcgattttcatcctactttgtgaggtgtgatgatttacatatcatcacatgctcttggctctgtgtgtaattttcaacaccaccttatatcagttttggtgcaggggatagtcaacaagcaagttccgtcttacgaccatctcctgaacctcaaactggtacttctcaaataagggagaagcaggaagttagcatattaaattcttactgttagagctctgttttgggtactcacctctctttctggtttcctgtctgcatttttgttaagaaggcctttgttttcctgtctaggaaatcgctatggttggacacctgctcctggcatgcgtaatgtttcacaggttcatgggaacagagtcagagaaagtgattcccagagattagttgatgtcagagctttggataccgttgggaattcgctgacaagatttcatgatcagccttattgtaataatttgttgactcagatgcagccttctaatactgactcaatgctggtggaagaaaattcagaaaaaggtgggcggttaaaggcagagcatatcagaaatcctcttcaaactcaatttaattggcaggtagtgtactgtgtacgcatgctttttgtaattatttatgaaagagc

SEQ ID NO: 8587 - DNA, 1275 bp, Arabidopsis thaliana landsberg
tattttccagcgacttccccttcactctaaaataatttgtttatccagttaggtcttatatcttaccttttttatttttgggaagcacacattgtaattaaatttgacccactagcatgatcacaggtgaaaaaattgttagatttggctttatacgatcactgtgctgcacagtctatgcattatctcaagctttctagagacgagccgttgaggagagtcattgcctgatttttagacttctcttcactttccaagctccaaacatcttcccttcattctcctcttcaatttccgcagcatcctcattggtccaaggcactctaacattcataaatgattaaaaaagtaaaaaaattcaggacctaaagaatacaagaaaatacttaaaatagttaaaacaaaaagatgaaaatcgttaaaatacgaacatatgaaaacctgaagaataactataaaatagctttattttttaggcatataacatgtttattttataaaaactctttaaaatatttaccaaatattcattaatagctacaaataaaattgcaaagaagattgggtcctatcctacgtacgcaaacacacacttggcacatgccaacaactggcttgttaattaacaccaatgaaaatatcattatatcctaaaattagcttcaaccattaagaacttaagaacaatacaaacttgctatgtttttttttggatgaatgtaaaattaattcatcaaataccgctattacatctaagtatctaacacatatttttatttaaaaatttaaacaccacacacataatttcgtactcaccaaatttaccacttatcattgttcgtcaatttgcatcattattgcctggaccaaattgtttaaagaattgtgagaagagccttcggttgtgacagaggcttcaacctcttccttcaatatggtggctctcattctcatctcctcaccttcttgatccacaatgagcctcctcacggccatctcaacagctcctctttccaattcaccttcgatctcatacgcggtttgccaaacatgtgacataagtcgagtattcaccctctgatcaccagaatacggcctacaaatcattggtacaccactgcttatgctctccaagcacgagttccatccaccatggttccaaaaccctcccactgctctatgccttaacacctctttttgtggggcccattttacaacaaaacctctttcatcggtcaccgcttggttgaactgttcccggaagaagtctaaaaa

SEQ ID NO: 8588 - DNA, 1966 bp, Arabidopsis thaliana landsberg
catattattccttggggttgggccacttaattaataaaaacctaacttactaataaatgcaaatttcagtttccaaacattattaaatgcatcagctgcaattcccacccacctctttttctcttcccctaactaaattaattaaaattaaattttcaaaaaaataaaaaaataaaaatctctatcactctcttctctctctctcccacatggacccagtcttcttcttctttaccatcaaatgtcaacactcgcctcctccgcctccgtcttcctagtccaccctccccttccaccgtcgccaccacaagcaggcaaccactcttacctcacaactctaggctttggctactccatagccatagctctcggttttctcgtccttctctcgaccgtccttttatcctcatacatctgttgccgtgactctcgccgccgcacaaccgccgtggaatccacaggcgatcgtggcggaagtgtaatcctcccccgcataatctttgtcgccgaggaagacaatgaagatctcgaagcaggtgatgtcgtggtgggacttgatcaagccgtcatcaactcataccctaagttccacttttccaaagatacctccgccgcgtcctcagatggctttggtggcggaggagacacaacgtgctcgatctgtttatgtgagtataaagaagcggagatgctgaggatgatgccggagtgtaaacactacttccatttgtgttgccttgatgcgtggcttaaactcaacggatcttgtcccgtgtgtcggaactcgccgcttccgacgccgacatcaacgcctctgtcaacgcctttgtcagaagttgtgcctctctcccagtacgcggccgatcggaggagagcaagaagatgatattattattacatagatccattcgcctaaattagggtaattcctatttattatttttgctccgtttcattacaactttactgatttgtaattaaaaaaaacccgtcaaaagtggagtttgccattaatttcatcgaaatgaaatctagtttgaatcgtttactaaccttacaaaatttatccttttctattggcgtttttgaacgtttttttccgtttcccctatcaatatgagcggttcaaaataaaatacgcgtccgtgttgtgtaacttaaataaaagagtttgagtttgaacaaggcaacttacttttagttttttgttgttttttggtcaagggtcggaaactaagtttagttaaaatattagatttgttgaatgtcggaaatagatgtttctaaagttgggaacaaaaagagttacgacttaagatagtatagtttttttttattgcatagcgagtacagaagatgaattcaacgtcgtaaactcgtaggtccaaatgttggtcgagttaaagtgtactctaggacaacttttctaaatgaaattaacatttttatagataaaatgtttttgtttatatatatcacatgtgatttttgtttcaaactaaccgatcacaacatacctatgtttgaagaagcgttgccttcaagcaattctgcatttcttctacgtgacctggatgtttctggttcgatgatagccgaaaactgttatatttttcgtaaggcgcacgttagtcacacgaatcctaaggaaggttggttggtgtgaacactttatattaatacatttgaaaattatggttagtcaatatatagtcataatgaaatgcgaatgtgttatttgacttacactagtccacaaattcgctttttcctacacggcactatcctgtggagcgtaccggtaatatgtttttgtaattaagtaattaacctcgctttgattatgatttattctctttctagctacttgtatataggatacataattagatgtctatcacctactgcatgtgatagacgttagcattattacattacatctgactcataaatatagcagtagtag

SEQ ID NO: 8589 - DNA, 965 bp, Arabidopsis thaliana landsberg
gagaactaggcggaacaagaagacggtggaggtactgatgaggatgaagaagattagattgaagaggaaatagaagaggagagtgagagggcgagtgtgggaggcggatggggaagaatcatattccctccattccgcaaagggaaacaagtgacgttggatatgtgtgtgccaaccaaagaagatgggtccgagggagcctttgaaaggagagtgataacaaaaagcaaaaacccggatcttcatttgcaggccaagaaatccttttggggagacttatggcctctcacgactcaacaagaaaatggcaaagagaagcaagtagatgctgagtggtgtcgcccagacgaagaccagaaatggggtggttggccttagccttagcataagattcataatcatccatgtaaaaatcctgagttgaagtgttaaaaagacatttccatagagagtaacagaagcattgtagttacaattacagtaattctggaaaatattttacactttggggcttagaccacaaaaacaaaatcgtacaatatatatcttagtatattaccaacaaacagtgcacaagacatcttttagatatctgtgtaatgtgtatacatatattactctctaagtaaacaaataaaagaatcctatctaataataacttgtgtatgtcttttaaacccgaattggcaaaccatagttgtggaatactctgatccttccatcccaagtcgctgtcacaatcactagcccccacaggtgaggctgccatgcgctcctcaaaagcttcagcttccctctgttgctcattgcaacatcttccagcttctcttcaggccacgttgttgatcctttcattggagagaaacagtccactttcggtatcttcatgtccaaatctgtgatacactcggacagaccaaccctacaaccttgtctgagccaaggaatagccacagatgcattgt

SEQ ID NO: 8590 - DNA, 498 bp, Arabidopsis thaliana landsberg
gactacacagatataagagacattggggcagctgtgtgctatcgtccagatgcaaaggtactttgaaagaccttagtttgcttttagtctgatgatcagctgcttactatagagttttgcagggtgcagtaataggttctatgacagggaactgccgcttctaccatatatttggtacgttgatctgcttacatattgagatcattggttaatgaaaaattcttaactgatgcaattgttggttggagcttattattcttcatattgtgtacttcagagaatcagctgcaaatggaccaagagatcaacgttcatgggaagaagaaggttgcaagcaaaaggataagtggtctgcaatatcttcccagtgacagtgactcgcacaaagtaatggtgacttctgctgattcacagatccgcatcatatgcggagaagacgtcatctgcaagctgaaaggttaggatctgttcataactgcagatgaatgattgcatttg

SEQ ID NO: 8591 - DNA, 1673 bp, Arabidopsis thaliana landsberg
gttcaacttcctcataatgtagaagatatgatgatgaattagaccatttgtcttttaatgcacatagaaggggtgacaatctgtttacatttttttctaggttttagtaaccttttacccctttgatatgttttttcttcttcttttgttaaagacagttaagacttaaaagcagttgcttgaacctaacaggtgaaacatatgttttttttttctttcacttacatcattattagagatggcagacgggtaagcccgcgaccaaacagatcgcccgcgatgtgcccgcttttcttctgatccgtgacggaccagcccgtcgatattccactgtttcggttatatttttgacatcactgcacacatggtgagatattgtgtgcgaaagactcttagacgaatgaaagaattcaacttttcccatgaacttattcgagctactcacatgtgtgtgacatatagtttttgatagttacaaattgttaggtcgttagacttggtgattctacttggttagttatgttttcctttcaaaataattcagagttcctattcttcatctctacaaaaattcagctgtcgagagtgaagaatcaactttaattcaacgactgtttcggtaagatattcgtttttgaatcaacatattgttagaatcaacctagagaagaatcaacatacagtaatttttattttcttaaaaaatattttttagttgaggtagtggtatggggtaaatattttgagaattaaacaaataaaaagaagtattaaatagttttttaaaacacaaaaataggtttaagaaatttggaaaaaaaataaaatatatcacaaaattgttctctttataagtaactcgtaacgatgccttctctttcattctctgcattaactaactccactctttaacaggaagagaccagaggaattccaaatttctattagattcacttaactttcaaatatttcctttttgggttcttcgagtttgttgaaaatgtctgagaacgaagtcaaggatcctcgtatcgatggtatcaaaactaagatccgtgtcgttccagattttcccaagaaaggtagatttctttctttccttttctttatgttcttacttaaaaataaaaaaaaaaacaaaaacaaagattggtctctccctctgtttttggttgctgagaaaattgtaacattgttgtcaccacggttaaatttttcttacacgggttgggaacttatggatacaatgcaagtgctattttcttgatgaaacatattttcatattaagcatagtaatgtgagaattgcaggtataatgttccaagacataacaacactgctgctagatcctaaagcctttaaagacaccattgatctgtttgttgagaggtatcgagacatgaacatctcggtggttgcaggtactcctatttttctagatattaaaataaacaaagcgaaaacaaaagttattcatcatcttttaatttcattttaataataaattatatatttaaacctcatgtgggcagacagatatatttaactatgttgatgcatttaatttaataagatatgaagaaaatttggcgaagttgattaatattgtttggaatcatgattttataaatttacactattgtcatagtggtatgaatgttgccacaagtgt

SEQ ID NO: 8592 - DNA, 1638 bp, Arabidopsis thaliana landsberg
agcttttgatagcgcgattcagtagctgaatatcagccagcatatctaaggactccttgttcaacagaccgtcttttcccaaatttctctctaccatcatatccaggacggttcttatgagagaacagtaatctctttcaacagagcatacgagcaaaaatttgaagcgaggaagagaaaagtcgggttctccatgaatatcggatgtccatttcctctgaaatagccaaccaagctcattcaagaagcaaagaacttcttctcttgatcttggacgatctaagttctgtatttgttcctctatcacgtcttttggatgaaactcttcttcaaggcgattcaactctttgcaaatcgtggcattggctattatcaaagggaaattgtcacctcttaatccattctccaactattttgacataataagaattgttaaactaacatctcccaaaaaccaggacttactaagaaactaaaatttagttatttctaagtctttacctcaatgaaacatcgtcctagagaaacagagcttgcactctggacttggaaactacttacgtttaactcatcaacttttgttaacctatgttctcttccagttacctccattgacgcgtagttacccatatgtgcgcaacgaagtctgcagtatgaccaaaaagcttaagagaaaagcgacagaaagatgagaaaaatagctaaattcctacaaaaattgtttacctcattccgtcattagtcaagtttctaccccttactattaaagctgtttcttcaccggctacaacagccaacggcgacaccgtgattagctctggtaaattcaaagttctccaagatttgctcagacgaattctacctgtagtattgcatagaaatgactaagttatatcttgcagaccatacacaccaacagacacagaagtaccaggttatgagtactcaccatgtttgtgtgacgcgagctgtctgcctgcattgaccaaaaatcttgaattactccaaaattctgaatcttgaaccaaagatctaactcgttgcagtaaattttcctcaagctgaaaaaggagacatgaaaaccatcagctccttagatgcttagagaaaattcgaatagtgttaaccagtcattcaactattcacccacttgttcccaagcagaagctgacattgccacatagacagataaaataacacaaccaggcctgataaaactctccatatctgatggaaaactagaaagccatctaaagatctgaaattaaaaattgaccactgttaggatttaagtagagcaaccaatatttttcatttcaaggaaatcagaatattccccagaaatattacctcggttcgcaatgtgttagggagctgactaggatctttttcaaatagtttgaaagatatctttcctgtgcgctcctgtttacaaacccataaaagtggctttagacctgctttgctaagaccttgagtttagtttacaaatagaatatgggtagcagcatacctgagcattagagtttaagctaggaggagaataatccgaaccagatgaagcataaccagattgatgcctcaaaacattgtaattaggatttgcagtagctcctctatttgatgcaccaaagagct

SEQ ID NO: 8593 - DNA, 1897 bp, Arabidopsis thaliana landsberg
gtacaaggaagagagtaagtaacgtgggatgcccttcaagggtcttctcttccgagagttgttccaactgttccctcaaagtagcaacatactgcagatggttcacacatcaacatcaaaatcaaaattgtaacagttagagaggttataataagcacaaattctaatagtttatacatgaaaatatccaaaagaaggttacatgcataagcttagactggttttgctgattaggtgcagctgaaagtaatctcatgaaattgatttccgttttgccgattcccattttaagaatatctgatcataggaatgccacattcagatggaagccagacaccagaacagaacaaagttgaggtaatcaaagaagccatcttgagagcaaagtggttttgattccaagaactcatatttatcagcataacctctatgttcatgtaacccagaagagcacaatacataactatcaccactcaatctgttattaccagaactagcagtgttcaacttcactcaaatgtggacgaattacagtaaattggctaatcccactactgaattgaccttcaaggtaaaccccaatcatttgccactacgatcaaccaaaagtatagattcttcattcactcttatcaaaagctatacatgaaattcagagtgttctcattcctaaatatggaaagttgaattctatcaacacaaccagatcatgcgacaatgaactagaaaccacgaaccagaaattgttggtaatcgtttagtggacgagattgaatcaaaggttcaagtggtaatcgttttctcctgacgcaaaatcgaaagaaaaaagatcggtagcgtcgcatcctaatcgggtgacccggaaaccaatagttgattcgttttagtggcggtaaaacccggtttgatgaacaaatattaatgggcctggcccatacgaggatgatcgtggcaatgtcgatgataacaacaactcctctattcgggtttatgttgacccggaaaacgaaagcataggacacgtgacacatgtgatgtgagtgaagccaaaaataataatattgggaaaggatgaacacagcagctcagctttcgtcttctccgtcaatccaataaaaaaatcagcaaccgttgtttgtttttaagctttttttacaaaagacgtacacgtctctctctctcactccctctttaagatcagaagctcatttcttcgatacgatcaaccattaggtgatttttttctctgatcttcgagttctgataattgctcttttttctctggctttgttatcgataatttctctggattttctttctggggtgaatttttgcgcagagatgggttcggcgaacaacgagtacgagtttctgagtgagattgggctgacttctcacaacttgggatcttacgttgctggcaaatggcaagccaacggacctcttgtttcaactctcaatcctgctaacaatcaggtttctccgcggtttcttcttacatgattttgaaaatgcctatgaaagttttatataattgaatgtttctggagatcaaattggtttcaatcattgagtttagacctgattcttgtgaactttctaaggttggtttgtttgtggattgaattttggtttcattttgtttcgatgatgtgaattgttttctcttccatgtctactatgatattctgctcaataatcatttttttttggttttttactgatgcagccaattgctcaagttgtggaagcttcactagaggattacgagcaaggtttgaaagcttgcgaggaagcagctaaaatatggatgcaggttgctttctaacttcattcaagcgaatttgctttggttattgagtgaatttgcaccgaatagctaagtggagttatcttt

SEQ ID NO: 8594 - DNA, 1151 bp, Arabidopsis thaliana landsberg
  unsure (1)..(1151): unsure at all n locations
gttttttttttaaaatgacggcgatagaaccaattcatatgtatacagacggacaaagccctttaccaaaaaaaaaaatgtatccagacggaacaggatgaataatatgaaatataagtgttttcgaggctgagttaaatatcctgttatttgatacggtaaacagattttaaatgctttcactctctcaactatattagttaagtagaaaccatataggttaataggaaaaaaaaaattatgatgaagagtaatgagccaaataaatctcaagcaaatttggccttggaagagtaaagtctagataacaacaaaacttgatcatgttccaaacaaatctcaagagctgtccgctaaatattagataatatatcaaaaccaagagaaaacagcattgggggtggaaaacatatgaaatccgagtttagatatgcttcatggcattttattgagaagcaatatgcttattgacgatactgagggcagttgtctcctcgccgaagtcctgacaagaaatcacagaaacgtgttaagtaaaagaactatggaccatcatcaatgaatcctaaaaattagatgattcatccatgactttatataccttgacaacaagacatgagcatccaacaaccttcctggcattaccctcagaatcaatcttgcagagctgcaacaacatcaaagattcaatttgccattgataaccaaacattcatttaggaggataaactgagcgacaataaggtatatatgaagagtcagtattaaagaggaaaacatagacttacaccagcccattcgccaagggtcttggcacttggaactgttagcaacctgacttcgtgatcagcacagagagccttcacaagcttgacgtaatcaggctggttgcagtcttcagccaagacaacgagttgagccacacgcttctcaataagcttagcacactcatggagaccacgaacaacaccaccataagcacgagctttcctaagagtcaactccaatgcagtcattaagtccatgtcctctgggatggccgctggctcagcaacggggggaggaacaacaacaggggcagcctcatcactgaaaagtcaggacacaacacatgatatcatatacttggattgtccacaatanacatcgaa

SEQ ID NO: 8595 - DNA, 756 bp, Arabidopsis thaliana landsberg
ctctacgggctcgttttactctaatatataacttcgctactcattttttgctcttcgttgcagcctctctctctttaaggttagtctcttactcacttttgcgtagttcctcactgaaaattgatctgtgttcatgtatgtgattgtcttactttgttcatcttcctccgatttggttgtgtaatttcgatttatgtatttattgagactgatttgcttcatttccttggcagatttggaaaagacctttgcttctcttcgttcgtaaaaccagctcaaagattcaatatgtcagggtaagtttctcttaagatgcagctatattggattcttactccattcttaatatactgaatcaatagttgatacattatggtttagagttttagttttaggtcgatagatgttattactttgattggcttattctatgtgtgcctcaagctccaaactttctagttggccattgattacatgatttaagtttagttctagaattgataaagttttatacttttttcaatttttagtgatgaggctgttgctgctcctgtggttcctcctgttgctgaggcagcagtgatcccagaggacatggatgtgagtactgcattggagttgactgtaaggaaatctcgtgcttatggtggtgttgttcgtggtctccatgaaagcgctaagcttattgagaagcgtaatgctcagctctgtgtcctggctgaagattgcaaccaacctgattatgtcgatgttgtt

SEQ ID NO: 8596 - DNA, 625 bp, Arabidopsis thaliana landsberg
  unsure (1)..(625): unsure at all n locations
tattcaacgttcctttcagactctcggcaatgcggagacgtctaaattatttcatctaaaagtgaaagaaattgtctaaaattgnnnnnnnnnnnnnnnnnnnnnnnnnnnnnnnnnnnnnnnnnnnnnnnnnnnnnnnnnnnnnnnnnnnnnnnnnnnnnnnnnnnnnnnnnnnnnnnngctgatatgacagcatacatacatttattaatactacaccttagttgaaattatttattttccttcactcatatgctctgtttttactattgtggttctcgctctgtttnnnnnnnnnnnnnnnnnnnnnnnnnnnnnnnnnatgatgttgagatcgggggaataaacctcacacatgtttcaattggatcggaatacaaatgaactcagattctagaaaaatccaaacacattaaaagataaagccaaataaagattaaaaacataaaagaagatttgaagcaaaacatcatatagcttcattttctgtctcttgtctactctcagactgtcagacatactcaacgttgactgcatacaccagctctcattataagggctgggtcatatgcacacacattgacaagcgtcatacagttggatataccagcagtgccttaatatt

SEQ ID NO: 8597 - DNA, 2147 bp, Arabidopsis thaliana landsberg
gcctatttgcctatacgtgcaggtgattacgctgaggtttacagttttcctttcaagattaggaaggaacttaaggggacaggtaaacacactaatctcaaagagagtcttgagactgcatggagatggcagaagctgcaccgtaatggctatggcttaacaacctcatcggtctcggtttactgactttgttcattcctttggtgatggacggagattttgattccagatggtattgaggagagaagcgtaggagatgatgatggtttatatataaatataacacaagatatattatccatattatgaaaaaatgatatcacatgacgagatttttgattgatattcattttgtaatggctttaggttcttttaggaagcagccattcattagtatatgtacctctcacaatatttattgattagtcttaataatatatagcattcctggcttttaatttgtaaagcggaatttagatctaagctccgtgttgcatacattagcgaatgtttcgttttcaaaagtctgccttttgtctcatcagttatggagattctggatttcaaggaacaagatctgtagttctgttggattcgaaactcaatgaaaacaaaagcttcagtgagaaatcaaagtaaaatgcaacatatccaatggaaaaaactgtttatctatgataatttcaagatagggtcggtaataatatgatgttcttctggtagatcataaggcaaattgattccatggactttgaggtacttcaggcgaaagattgaagtgctctctcgaagttatcttcagctgatgctgctcgcttcacaaggacgtgttctggatgtgaaagtttcagctggctgcaaaaggattggaaatggaggaataagtcagcttactgatgcacttgttgttatgcagaaaatgcaaaaggtcatgaatatttatactttaggtagcgagaagatgatttcccgacgtgaagactgcatacaacgaggtttgcaagagtttctgggtctttagcatcctgcaatgagaataaacatctatgatttcaaacttgtccattttataataaacggaatagttgaaaagtttagatttggtgtaaggagttttcaagtatcctcatagatttaaatcgagtgagcatttccgatgacatgatattgagaatgggttgtgtcgatacagatttaaggaaagaaagagtaggttcatcactcaccttgttgagtgcttcaagtagtagagtctcagcttcttcaaaattacccatatgcatgcagcaaactgctttgccgttcaagatcaagcttgtcattgggtacttctcagagaaatcctggaagattagataagcttcctgtatcttggaaccaccctgagatcataaagaacaatttcatattaagaaacacattaacaaacttctctacactatatggaaaaaagaaatggatattcatatcatactactgccagattcaaccacgcgctcgcgagctgagtgagtgtgtggtcttcatcaatctgttgcatcactctcagatgtttctccgcaaaatctgatctgtgcatctttatgaatatctggacattcaaagcatgcctaaaatatgcagaaacaacaatcatttatcgagtaaacgaaaagagatcgctgtgacaagacaaaacaaatcgaaaagctcacagatccatggttcctccagaatgagtgtgcttcagagcctcattatagtcttcctcatgcatgaatatagtaccagcaatcaacctgataatagcattgtttcctacagttggatctgccaaccattccctcaagctcgaaatggttgattcctaaccaaaatcacagaaacaactacgtattcaacaatgcagatcactaaaataagatcaagatatattcaattccggatctctgaagctaaatcatcaaaagaatcctagaattctactaaagttatctgaaattccgctaagcaaacgttacagaggatgaattgaaacatctcaaaattctttgaattaccttgttttcaggacccgatagttacatagcaaggagtttcctgcctgtagaggagtagcagcggcttcatcgatctcactgatgacaagctacgaagacgaaatttga

SEQ ID NO: 8598 - DNA, 2021 bp, Arabidopsis thaliana landsberg
tatatgtttcaggcagcttatgactgttggatggcttatagcgtaaactccttacattatccaaagctcaatcttaggcattcgcccacatttttcacaacctgtatgcaacacacactctctttgtttcttttgcttcactttcactacgtttcataacttgtaactaggaattattgcaaaaacagttgttgcagacattcttttcgccatcaagaaagtcgaaaacttgtaatgtcaaacacatttacgccttggaatatcccgaggcattggctcattttgctctttcttcaggattttctactgatcctccggtaagagaactggctcatgattactatttttaacagattctttcttgaaactcttggattttaatcttttacagttatgttgtttatcaggttcgggtttacacggcggattgcgtattccgggatctaagaaaatccaaagaagagtttataagaaacaatgttcgtatacacaacgagacaaagatattgttgcccaagattgttcattactatgctaaagatatgtcactggaaccatctgccctatggaaacaacggtgaagtgtttaccggactccacgaagagaacagctcagaaattgttgaagaaaaagagcagaatcattgaatattcaccggaaaactcaagtttccgttatgtaatcatccaggaaccaacaacaagaagacatgattctactataatgtaaagcgaaatataacaacattaaaaaccggcatgtagtttttattttgagaaatgagaggtgaactacatgccgtttatagaaatcaattctaaggcccagaagcaaagtaaaatgagaaaaatgaatggtgatgatggtgaaagtgaaaggccttattgggaggttttggtttggagttggaggtgggattgtgttggccattgttgttgttattattgggcttagaggaacacaaaaagctatgagctcgacgatcttgttctctggtgttgttcctctgcgtgtgagatcggttttgactccagctaatccggctaccgatagagcttcaatggcgagttcctatggtgctaagtgggctcagaaaaccatcacgcttccaccgctacgtcgtggatgtcatcttattactccaaaggtttcatctttcgtgtgtagatgtttttgtttcaattcgaaacgattctgaattgactcaatttatgagcttttttggctgttcatttgattgggtttgtgaattcgatattgaaacagatattgaaagaaataagggaagacttgtcagatttcaattgtggtcttgctcatgtcttctgtgagatttcactctctctgtaatttcactctgcttctgctctgttttaatttttgagttgttgattaagtaaatggtttttttgtttgtttgtttgtttgtggtttcagtacaacacacaagtgcttctctgacaatcaatgagaattatgatccagatgttcaggctgatactgagactttcttgaacaggattgttcctgaggtatatctctatttggctggcttctcaatttactgatttggtgcttaagttgatcatttttgttgttgtggaatttcaggggaattcagcgccttggaggcatactatggaaggttagttgttggtttcatcagactaaagctaatttatatatgaacacacgataaaatcaaagatgttgttccctttatcctctgaaatgtgattctctttggcattacatctgatttcatgaattttgttgtaattagatttgaattgtgttaaataattgcaggtcctgatgacatgccagctcatatcaagtcatcaatgtttggatgtcaactcacgtgagctacaatcatattataaccgtagtttgacattagcttttggatgttcacttaacaagtgtttgttcattttggtctgcagaatcccaataacaaaaggaaaactcagcatgggaacttggcaggtaataaatttctccatctgactataat

SEQ ID NO: 8599 - DNA, 1654 bp, Arabidopsis thaliana landsberg
  unsure (1)..(1654): unsure at all n locations
ggagtctactttctcgtggatgttgaaatcttgctcactaagtccggaaatttgatccatgcccatgttcttaaattcggattggggcttgatctgtatgtggcgactggtctcgtcgacgtttatgcgaaaggaggagatgtggtatctgcccagaaagtgttcgatagaatgcctgagagaagtctcgtttcttctacagctatgatcacctgctacgcaaagcaggggaacgtcgaggctgcgagagctttgttcgatagtatgtgtgagagagacattgtttcttggaacgtgatgattgatggatactctcaacattggttccctaatgacgctctgatactttttcaaaaacttttggcggaagggaaaccaaaacctgatgaaataacagttttagcggctctttcagcttgttcgcagattggagcgcttgaaactgggcgttggatccatgtttttgtcaagagcaatcgtattaggctcaatgttaaagtatgtacggctttgattgatatgtatagcaaatgtgggagtttggaagaggcagttttagtgtttaacgatactccgaggaaagatatcgtggcgtggaatgcgatgattgctgcttacgcaatgcacggttatagccaagacgcgttgagattgtttgatgagatgcaagggatcccagggttgcaaccaacggatataactttcataggaacacttcaggcttgtgcccacgctggtttggtaaacgaaggggtaagaatctttgagtcaatgggacaagtgtatgggattaaacccaagatcgagcattatggatgcttggtcagtttgatcggtcgtgctggccagttaaaacgggcttacgatatcataaaaaacatgaacatggatgctgattctgtcttatggagttctgttctcggaagctgtaaacttcatggagattttgtgttaggcaaggaaattgcagagtatctcattggactaaacactaaaaacgcagggatttatgttcttctttcgaacatatatgcatcggtgggtgattatgaaggtgttgcaaaagtgaggaacttgatgaaggagaaaggaatagtgaaagagcccggtataagcaccatagaaatcgaaaacaaagttcatgaattccgagctggagatagagaacactcgaaaagcaaagaaatttacacaatgctaagaaagatcagcgagcggatcaagtctcatggttatgttccaaatacaaacacagtcttgcaggatcttgaagagacagagaaagagcaatctctacaagttcacagcgagagactcgcgattgcatacggtctaatcagcaccaaaccgggaagtcccttgaaaatattcaagaacctacgagtatgttctgattgtcatacggtgacaaaactgatatcgaaaatcacaggacggaaaatcgttatgagagatcggaataggttccatcatttcacagatggttcttgctcttgtggcgatttctggtaaaaccaaataccacacattgtaatttgtacgtgaaaagaagatcaaagtgaacanatttagttggattatctaaatatcattctttcatgggaattatgttgaacacgtggagggcattatttgtgaagttgaaacgaggact

SEQ ID NO: 8600 - DNA, 2120 bp, Arabidopsis thaliana landsberg
ttactctactttattaaatttttgacgtaaactgttctaaaattttaattaataatatagatgtatctattgaggtaccgagactttattttataattaatgggaaacaataaaatataatattattcgtttaaagagtctaaagctgcaacggcatcgccatatacagaaagttttaagcgcaggataagagcatgcacactctttcccatttccaagcaaaataaaacctatacatacacatttatactaatactcatatacattagagagagaagaagaaaaaatgtgggatttttcagagaaataattaaaagaaagcaaaatttttttttttcttaaaagcttttgtctctctctcaattgcttcttgttcttgtttgcatccggaaccaaagaaagaaactgtgtggtttcatgatggcacctttggtttctcttcttcattgaagggtcgaatttggtctgagaaaagaagagtggagagagagaaagagaagaggcaagagccccacaagagagacatgcttgtctgtgtagtccctattttgtatgttctttaatctctcccactctgtttttgtcatgtgtaagggttttgtccttcgattttggagtcttctttaaccaaaaaaaaacagattccatgaaatggctttgtctttaattcctctggtttgtcctggatttatcttcttgtagcctctttgctcaatagagctctttttgtctcttcttgtattaaataaaataaaatgaagacttagtaaagaaaaagaaaaactcttgagtcttgctaaagcctagttagtgttgagtgtgggagagacaaaacagaacattgaaaaatctctctgtatgatggcttcattgtcttgtgttgaagacaagatgaaaacaagttgtttggttaatggtggaggaactataacaacaacaacatctcaatctaccttgcttgaagagatgaagctgttgaaagaccagtcaggttttcatcttcttcttcctcaagatttttattaaaaaagttacctttttaagaataaactgtgataacaaaaggtttcataatttatgctaatgacatttagaaattttgttactttcccctgaaaatgcgattttgaacatttttcaggtacaagaaagccggtaataaactcggagctatggcacgcttgtgcaggccctttggtgtgtctccctcaagttgggagcttagtgtattacttctcacaaggtcatagcgagcaggtaactttgtgtgtcttaaagaacaaacaaacacattgtacttctctagatcttgttagctcctgttcaaaaggtttgattttttttgttcactttttgacttattaggttgctgtttcaaccagaagatcagcaacaacacaagttcctaattatccgaaccttccatctcagttgatgtgtcaagtccataatgttactcttcatgtacgccaatctttctcatttgcttcgtatccaaacaaattgcaaccaagtttgatatttcttgacaatggttttgttcccctttgataggctgacaaagacagtgacgaaatctatgctcagatgagtcttcaacctgttcactctgtaagttttggattcttgcaacttccttttgtttcatttaagaactcatgttgaagttgaatgagtttgaatggtttgtgtgcatcaagagagagatgtgttccctgtaccagactttggaatgctgagaggaagtaagcacccgactgagtttttctgcaaaacacttactgcaagtgacacaagcacacatggaggtttctcagtgccacgtatagctgcagagaagctatttccaccattggtgagcttctcttttcctcatatgttcctattgctttaactgctgctagcctgctaataatatgttaaatacattgcaggactactcagcacagccgccaacgcatgagcttgtagttcgagatcttcatgagaatacttggacatttcgccatatctaccgaggtataaccacttgatttgtctctttctctgtttagattgagctggtattgagctcagttcctgcttacattctcagggcaaccaaagagacatcttctaac

SEQ ID NO: 8601 - DNA, 1412 bp, Arabidopsis thaliana landsberg
catgtatgcagttcgactctagaggatccccttttttggtttttctatgccttagatgaatgcagactcaagagtatatacaatgcaacacacacttcctgagccctcccccaaacttaaatcacacagtacattgtgtgaataaacttggaagagagtactcaggacaaatccaatcacataaacaaaataaagaacaaattacaagagatgatataatacaatggtgaagtgaggcgctttcctcagtcgaagaatgagcaaagttggtcgtcaatggctgcctgtgattgctcccaggctatggacgaaccgccatgttccgtatcagctccagagggtgggtactcgacctcatcagctctgtggcgaccagcaccgctctgaggatactcgacctctcttcttctgttgcggccagcaccgcggtcgcgtaaactatgagactgcataagtcgtctacttctgctgctagattcagtgagtgtggtcctcctcttcctcccagattcatgaggcttgaatgatgaatacctcacagggacatgcggaatctcccgctctctaggctcaggctcgtgccgacttggctcaggcgcgtcatatctcctcgagggcatgtcctgagggagctgtccctgcggaatagctgtagtggaagaggagcagctgatcttgtccttcagaaacttgatagccatgaggcatttggcgagtaacttatcctgtttcttgcaccacttctgcagcttgttgttgttcctgtgagcttcgctcaaactcttgctatccctcgctcgaggtatatgctcactgaaatgatacatgcttgtgtcaaactccgcctcatctatatcatctgtctcatcaacatcttctgttgtagctccttcggtgtgactaatctcctcagttggcggactgccctcgaaataaagatcttcaagcgcaggcttgaaatcaatgttccttccctcgagaatcctagtagcgtcaatgcaggggagaagaatgttggcgattctaatcaatgaatgctcagacctatagcggtgaaagttgccaaccatgtcaaactcacatcggcgcaagtgatccaagtccatcattctccgtgctaaccctggctccttgagcggtactccacaaatttccagaattggcgtcacaacgccacccacgcataatgctcctctcaccttcttcttgccgtttgtcaacgcccacttcctgtatccacacaggtggatcaacagaggcattactggtggtgcgttgttgagatcgcctctcaagacattctttccctttgtacggcggagaatccctggaagcgcgaaatctatcatcttcatgtccgtgttagacatggtgcctgtagactccctggggtaaaaaatgttggcaaccga

SEQ ID NO: 8602 - DNA, 750 bp, Arabidopsis thaliana landsberg
tccgggtttgcagctattctacgaaggcaaatgggtcactcaaaaatgtgttcctaatcgattgtgatgcacattggagatactttggagattcttagtaatgggaagtataagagtatacttcatcgtgggttggtgaataaggagaaggttaggatttcttgggctgtgttttgtgagccaccaaaggataagattgttcttaagccgttgcctgatatggtgagtgttgagtctccggctaagtttcctccaaggacatttgctcaacatattgagcataagttgtttggaaaggaacaagaggaattggtgtctgagaaaaaggattaagtttctgtgtttactcttatatttgttcgtgtctttactatgattttgatgtgtgtatcttattgaagatgtgaagacatcattatacaatggtgtcactaacgtgatacgtaagaataataaaaaaacaaatatcatcttcgtttgcattttctaaactgttttcagtctcttggaaggaatctagtcactatagaccgagatttgtaaccgagatcagcaagagacaaacaagtaaccaagagagagatatgtagatctatgaaccacatgttgtattgagaacttgaaagtatttctgatttacattttctgtttatccgttttatgatactaaatgtaagacaacagataccgtagaaagcaaaagagagagggagatgcaatacatggcttatataatgagaaactgaagaa

SEQ ID NO: 8603 - DNA, 1681 bp, Arabidopsis thaliana landsberg
aaaggaggtagaacgttattttcacgagtttctaggctacaaacctgaaaattatcaaggtatctcagtggagggtataacaaagctaatataatattgttgtcaagaagcagatggggaaacacttttaagggatgttacagaggaggagatccgtcgtgttctgttttcaatgccaagtgataaaagtctgagccagatggttacactacagagtttttgcgagaaacatggccggtaataaagaatgattttgtggtagctgtctatcttttttctctacggtttcattcctaaaggtgtgaatactactatcttagcacttataccaaagaataaagaggtaaagcagatgaaggacttcagaccaatttcctgctgtaatatcatctataaagtcttctctaagcttattgcaaatagattgaaagtcattctcccagattttatcactatgactccgtctgctttcgttaaaaatcgcttattgatggaaactgttctcctcgcatctgaaattgtcaaagactatcataaagattcagtctcagctcgaagtgccataaagattgacatttccaaggcatttgattttgtgcaatggccgtttcttctcgccactctctactttgaatcttccatcaaaatttaccaaatggatcgagctttgcatatttatagcctcattctcggtccaaattaatggtgaactatcaggcttgttccgcaatgcaaggggtttaaggcaaggttgttccttatctccctatctgtttgttatatgcatgaatgttctttctcatatgctggacaaggctgtggtggaacgacaaataggctaccatccaaaatatcataatctccatttgacacacttgtgttttgtagacgatttgttggtttttacatatgggagaaaaagctcgatagaaggaactctcaatatcttcatacaatttgcagaaatttcgggactgcaaattagccttgagaaatcgactttatatatggttggggtaaaagcgagcgataaggaagccatcctacatgcatttccttttgcttatggtgctctacctgttcgatatcttggtctaccacttttaactaagagaatgacttcaaatgattatactcctctcatagacaaaatcatagactgaattggtaaatggacgacaaggcacttatcctttgcaggccggctccagcttattagttatgttattcagagtctcactaccttctggatgtcttcttttcatttaccaactgcaggcattaaggagattgacagattgtgttcggctttcttatttggtcttgagtggagttaaacgctaaaaaggcaaaggtggcattgagtgatgtatgtacatcgaagcatgaaggaggattaggccttcgttcactaagagaagcaaacaaggccagttgtctaaagctcatttggagaattacatcgtcaacttcactttgggttcaatggttacacttatatttgttgcggaaaggttctttttggtctattaatgagaactcgaccttagggtcttggatgtggaaaaaactgctcaaatacagagagttagcttctggttttatccaaacaaagatacaaagtggaaggtccacttccttttggtttgataattggtctcatcttggccggttgattgtg

SEQ ID NO: 8604 - DNA, 358 bp, Arabidopsis thaliana landsberg
catgattgaacccgaactcttcttctgcctgttgaagcaaagctcttgtacttaggatgagtcaagaaggatatgggtacgatgtaccggctcctcttttcgcctacatagaccgggaaatgaccctttggtacgtctacaggcagaccatcctcatcatagcattgattcttggccaagctcgagcatctcttgaggatttgcttcagcattgcggtttgtgttagctttgaagatctcttaaccgccattgctagttattgtttcttgagaggagaagaagaagaagttgaggtgtagatggcggagagaagtgagagatggtgcaagggtcatttatggcggccaatgaggatcg

SEQ ID NO: 8605 - DNA, 1570 bp, Arabidopsis thaliana landsberg
acatcctttgtacttcagtcttgagggggatacaaaatgttctgcatgtggcatcacatatagcgccaggaaaatgttgtgttgtgatgagtgtgaatttcggttggacttccggggcgctactttacctagaaagataatgaatcaaaggtacgacgatcatcctctctacttgtcgtacggtgaaaataaggaagatggtcaactttggtgtgaggtatgtgaaacaaaagtagatccaaaggaatggttgtatacatgtaatctatgtggaatcattttgcatatctcgtgtgtcgtgggagacttctcatatcacgtaccaggacacatttcatcgaacaaaatcgcaaatggagtagtggtacccaacacttctatttgtagaccccattgttctaggtgttcttcaagatgcaggcttccttatatacttcaaatcaacgacttttacttttgttctaataagtgttgtgggaatactcgcaaccctaggggtcgtaattactactaaacaatagtagtgtatcatgatactaataatgtactgtttctatcgttatttttcttttaagccaacccccatgaatgaaattatgttttacatgaataatatattatatatgttttttaaaatactcttgtatttgatttgattgcatataaattatttcctcgtgaatcaccaagggatatagaatcaaataattgttaaattagcgttacattgggtgattggaaatggatctagccagaatactggtggcccgcaggtggccgccgtggaagaaaattattcccggcgcaaaagatgcctcgtaaacttagatcagcccaattcaaaactaaccaaatatgggcctaatccaagaaggcccatttctaaccacgtgattggcacgtgtaaaccaaccaacggaagtagcagagaaaactagtggcatcggcaagtaaaaagcccctctctttattatcgtcgatccaaaaagcagatttgatagaaaagccgcgaatttttatgtttttctttgggaattttccggtaaactcatcggaaaaatgtttctgtctcaccctcctcaagtaatacaaccaacttatcatacagttaacttcttacctcgctctcctctgaagccaccgtcgtgttccgttgctttaaacaatccttcaatttcctccggcgccggagctaaaatctctaataatcagctaattcaatcattgtgcaaagagggtaaacttaaacaagcgattcgcgtcttgtctcaggaatctagcccaagtcaacagacttacgagcttctgattctctgctgcggtcatcggagctctctttctgatgctctacgtgttcatcgacatattctggataatgggtctgatcaagatccttttttggctacgaaacttattggtatgtactcggatttgggttctgtggattatgcacggaaggtgttcgataaaacgcgtaagagaactatatatgtctggaacgctttgtttcgagcgcttacgttagcaggtcatggagaagaagtgttgggtttgtattggaagatgaata

SEQ ID NO: 8606 - DNA, 968 bp, Arabidopsis thaliana landsberg
attttgcaaattcaaaatccaaaaactactccaaaaactcgagcggggtctagttttttggttttgaataatttgtaaatatttttttttcaccttccaatatttttttaagaaattagtttctttaaaacatttagggaaactagtttttttaaatggtttctctaaacataaagtagaaagtagagaccatttttctaggaaataaggtttcatttttatttattattataaaaaatttatcaaccaaaaactaaaaatcaattaaaaatctttcgtcgttcataacctaaagaatttggatgggatatgcagcaataccatgttgattgataaagcagaattggctcctcttaaagataagttatgagtcgtttattgcaacaacactcaaaccagcaaactatataaataactaaattaaaatccatcccaaaaaaaaagattgaatacattctcaatgcaggactacatcgtcaaacacaccaatgccagtttatgatggactagcttctttacgagtgagtaagaagctgaaacttgagttttcgcggatcagctgaggaagttcaatgtcgtttacattcacttgttgttccattgactttgttatatcccccaccgtgaatggaatgctgcgttttgattgatttctcaggttagttaagaaataagaatggtacaaagagattgacaacatatcataatcaggttacctcgagtcgtcatccaaaaggaaggagctgcttacggcattgttcgagtcctctgtcatcataaccctcatgtttgcaataacctatgtttttggaaagaacacaattagtaccatatctacacaaaagaagaacgcttagttatttacaagcgaaacatacatctgaagaaacactatgagtgccatatttgtcatcccagtacattgtgctgattctgtatagctgttgtatacttagcacctgaaccag

SEQ ID NO: 8607 - DNA, 1269 bp, Arabidopsis thaliana landsberg
ctcattcattgatgattattctaggaaagtctggatttattttctaaaaaccaaagatgaggcttttggtaaatttgttgactggattaaccttgtggagaaccaaactgacaagaggttaaagactcttagaacagacaatggtcttgagttttgtaacaggtcttttgatgaattctgtctggcaaaagggattcaacatcataaaacatgtgcctacactccgcagcaaaatggagttgcagagcgcatgaacagaacagttatggagaaggtcagatgtatgttgagtgactctggtctcccaaaacgcttttgggcagaggcaactcacacagctgcaattctcataaacaagtcgccttcgtcagctctgaactttgatgttcctgataaaagatggtcaggcaagtcgccggtgtacagctatctcagaaggttcgggtgcgttgcttttgttcacattgatgaggggaagctgagtccgagagccaagaaaggaattcacattgggtatccagttggtgttaaaggatacaaggtctggttgctagaagataagaagtgtgttgtgagtagaaatgttgtctttcaggaaaatgcatcttacaaggatttgatgcagagaaatgaaaatatttgtgaagaagaggattctgttccaagttcttatctggattttgatcttgatgctgaagaggttatcacctctggtggagacgtcactgctgttcctgcagtccagtcacctgcaagatcaggcaccgtcacaccaatgagtcatgaagactacgatgattcggagattgacataagtcattcacctccaagttatcatcttgccagagatagagtccgaagagagatcatagctccaaggcgttttgatgatgaggactacctggcagaagcactgtacaccacagaagatggtggagaattagaacctgctgactataatgaggcaaagagagactcaaactggcctagctggaagaaggctatggatgaagaaatggagtcacagaccaagaatcacacatggactgttgtgaaaaggccaatgaaccagaaaatcattggaagcagatggatttacaagtttaaacttggaattccaggagtagaggaacctagattcaaagcaaggctagtagctaaaggttatgctcagagggaggggatcgattatcatgagattttttctccagtggttaagcatgttacaataagagtgttactctcaatagttgctcaagaagaatcttt

SEQ ID NO: 8608 - DNA, 2463 bp, Arabidopsis thaliana landsberg
  unsure (1)..(2463): unsure at all n locations
tctgaacactgaactctgtaggaggagaacctaatttgacctttgtgaaataaagcttttcatttaacaaaatacagctacatatcacaaaagagaagataataaattccattagaactccaataacagagtgtgtgtgcaaatgtgacatacatagtcatcttggagctgcaacacaaagaaaaagaaaggagacaaactcaataagatctccgtatagatatcatttcaaaatctactcttttttttttcaattcaaaaccttctaataaagcataaggcaaaataaaagccaaaggataaaggaacaaaaaaggaaagataataaaaactttgaaaccctaaatctttcagtttcatcacagaatttaatgaaaacgatcttaactcaatccaattatggaaacaaaggaaagaaacttctgatttcagcttaaaactaaaaaaagaaacattccaagatgaaattttttattacccgacgaggtaaggatcggaagagccttgaactgggaagtcgacgacgccgccaacagagctctgacgaccaccgccgagtaagattcgcgcgtgtctgacacgatcacgcgctctaagttcactcagcaccactagctcgtctagaggaaaagccctttgtaaaggaagaatcttggtcggaccagctgcgtatttcgcataggccgaaggtaacggcgatgctgcaaaaccagtcacggccaaagccactgctagagccgccgccaacatcagggaacgaagggtacgcattcaagcagctcgtggagattatggttatattcccgatgaagacacacgttccagagagcgacacaaatgctcgattcttcgcatcgagcagagagagagacagaaagaactgtcagagagagagagagagagagagacgttctcaaatgttttagcggagatagtggggactaatgaaatttatatattccaaaattattgatttcggtttagtttggtttggttcggtttagtttcgattttatgttcaaatctagttgtttactattttaaattaacgattggtatattgattcctctatctgctttctctgttttactaaatttcctcaattatagatgcagaagattatgaaatgataaaattgagcatgcaaaccgggaaattttcttaaacaagggatcaaccaaattgtatatttccgctattatttattgtgagaactcaaagtttcttatacgcaaatctttagacaaattttctgagcagtttttagggtcagtgaggcttaatattattagtcaccactcgtaagaccaccttcgaattaactacaaaattatatgaatgagtaagttaagatatggtttacttatattatttaaaattgacttgtaggtgagtcgtgctagtcttcatgatccataaggacacgtcaaagaatgaatgaggctttggtaaattgtggtgtgagtttcctaaacaaagacaaaaattggacacattccacgtcatctgaacataattgtgcatttccacacccaaaccaggacgaaccaataacanaagattcaaaatcagaaagaactatagaagattcagattcatagagcataacatgattatgtaatacaatgatatatattgatctcgtatatagatctcgacttttaaccagttgtgtttacttacacatcgaattaaggtcggaagcaaaaaaaacaaaacgtgtaagtttgttttcagccaatagatgaagttttagcagcgagatgaatcaaagcccgtcgatgatacttgcttcttagctttttgtatttctgcacaaatgcagctgtgtcaatatccttctccataaacttctgttgcagctcctctgattcttcatccacctggttcatagcatctgcgataaacaaacccgggattgtgtattagaaaccgacatgtatcattttgttgttacacatgaaggatattgagtgaagcagctaatggttttacttaccttgaagtctatgaagaagagaacctggagagtagaatttgaggatctcttctctttgattctcaagctcattgagcttctcttgagcagtcgcaagctcggatgtacggattattctgcactgtttttaaaaagattatacaaatggagagaagtttcatatacttaattaactcactcagagattgaatgatattattcacttggtttctgagctccactatctgtggttccttctccaagttttctcctgttatattagcatgaatgttttagatctcgcaatatgaatataattgtcatcgtcaaaaaaagtcatacaagaactcactagctagatgtaacgtttctttgcgaagctcttctctgatctaatgaacatataaagaaaaagcacaaaactgaatcatctcaaaaacgtaaataatgaagaagctacatttcttaagacaatagatgattt

SEQ ID NO: 8609 - DNA, 569 bp, Arabidopsis thaliana landsberg
ttcaagtgcattaacctttaaaacgttgatggtcttggcatatccatcatacttgtaccattcaagagtgggtgcatccaaacagatgctctatagttttggcagacaagacacgaccaacgacttgaacttcttatgatcatgagcgtatatggtcagtatcccattcccagacatttggcatttgactagttcaagcgactcaaggtggatgcagttgttgaaaattgaatctatcatttcattcgttacctcagtccgcatgagcgaaagtgtcttcaagagccttagaccttttggaagattattcggtatttcaaatctacaccattgcagcttcaaaacagtaagtgtctcgctggatgagaaattgagtgggatctccataaccttcttggagcttgagaaatccaacacaagctctttgatgtttttacgaagacacgtatcgacccacgaaagtatcttatcctccacgccggtatggtcgaaaaacaaaacaaaccggtcgatctctggtccttggtgctgattaaaaacgtcttcgattatgcgtacagcctctgatt

SEQ ID NO: 8610 - DNA, 2204 bp, Arabidopsis thaliana landsberg
tgccaaaaccaaaaacaaactcaaaaaggtttttttttttcagaaaaccgtatttaaaatatactaattttttgagaagaagatgttgacgttgcatcacaaaattaacttttcaaataacaagaaacatttggccaaaaagtggtctgaaatcacaataacactattatggatgaagacgaagtcacattcttttacgtgtcatgaaaaaactataatttcgtgtataaattttgtgaagtgcaattagacgatagactatgcaatcttataaaacaaaattttctcaaaaaacataataaaatgtatacttatagatgagatacaacaaggatgttagtctaatcttcagcgtttagaatgatattgaaatggaactgaaccggatccggctaaggctgtttttgatcaattttaagtaaaccgagagacccgaccattttttggcccaaacccgaatgatccaacacaacagacacagggcacaaaagaagcaaagaagaagattcatggaaaagatttatggctttgcctttggtctcctctgtttcttacatcaaatcctcaaaccaattccattgttctttctctctgagaaaaggttagtctgatgtttctcaccattgaagcaaaactagtttacccaaattcacaatgacattgttgttcatgtgtttgctttcgaaatctgggtttctctaaagcttatgatactaattcttgtcttctttacataaaattttagtaatcaaaggtttaatttcatttgggttttggatatattgcagaaaaatttgagctttcaagtttcttcattgtgctttgttctcacttcagctatgttgatactgcagaaagattagaacttgatagattactattgtggagctctcatcagaagataagatttagtaaaagaacgttttctcagagaattgttgtgaaaatgtctgcttcaactttgcctatgaatcttggcaaagcaaagaaggtttggatatggactatgtgcaaagaagtcatgaccgttgcggtggaacgaggctggaacacatttatattctcatcggataatcgaaaactatccaatgagtggtcatgtaacaatgcagccctccatttgacgtgtttttatatatctatgttcttagttttacagtatgctcaatggatttttttgcagctattgcattgatggatacattgtttattgaagagaagaaagttattgatggtacggggaacgttgtagcttcggtctttgaggtttcaacacccgaggagcttcggagtttgaatatcgaaaacgagcagatagagaatattgttcttgatttcttagactggaaggtaataactttctgagcttgaagccttgaacttgaactcactgtgtggactatttagtaacacttgaagtttcgtttcgcagtcaatcccagcggaaaatctagtggcggctcttcaaggaagtgagaaaacagtatttgcagtttcaaatactccctcagaggctaaactattcctagaggttgtgtttagtttctgatgttgaattttagttttcaagagatgtttattcttagtgttatgcttggctctctaggctttagagcatggtctcggtggaatcattcttaaatccgaggatgttaaagctgttcttgatctaaaggttactatctccacaagcgtcctttcattttgtttaaaaacatggtctcttatagttactgttttgaaaaactattaggaatactttgacaagagaaacgaagaaagtgatacattaagcttaacggaagctactataactcgggttcaaatggtcggtatgggagaccgagtctgtgttgatctttgtagcctaatgagacccggggaaggtcttcttgtatgtttgcctgtatatacactctttctccaacataaagtactaatttttactattcttataagcattgaagtatcaatctttactcttcttacaaggttggatcttttgctagaggactcttcttggttcactcagaatgcttggagtctaattacattgaaagcagaccatttagagttaacgctgtgcgtttttttttctttcatttttcacttgctgggactattccttttatagatatcattcactaaaaatctcattgtaccggggccggtgcacgcttatgtcgctgtaccaggtggaaaga

SEQ ID NO: 8611 - DNA, 3839 bp, Arabidopsis thaliana landsberg
tctctgaaaaattatttgttgcagtttcgatcgtcttaaatttgtattgcagggagcgtacagatgtaataccagctacaatggtaatagaatgatctaattagttccatagacaatatatttggtaaaagcttagaggccaaataaaacaaatgaacaacactcactttgattaagttcaacttcttgatatggtttttccttccgagcaaaccggcgagcaagaattcccgagatgatgatgaggatgactataccaaccacaacaattgctagaataattttcattgagatttttccgctacctgtagaatgaaaaaacaacccttataagtctttggacagagtcttttgactgtaactttaagtcataagtttgcaaggacttactattgtctctcttcttgtcccggttgtatgcagaaggtggttgtgacgcaaccacaggatgttgcagtggaggaggataaagaggaggagaaggaggagtagccaaggtaatgttatgaaaagccttagagaatgtaaaaagctgccaccggaaaaagcagattggccgcataacataccctccagtattatttccacagcatgactggtactcaagtacgccttgatggagacagttgttacattcgttttgaggaaatatctggcgtgcattgcatcaatgcgtaaatattctggaattttgtcaagttcgcaaaatcaactctgtaatggttatcactggacgatggtgtgcttcttgctgcggaggctgcagtaatcgtacgagatgctaagtcttcccatattgtcttgaactctgttagatttgaggcgatagttgcagtgttcaacaccaaatactgcggctcaatctcccaaaaagctgcagatcctgagaaagaaatgttggagtagcggacaaggcacagcgttggatcaagtgcccaataatacgcgtctgtctggttaacacagtcctgtatcaaccagcctgccgcgccctttatacaattagaacagtcacttggagttgatcttgggatgcacatccctaatgcgtagactcgatcttgctcttctccaatcgaaccgtagtagaaaccatcttgagaggcggtattgttaggaagagaagagaagataagacgacgatttgagtcgtatgtaccgttgggtgtgaaatatccacggttctctatgcatgtttgtgctgaaacagaagcaacaccaaaggctagaagaataaaacagaggattgataagaaactcctctgctccactttgccttacgagattatagctgcgatctttgtgctagtaattacgcacgtatctgtttctaacccgttcgaacagataagtgaagtttctctgcgattttctaaatgttgaatccatcaaactaataagtggtccctaaacctacatagtcgatggtaaaatgtaaataatgtttgaaagtttagataataccctgaaaatgacgagtccctccgcatacttgtaataatgggtgagaactacgacacagttccatagcaactttcatatttcgagaattaaattatattcctcagcaaatgctatgtccttgtaaagctctgtttttagtctatgaccatacttgtaaaacatgttgtttttttttgtgtgaattaacagttcattcaaaataaaaataaataaataaataatcgaaaatgtaactctgtggttattgtagcttgaaaaaacgaataatcaagtgtgttgttcattctcttcgttcgttgcacactggtatagcttgttgctgtcatctactgctgactccagcgataatgaaacgatcagaaccacgaaatttactagaactcagcttatcggaacttggaaggggaccagatgagtattaggctaattcgtcgtgttgtatttttcaactaatgcgtcagtgtcgtttttattttcaactaatgcgtcagtgtcattagtttcggaaataaacgatatttgttttgtttttgtattgggtcctatatcgagcgagattggcatgtgagttgggttggctagggaaaatggtaaaatctccacattttgttttgaaaatgtgaaaaatacatttttccctacagcggcgatatgaatcagtactatttataatgcaagatatgtaaatttaaaagacatcataagaaaaacaaaactacagaatttcgcttaagctttcaaagatatcgatttgaatataatggtgcatttgcggggttcagtttccacggaaccggtaaatttaaaagccaaataccttaaaagagttgtgaaacagggttacaaatatacatagtggattcgtatgaaaaagaagggaggaatgagtcctacacgtagtcacatcacatatgaaagagattgcttttgaaaatcgaatcctcttctaatattaaatctttcaagactggaggtttaaaacaagaaaatcaaactcgatgcaaaagaacaaaatggtcgacttgcgagcaatcttctggtttgtggtcataagctcttgtgctgtcgctgcaccaacctgcattcagagatctgattttttcaaagccaatggtccttacgacaaaaacctccgagccatgctctcgtctcttccttctcgtgtcaaggataatgaaggcttctacaagactccgttcaagcccggtccaaacatagcacatggtctggggatgtgtagccgaggtactacaacacaggattgttcggattgtatcacgagtgtatctcataccttgctacacacatgtcctaatcaggcagaagctatagactggagttctggagactcgctttgtttggtacgctactcaaaccacttgattaatggatcgctcgacgaagacataatatgggcagagtatattgagtacaaatataacatatcgttcggccaaaccaacttgacggagtttaaatctacatggcaggctttgatggatcgtgtgataaacaaagttgatggttcattgtacgccaacagcatacaagagctcgggtcgttcccgttcaggagcatttatgccatcgcgcaatgcaataaagacctaaccaagttgaactgcgagaaatgtttacaacatcttaggatagataataggtcatgctgccgggggatacaagtaggctatattgcaaggaccagctgtttcatgcgatgggatctacagccattcttgggactattcataaatgggatgttaccaactcccccttctgaattagataatggtcactctaacacaaccaagaaaggtatataatataaagatatgaactcttcatttgaactttttctgctgtgttggatctcgatttttgctgatgtgtttgcatttatttttgtttacttgaaaatacaaactcaaaaagaaaacacaacctcctgttatttttgtgtaataatgtttcatattcgtttcacaaaaaaaaattgtttcatattcaaaaaatttaaaagaagtttctaaaaaaattcgcatttaaaatactttatgcccttaaaccaatttggattgtattctgagtgacagctttcgcgcagatggcaaaaatatatctacaggatctattgtggcaattgcggttgtttccgtcgtcgtgagcactgtactgcttgctcttggatacgctgtttctaggaggagaaaagcttaccaatcatttgcaagtgaaagtgagttttcaatggtttgctagaacgacattatctcataacaacattttagggtaaaatcatttccaacacttttgttatgcctctgttccttctcagatgggtatttctgtgcttaaagaagacctaggaggcctta

SEQ ID NO: 8612 - DNA, 1348 bp, Arabidopsis thaliana landsberg
caacaacaatcaaacgaccatcgaataacgtaaatactaataatattattgcatatataaaaaacatatataatatagaatgttctaaaagactgagtagaagcctgtagtgtctgcaacgacatctccaaaagcagcgatagaagaagaagataaatcttgcggctccatcatcccgtaatcttccattgacattgaagcggcagcagcaccatagttcgtgatcatggcagagagatcacacgaaccaaactcatgatgattcatcatcatcatctcaccatcttcgaagtagctattactaaaccctccatatggttcagaggctttgcttgctaccggagttgtgaaactagctccggcttgattttgggtggtggtggcctccggaggtggtttaaggcagtggtttgggacaatgcaatccaagtaacccgagttgttattggacttattatgttcttcgcttgttaaagagaagaagaagttgttttcttcgtctagtgaagaagataacgagccgttagaagatgagttttgaggactattaccaaacgcttgaatatccacgctttgatgacgaactggcgttttgaaagaagccgcgggtaagacagtttgggggagagtgtgtttaggttgttgtggttgatgatagttttgataatgaggatgatgatcgatgacaaactgtggagaagagtttggtaagaaagattggttgttattgtaaggagagacaatgagagagtggagattagggtttgtgaggatggtgtggacatcagttggagtgtagacgaagttggttcgagcttgagtacctctcattgaaagagcagctctatcgtaggcaagagcagcttcgtgagctgtgtcgaaagtgcctagccagtgacgttctttggtggttggatctcttatctcggctgcgtaacgaccccatggacgtctccggactcctaggaacctccctggctccgcttgctttgatctccggcctcgtctctcgccggttgtggtggtggtggttgtgttggcggatgtgttttggtggatcagagcaaaacccatttgcgtttgggatgtttcgaatggtttattatggtatagggttttggaggttacatgatgataaagaaatggtttttttgaaaggaggtttcttttagggttttggttaaagatatctaatgatgagtaagttttttttaggctttgcttctgtctaaagatgatggtgctgtttgggaatgaaagtgtagtgttgtaataaatagagaggcaatgagcttgatagagagagaagatagagagacttcacttttgattcgtctgcttttggtag

SEQ ID NO: 8613 - DNA, 1738 bp, Arabidopsis thaliana landsberg
ttttctcgttttctcctttttttttttgttcttgcctaattcttattaaaaacctttcctaatttttttttaatgaaccaagcctagtttgaaacccgttaactctatacatctttactaaattctccaaagaaagacatgatcaaaaagacaaatctatacatattcactaatacccagagaaagaaaattgagatgtcgtatttattgatattccgaaacaataacatgagatgtcgtatttattgatcggaagaaaatttaaactcccattagtaacgaacgcaagaaataaaaccaaaactaaaaaattacaaaaaccaaacaataacatgagatgtataaatcatatataatctaaaccaaaaactacaatttgaaaaaaggaaagctatctatccatcatttcttccgatcatcatcatggaggtgaacactcgactgactcgagaagaacatccattccaagattcatctgcatggtttctacggtaccttgaccaccaaggcgactggcttgaaaaaactaggggaaacctggtcgttgctgcaacagtcatagctgcaatgagctttggggtaatggtgaaccctccaggcggtgtttggcagagtgaagactgttcctccaaaggccaaactacttttcaaaccagaacttgtgaggggaagcttgggacttcgatactagagcacaatccttcaaagcgtatcttctatcttggcatggtcattagcaatttggtatcgttttccgcctcaatgggtatcattttcctcgtcatcattggcttccgattcaggtactagatccattcataaaccataattatataatgtgttttcttcttaaacatttccttgcaaatagtcgaaataaatagtgagacctgtttactaattagtgaactaatattatatctatctgactatctgtaggaaccggttaataatgacgatcacggtcatgtttatggtggtggcggttctatgtatatcggcagccttcttctttgctgcggcgttggttcaacacgaggatgatttcatcgagaagattcttcaaatttatttgggattttgggttttgcttcctgttttagtaatcctgatccaattagtgcggtttttatggtgggttattaggttcatatgttgtggttgtggacgtcgaccacggtctactccacggttgctgcctttggctctgccacctgtccgttgacgaagaggaggacccatggctcgaaccgacgtgttaaatggaaatactgtcagcaatgtgataagtagaataaagctctcccatgttgatcattttaaaaagatttctattgtatgtgtgatcttattgtttacggagtcgtcactagctctcaatgggcctaatgtaagactttaaaatgtgtccctcatttactgaaaaagatcttatactagaaaccatctaaataaatgtgaattccttataaacataacttagttctatgaaaaaactatagatataatcatataaatcattttatttgaagatagacaaaatacgacatactagatcagtaaatttataaaatcaactaaaatatcatctattgctgatgtataaagaccttactcaccaggattggatcatagttgggtgatctaaaaacatctgatcgaacagagccacgttattaatttatgataaagataaattatataatccattaaaagtgatggaaagtcaatgtaaaca

SEQ ID NO: 8614 - DNA, 1876 bp, Arabidopsis thaliana landsberg
gaatgagatgtctttcccaatgttcttgaaaaataaagaaacttcttcacccgttccaaaatagttctctaagatccctttctcgattaagaaagtcgcatcgtcttctgtgttgatcaagcaacccatgaaaattacaaagctagtaatctcagtggagcagctcatattaaactgctcaaaggcaacgcagttgatcaaaagattgctgataaagtcgtcaaacactagtagtggtatttcaaccaaaccactcttgaaacttatgtctaacggtgtctctacattctccttccgcatgaattttattcccctaagtcgtagttttcttgctgagacaattagcccaagaaaaggacgacgaggaagaggaggaggcgatgatggttgcgctacagatgtctcctttgaacaacttatcttaccgagacagatattttttgatgtctctgttcttgaatattccctaggaacattgaaaatattgatacaacattgccttggattggttggtggaggcggggcgggtataaaagtcttacgaataagatcaagaagatgttttgctcgaagattgttgtgtttctcccagaacccttctggtttttttatagagtagtcgaagaatttgaaggccaacatgtttaagctagtggatggagctaactttgatgtctctaaaagaactttaagaagaaagagaggaacctggttttcgagaagaagaaggtcgcttcgaagtgttggcaatatccatcgtagcttgaaaattgggtctttgagatttgtgtattcaattttttgtgaaaccacaaggaacaacataagaatgaaacaaccatcaagaagcatcaccttgatcagcttttgttgactaaattcaagattctcagagtaggagtctcttatcttctgttccaatcccgagactagatcgactaagtgacttaaatacacaccattttccttagtctttgacacgaacatctccaaataacgtttcttgtgctcctctatcatcttgagatgttgtttatcactcgaatggtggtaaggacctattgaaacgatcttaggtgcataagctttgtcgttgacttgcttgagagtgtgagggattctatagatgcaacaagatctatcacctgctgattccttgagatggactggtgggatcactttatctaagagcaaataagcttcttcttcgctttcgtccgggatcttggcactctctccgttcgcttggctgggaggatccattgctctcttgttattagtctttttttttttttttgtcaaatggttttgttgaacatctaaacacaattatttaatgattaatgtaagggtgatcaattttctcttcttacatattatttttaaatttatattacgtttctccacttaattactagtggaaacctttctcagatccagcagttcacacttcacacatggcatcattaatggataatcttattttcgactttttgtttgtttgagatttattgtgtaaaagtctctactaactgattggagaaaacataaaataagtcgattgggactttgttcaaagactttgagccggctatgtaacaatgcaatctatggtcatcctgatcagctagttaattcatgatctatcgctgacttcctcatcccaattttggtgccaaagtacatctcgatcgtgatctacggccaatgttaatccttgaaaaatgacaaaagacatagtaatatggtattatcatagaatcttataaaaatcatcgcttctcctctcaatgtaagacttttacttgttccatcactatcatcgagaagggagaaatcacgctaatctaataaaaaaaatcacgtgtaatatatc

SEQ ID NO: 8615 - DNA, 1051 bp, Arabidopsis thaliana landsberg
tgcatccatacctcaacatcattcttcatcgtcaatttgaacccaaccagaatcaatctgagctgttcgattacttcccaggacacaggacacatgatcaagattatgcaactggccctaacaattcatcatttgtttacaatttgccatcaatcacaaacccaactgtctcatcccttggcacactagcaaattaatctaaataagctaaagggtaacttagtcggtgtctccatctcaatccttgtttcaaatctcaaatctctaatcctttaaatgtccaaacatatggttccctctgaagacaactttttctggtaaactataataacagaatgatcagtttagtcgtttagacacacaagttggtcccaacactgtaaaaaacagagtattatcaattctctcccactcgttatgtctccacataattatacagttactttacatatctacacataaacattatcaccgcgtgacatttaatgcttcttcaactgtctaaagctcaaaacttgttttgtcattccctccatattcttctgacctttattatatacatccatttacattcttcacgttatcagaccaatctctctcttcttcttcttcacgttctctctctttccggataagggtagagatggctagagtttgtgtaatgatgatggctatggctatagctatggctatgaacatagctatgggtgatccaatagcaccatgttacttcatattcggtgactctttggttgatagtggaaacaacaatcggcttacctctctagcaagagctaattacttcccttacggtatcgacttccagtacggtccaaccggtcgcttctccaacggaaaaaccaccgtcgatgtcatcagtaatcttttaaccaacacccttcttttgtttacattctgttctttggtctaaaacatgtaatcaagaaaaagaactaactttatctgttttagctgagcttcttggtttcgatgactacattacaccgtattccgaagcaaggggagaagatatacttagaggagtaaacta

SEQ ID NO: 8616 - DNA, 682 bp, Arabidopsis thaliana landsberg
tcaaaactatattatataaacacatttttcgtttcttcacattcacaaaacatctctctctttcttctcccattcactcactatcttgctcctagaaaaagatggcgagaatgagtttgatgatcatgatgattatggttgctgtgaccatgattaacattgctaagagtgatcccattgcaccatgttacttcatatttggtgactctttggttgataatggcaacaataatcagcttcagtcattagctagagctaattactttccttacggtattgactttgctgccggtccaaccggtcggtttagcaacggcttaaccactgtcgatgttatcggtaattcttactaactgcattttttctctgtttcctctgtttttattcccacttagactatttttttgctctgtttctttcaaaacattagctcagcttttgggtttcgaggactacattacaccttacgcttctgcaagaggacaagacattctccgaggagttaactatgcttccgctgctgccggaatccgagacgaaaccggcagacaattggtaactactactactatttctctttgacaaaaaaactattactattcggtttatgttttggttttggtctggtttgatatatttgaatttggcttatcttgttctagagcttcttaaaacttgactt

SEQ ID NO: 8617 - DNA, 1782 bp, Arabidopsis thaliana landsberg
  unsure (1)..(1782): unsure at all n locations
aaagagccaaacacatcacacaacaatatggtaacaatgatgagacctactctccttatacttctcttttccacctttctcccacaaatcctcaccgttgatccaccactcccaccatccaacggctccgatttcatccgtttggcctgcaacaccacactctacccggacctttgcttctccactctctcctcttttgccaactccatccaaaatgactcaaaccgcctcgcgcgcgtagccatctccctcactctccacaacactctccagcttctctcttacctccaaaacgcttataaccgcgaccacccaacccccgtccttagagactgcttcgagaatcttaaagatgccgttgacggtatgagaggctccatgaaacagatgaaggagcttgtctccgcgtctggctcgatcgagtcatttaggttccagatgagtaatgtcaagacttggcttagtgcagctcttactgatgagtatacttgtacggacgggttcaaagacgtccacgaagacgactctatcaaagatgacgtctgctctcgagtcgatgacgtcaagaagcttactagcaatgcgctggctttagttaaccgctatgccgacgagtcaataataaattaataatatctcagtcatcgatccttcgagtcttttgttttttttcgaaactatgaacttttatacttaaaaaagtattagtaaactaaaagtactactcgttgttgcatgtaatactgaaaatatatgtgagttttccttggaattattatttacttggatttatttcagtttttgcaagtaaatgaaaacagcagtactgtaaaaagaatcagattcttgtcgttttttcttcgattattttctggtaaattaaatatataagtactttaagaaaacgtgataaagaaataattgaacctatggtacaatttttataaagattcttaatttattaatgaagaagccgatgcataattaataatattgcatgcatgcgctgtaactccaataaccctgaagtttataaaaaaagtacacggttttgaatatatattcgaacactgaagtattgctcacttattatgttttttagaaactaaaaaaaattcaacgaatgtgaaagcattatccattagatttccccatcaagcctgaggtggatacatattagttcttcagtacttctcctgaactgatgattgtggtaaaaaaagtaatgatcgacatgatcgaaatatcgaattttctccaaagactaacaagtaagaactagaagtatctattatgaatagaaaaaaatcatattcaatgtacttggcctatgatttgccatgtatataatataatacatcaaacaaaaaacaatactataaacctgtaacaattacatttcaagatatcatatatttcggttgacgctctatcactatccaattataatttaaagataaatatatataaaaaaaatttaaagatgaaataaacgagggaagtacaataatcaataatacactattttaaagtcttgtaatcatatatgtacattgtagtttttttttacaagtatgaactaatacggacaaaagagccaactcaatcaatctttttgtatttgtaactgtgataccatagagaacactgctaaagagtaaagtctatcaacaatttactatagttacatgaatcaattacgtgaaaagacttattttgattaaataagcatttctgcataagaaaatgcntatattaagccttttgattntttaaacattt

SEQ ID NO: 8618 - DNA, 350 bp, Arabidopsis thaliana landsberg
cccgcatctgatgacatgtgtcttcctgtgtttgtactctatatttttttacttatgcaatactatgcatgatgggcgattatggctttgagcatgatgtctgagcagagacttacaatccttgggggtgggatccagccgatgtggtcttcggcttgagttaaagggttctgatcataactcatctgaatgcatctcaccggagtggagtgacctgctaatatactacagcgccacgagagtgctatcgggatcattcgagaaccctgctggtgtcaaccggattgctagctctacctagtccggacaaactggtctatgtagctatggcatgctcgtttggagtgact

SEQ ID NO: 8619 - DNA, 1042 bp, Arabidopsis thaliana landsberg
  unsure (1)..(1042): unsure at all n locations
gctctacgtcggggcagatgtgcatgggttatactccatatgattgtcttcattcctgaatagaaagtaggaaaagtgcttaacataatcaataagtataactgatccactaaggtgaaacgtcagtatggccaaaattccatacccatcaccagtgtcttgatcagattcttacaatcattcacttctttggaatgttcggcaggaacctgcaaattcaaaactgcctgcaaccagcatggtttagtaattaatatttttttgccagatactttctatccaaagtaaaatataatgaattattaataaagaaaataatgcttcagtagaaataataacaggctttagaaacgaaagtagacctctatataagaggacataagaacattaaagaacgctatggaactactaagtttggacataacagcggaagtgtggaacacgatcccccattgactgataatttgggtacttactaagacaaaacagccaccatagataattacctggacaggaagttcaagcttcgacctcaaagtgatttgatcctttccgtcaccctcctctaaaagctatgaaggagaaagcaagactaagtaacacatcattgaaataaaagagttgccaatcagaatcgataaaagttcaagatttctctttttttgcaacaaaagttcaagatttctcaacaaaaccatgtaatctgttacagctagacataaaatataaaaactggcatatcaagcaaaacctatacaaagacaataaacaacaacgctaaaaagctgaaacaacatggaaacttggaaagccaccagaattannnnnnnnnnnnnnnnnnngaaggtattgaatttcccaacaaaggcatccaagatacgtccctataaacagatgatgagtaaagtaagttaatgattagagcagccaaccgattctaatatgagctctcaggtgtaaagttataccaacaatattcgcgcttcatccattgactgctgatcaatgcctttctcaaatatcggttctccctgaacccaat

SEQ ID NO: 8620 - DNA, 758 bp, Arabidopsis thaliana landsberg
attaatatacttgcatgacaaaccaatagaacattgatacaagagacaatttaacacaaacctagggtcgaggcaaatgtgcatgggtaatactccatattattgttttcattcctgaacacaatcaagaaagtgaataaatattgatcgtcaagtatagaatcatggtcaatgtaaaaagataattctgctaagattcagtacccatgaccagtgtcttgatcagattcttacaatcattcacttctttggaatgttcaacaggaacctgcaaattcaaaactgcctgcaaccagtgtggtctagcaataaataaaacttctagataatccatttgtcgaacaaaagaaaatttatgaagttatcaataagactgcataatgcttcatcaggagacaaaaagcctagtataaaatctaagaatccagcttggaattacaataccacctatattccaacttaaagcaaaagtggaatgtccgtgtaacggtgtaagataatatgagagcttttaataagcaattgagtttgaatataaacatgtgcaagacgatcacacattggctgataattcgtattactgataattcgtattactcactaaaacagagaaagaaaaaaaaaagtaatcactgatgagcgacacaaattacctggacaggaagttcaagcttcgacctcaaagtgacccgatcctttcccacctcaccctcctccaaaagctacgaatcgcaaagcaagaataggtaaaacatcaa

SEQ ID NO: 8621 - DNA, 1172 bp, Arabidopsis thaliana landsberg
ctttaacagtttaactacttccacacgcttctctcttgttgctacttacgattacagtataaccacattagtatggtagataatcataatatgatctctttctcttttccacttttatacgtttccacttttaagttaatttatctttgtttgaatacaacatctacttaattacttgttgatttttaactaattttagagattttgtgatatcttatatatgacattcacgtgtagatgatcattacactcattgtcatcttatttttgataatttcatttctgttgtattatcaaaaatgactaaagccatcactcttgctatctttatggtcgtcctcgttttaggtttgctttatacataacacatattttaatattttccacgttccgtctttattattcatactagtttttcttcaacaacaccttttatttttctatcaaaaggaaactgagactatgttttaattttttttgtattagggatggtgacaaaggaaacgcaaggagaagaaaaacagtgttatgattatcttttaacaccgcaggaaaactgcgaaggtttgatatgcgcacatgaatgtactatgcagcatggtggaaacggcatgtgtgttgatactacaagcacggtctgcatctgcacttatgactgcaccagttgatttgtcttctgttatccacaaactatatcatcaatctttgacttactacgttgaataaatttttagaatacaattgattgcagtgatttatatatatatttttgaatgtgaattctgattaaatagtgagatctctctctctttttcacctcactacaatgacgtcacagcaatataaacatgcatggttcatcaccgtacattaatctaatttatccgttgcttaaaaacaccaaacggctaaaatcacaactgactcgatgaaaaacatcttccaaccgaactatatatacttattgcatttacaaatatcatatccaaaaagacaagatgtgcagcttcatctcaaaacaaatctcaaggtcttctttcttgttctttcctctgtaatggtcaaaagaacaaacaggctttgaagtaaatgatgatgatgagctcatcacattccacaaagattgaacagcaaaatctttctcctcatcacacttgttcactgccactagg

SEQ ID NO: 8622 - DNA, 1138 bp, Arabidopsis thaliana landsberg
gtccgacaaaacttccttgtagacaacatttctacagtttatgtgtagacaaatggctaaggatcaacgcgacttgccctctccaaattccatattctcaaaaatggtgaacatagtggcaatgagcaagtgtgaggaggaggaaatttgtgctctcagtctttgtgaatgtgatgagctcatcattaccttaaaacatgtttataattctttgatcattacagaggaaagaacaaagaaagaggacctggagactgcaatattaatttttccaaacccgttgctttgttattactatttgatgatggtttgatacaaaaaaaacaacaaattttgatgatgatttatggataacagagacaaatcatgttttgcaaataaacatgcagttgcaggtaaactgatcggttttagaacacccgcctactcccttaaaccttgaagcacacatagcatcacacggcgaagctttacagccttcggttggtgttataagattatgatgacacacactttttctccttctgcttgtgtttccttagtcaccatccctaataataataataaaatatataatttcaaatttttaatataaaataaagaagtgatatcaacacactgaactgtgaacaaatgagaaaaaggtgaaaatatatttaatatgttatatgtataaagcaaacctaaacctagaagaggacgactatgaagatagcaataacgatggttttagtcattttagatgatataatagaaatgaaaaactttaaagtaaaacgataatgtacacccaaatatcacatatatatatatataatcaatcacaaaatctaaaactagttttttaaatataaatcaactagtaattaagtaggtaaacggaaagagatcttatgaaacaaataagaaaaatatctaaaaaaataaaataaaatttgaaacaaataagaacttggttaattatacataatagtctatatgatacatgaataaaacaaaaatgaaaagtcaataaataattaaatagattctcgaaaataaagaaaaaaattataagaacaggaaagagatttagaaacttgatatataaatggaaataaacaaaaacttgataaatcatacctagttttgttatatg

SEQ ID NO: 8623 - DNA, 1682 bp, Arabidopsis thaliana landsberg
tatcggctcactgcaagggaacaacttaaaccaatctatgaaagggaactcatggcaatagtgatggcagttcagaaatggcgtcattatcttttggggagacgatttgtggttcatactgatcagaagagtctgaaatttctgctggagcaacgggaagtgtcactggaatatcaaaattggctcagtaaactcctcaactatacctttgacatcatctataagccatgcatcgacaacaaagctgcagatggtttatccagaatgatgcctgcttcttcagctacggtacactcagccatgtttgctttgaaagtccctggcgtgattcaacttcaaaacatctataaggaaattgagttggatgcagcactccaacgcaccatcaacatcattatgtcgagtttgtcctacaaacaaggttttgcagtcaaagacaacagattgtggtacaagaacaggttagtcattccaaacaattcccagttcatacctctaatcctatctgaaggtcatgaggggaagcttggaggacactatggtgtctttatgacaataaaacgaattcaacagtcatttcattggaccgggttggtgaaagacgtgcagcgttttttggttgaatgccaagtgtgtcagactcataagacatctactcggtctccggcggggttgctgcaaccactacctatccctgagaaagtgtgggaggatctcaatatggattttatcgaagggttacccttttctaatggcattaatgtcattctggtggtggtggacagattgagcaagtatgcttacttcattgggttgcgtcacctgtttactgctgctgatgtcgcctctagtttcatacaagaaatagtctgcttgcatggctaccctgcttcatcgtctaagatagagacatgatctttctaagcaatttctggagagagtacttcaagcaggcgggtactaaactgaaacatagcacatcgttccattttgaaactgacggccaaatagaacttactaatcgcagtctggaagtttacctcagatgcttggcttcgtctcatccacggacatggcagaaattcctggcttgggctgaattatggtacaacacctcttttcacacatctttaaagacaactccttttcaggttgtgtatggtcgacctcctccaactttgttgaagtatgaagaacactcaacaacaaatgttgatttggagctgctcaaggacagtgacatgatgctaggacggattaaagatcagctgactctcactcaacagctgatgaaaaacaatgcaaacaaacatcgcggagatgtggagttcaaggtgggtgactttgtttatctgaagctcagaccttacaggcagcattcagtcactcgaagagtttgccaaaaacttgctactaagtactatggactctttgaagtgcttgaacgcattggcaaggcggcttacagacttaagcttcatgagggatccaaaatccatccggtctttcatgtgtccttattgaagttcgtgttgggacaagcagcagaagtgaaccctcttcctgatatttatggtgaaataggagagttcactgtggaaccagaggagatcttggatactcgctacaatgaggaggggtacttggaaggtttgattcaatggaaagggttgtcgtcccaa

SEQ ID NO: 8624 - DNA, 608 bp, Arabidopsis thaliana landsberg
  unsure (1)..(608): unsure at all n locations
aaaagagtcaaaaacagaaaatgtataacttactactcgataagcttcatcggatatgtaacacatcgcaacagacttgtaattacctggaaacacctctaacaagaccaaactggtaaccattaagaactgattccttatagccaaagttataaccttcctgcgcaatagcttctttcccggcaacaatcccatcacgatatccagcctacaatttcaatttaccattaaaaaaagcattttagacacagagatgagagaatgatcaagtaagaaagaataccgagtggaatttcacacgtctctgcttattctcattgcccaacacgcgagcttcactatagtcttcttcatctgaacttccgtaaaagggatcatctaaattctcaagaacatgattattattacctaaaccaagaatatgattcttatcagagagatgtgggaatccaaaaccttagaaatacaagctctaagcctaaacacaagacctcagctaaactatgagaacaaatttgtaagagttttcatcagaaaagtaaaaactttgtcaattgcataatatatgaagggcanagagtcctcaccatgctttgaaagctgtacac

SEQ ID NO: 8625 - DNA, 913 bp, Arabidopsis thaliana landsberg
  unsure (1)..(913): unsure at all n locations
ttacaaacagtttttggaaacgggacgcgggtcttgcttttgcttgtgaataacgtctactgaacaagcctcgtctatgtatcaaatttcacttcaatcgttggagatttgtcaagaagagaacttagctcagtaacatagcttcctaagtcggctgtgacattaacacctgaacaagaacctgaaacagaacaagagtcgggcccttcttctccactcttctcttccccttgtttcgtagtcaaagtttcatagaaccgcttcattgcgacttccgtcgaaagagcatgcacagaactgtgtaatttctgaaacttctctctagtttcttgttcatcgataagcttttctctaaactcaaccgggaggaaagccagcgcacttcaaaaagagtcaaaacagaaaatgtataacttacttctcgataagcttcgtcggatatgtaacacatcgcaacagacttgtaattacctggaaacacctctaacaataccaaacttgtaaccatcaagaactgattccttatagccaaagttataaccttcctgcgcaatagcgtctttcccggcaacaatcccatcacgatatccagcctacgatttcgatttaccattaaaaaaaaaccagacatggagaaaattgaacaaacattttacactgagagaatgataaagcaaaaaagaataccgagtggaatttcacacgtctctgctcattctcattgtccaacacgcgagcttcactataatcttcatctgaacttccgtaaaaggaatcatctaaattctcaagaccatgatctttattacctaaaccaaaagatagttcttatcagagagacatggnaaagcaaaacttagcaatacaatgctctaagcctaaaacatctgagcaaacaaagaccctcactaac

SEQ ID NO: 8626 - DNA, 162 bp, Arabidopsis thaliana landsberg
taataccgactttctgttgaaggctattactctcaacctctgtttccaatcttttgcacaacaaccagaggttgcaaagctggcatcaatctgctccgtacctggggagcacccactacttggattatcagcgcaggcttttacactatctcgtgcaaaaac

SEQ ID NO: 8627 - DNA, 1508 bp, Arabidopsis thaliana landsberg
ctaataaaataagcatgctgaagttagtatggcgtattctgtcggcacacggttccttatgggtagattgggtgataaaatatctcattcgtggtggttctttatggtctgtcaaagacaacacaactcgtggttcatgcatttggcataaaaatgggtggtctacttccttttgatttgatatgtggagccctatgggatgcctatacgagaagcttggggagagaggtaacttctttagttggaatatcaaaaaccagcacagtaggtgaggtgatggacacacatcgaaggaaaaaacatagataaatcttgtagaggaggaggtgaggaaacaaaagcttatcaggagtcaagactcgggtattatgttgtggaagggaaggaacgatcgatacaacaagaagttcgggacaaaggagacttcacaggttcgggttgctaaaccaactatagaggagtacaaagggatatggttccctcactccacccggaagtactcttttatcacttggctagcaacaaagaatagattggcaacaggagatcgaacgcaaaagtggaaaagaaacgcaaatgtgagttgcgttttttgccagttcccgaaggggaacatagaacatttgatttttttatgcccttacacattcaagatatgggaggaactcatgaaatgtcaaatgagtgcttctggacaagttctcggcagcttggaaagaggttcttaagttgaccaccgataaagctcaggactatactaaagcgtttatcctccggtacgtgtttcaaaacacaattcattccatatggcggaaaggaacaacatgagacatgcatgggaacaaccatcacctgcgggaaagcttgtcaagatgattgacacaaatattcgaaaccggttcagcatgtttaagaatggaggcttatcgaagtacgaaggtggcatcgtactttggtttgaaacaagaaatcaaggatagctcattcttttcttgtattttatatgaaaagttttgcattcaaaatcaaatgtaacaaacagtgattttttctttggagtataatttaacgttaattttttttaaaaaagatattgattccaaaagcagtaaagtttgaattttggaaccaaagtgaatagaagcgagtattaatcaaagaagagagtggattaataatctaatttgagattctcttacaataaagatagattacatcaaagagtttaggttttaagagatttaagcttttgccctcttttttttcttcttcttcttcatcagcaacgaaccagagcagacaaagagacagaagaagagggaaatagacaaattaggtgatgatctgttctaccaccacaagttcctatacacaaaatcaatttttgttgatctctctatctcacactcccatatatcctcagagaaaaagagagagagacaagacaaagagctcttcagattttccaaagacgaaaaaaaacgaatcctcattcatgatattagcca

SEQ ID NO: 8628 - DNA, 2386 bp, Arabidopsis thaliana landsberg
accctgattacctcagaaactctcgttgttggacaacatgggctttggttgctttggcggttttcaccggatcctgttcgtagctgtctcttaccgaactgatatctttaaattaattccctcgccatacagttataacaaaactcaaaccatattgtaaatatactcatatccacaatttaactcatatttacgtgtattaatatattgagttttttgttttgctaaagatcttatcgagtatcttctaacgttctcttctttaaattctctcaacgatttaaaaaaaaaaaaaaaaaaatcacagcgatttttacaggaaaaattacgcgagagtgagcgcgtggaattgttaggaaccatcgagtcggaggaggagagaagtatccaatgattaaagagaagtgaatgtctggtcgtggaggaacaaaaattacgccgcacgagtgtggtcactggggaccatgttctgccacgttggcaacttcccacgtgaaccccttcccatttcccacgtgaccaccacttcttctatttcctttgaatctcttgctttacttcttctacactctctcccacaccattcacacgcttcattccagaatttcacattcttaaaatatgcaatgtactgaaacatcaatacatcatcagctcttaaacatatttcaaccaatcgtgaaaacaaatgaattaatttgtacgaatttcacggagaacgaagatgtagtaacgatatattttctttttcatattagttacacttcatgtagttttatcatgaaacattcatacaaaaatatagcatagccatgtaacaaagcagaatcatacatacatacgttttctagacaaaaagacaaataaaaaaaacacttgtctgattttccttaaaacattcaagaatgccaggagaattggggaaaaatagattacagtataagcttagaaacaactgtatataattaatgaacatgggttatgaattgtaacttgcaacaaactttacattaatatgcatggtacggctcatatatcataaacccatgctaacttagttcaaaccccttattcatttatcaataaatacatactttgtagctttgagcaaaaaagcttacaagaaaatttaggaatataataatttgtttgtataactattgttttcagagtactatactatcaatcaagtcaactaaccaattaggctccaaaataaaatcaattttctaaacgtaatttaccaagaaaagtttataagaaaggtcaaagcaagttataagagtcaatgaaaagaccgcattgattgaagatacataagaagtcaatatatagtcattaagaataaatttgaaagtaattaatttgttttgaaaaagcgtcgggcgttatttaactttaaaattaattaacaaacgagacctgtcttgtcttgtctgtaactctcaaagaaactgaagtagtaataatgatggcattatcaacaactttgaaaacaatagaaaggaaacataaaccaaaaattattgtttcaatgacaggaagtagccgtaaactctaccatccactaatgttttccaaatgtccgtttgctatttgatttagccataaaattcaatggaaaaacttgaatattgcttttattagttgaccaaaagaattactcgaaggatagtttttggaaaagggaataataaatgaattgaagactaattagatgcatgttgggttcacggggtaactctagagtcttaaaaccccatgcagtattaggctctgtgttatcaaagacgacatcgttttctgactaccatacccattttgagcccaacgccattctattcagttccacgcgttcttactcacgtttgttctacacgagcgacgctactttaccatatacatctgtcttttcttgttaaaataccatctcatggttttaagaaataaaaagagtattcaaacaaagatctttgttatactactattattgtttagtagatctacaaagcgtgtgcattacttcccaaaataatttaataatgggttttataagctaatcaagttcgaaatatgaattttcgagaataaaaaatgattgattagttaagcatcatttttaaaacgttgtaccataaccaaatacagtacttattactgtcaaagacaaaaaaataactgagattttaggtattaaaatgttaacgtttgttattgacttttaggacgaaaatgaacaaaaattcatttgtcgaacgtattgaaaaaattaaacgcattggagttgaatgaaaattttttttttaaatttttaaagagagaggagcaggtaacagtatatatcatcattgaaattgcaagggtctttctgacacaagtcatcatt

SEQ ID NO: 8629 - DNA, 1424 bp, Arabidopsis thaliana landsberg
  unsure (1)..(1424): unsure at all n locations
tctttcccatggcttctcctgattgaataatattttggttgagaaatcgatttttcgattttcaaaactcgcgatgtcaagcgggaggctttgtggcttcacgccgataaccttctgtcgcaaaatctcaagattgcaggttcttttaaacatcattgttcctttgtgtttatatttacgtgtgtctttacattttatggttttgtcttcttctctaaatgaattaagagcacaaacgctatatgcaaacgagaattatgcttactctatatgtttggtattttttttttactctaatcaccatttatattaagttatcgaaaagagagcggagagtcattcataaaccgatatacttacatgggagaaaatgctattatgagctttagctttcttcgctaaatagtctgctcgggttaagactccaaagaagaaatctaatactaaaagatgaaaaaaacaaactaacgaacggaaggacatatgtttggcatttgtgtttgtattttacacacttattttatcaaaaagttaaactgaaaaaaacattttatttttacagaacttaatgtgtttttgactcacatctacatttatgtttgcattaacatgttaaaatattattctttatgatgttgtgtttaggtcgcaagagggcttgctctaaaaaggcttatcaaaggaaaacacgattttagacgcacaacaacatcaaagaacaatgtcgaaaaaaagaaaaataaagagatcaaacgcacagtttcacagatctcttcttctgttgcacaagcttcttctccaaagagtttcaattctacaaaacatgtttctactcccaccgcgaccgcgtctcctttgtcagtaaagaactcaaagacgaaagcgaatacacctagaaagaacactntggagggttcttcgccgaaatgctcagcacatttcattttgatggttgagttaaggaaaaacatattcgcttttagagatatgattgatttaccttctcttgatggttctctatctgtcaccgaggtcagtagctaaagataaattataacacaaagatctaaaagagctaaagaccctaatgtcttgtttgctttcgagttgttatagattataacacaaacaatgaaggatctacaaaagctatctcctgagattgtaaccattaatcaatcttttgaaatggaaggagctgacatggataaggtacacataagagtttaaacagattttgagttacttgacaaacactccaacaaaaaagaataaaatagaaaaactcttgagtttgtttacttgatgagtcttgttaatctgattgatgaaccccagaaatgccccaaaaacagatgttaattttcttctacgaagatctcagagctattggggattcttggattatggatagtgactggatt

SEQ ID NO: 8630 - DNA, 1617 bp, Arabidopsis thaliana landsberg
cattttgcttttcttttccattttttgttactcgtatattttgttacccattacgtaatcattaccgtggcccactcacagttcttaatatttatgaataaaattgcatgacataagaaactaaatatatatttacgcaaactccagttaattttactttctcatatcagcagatgtgttattattacagtttcagagactcaagatttgtagtgatatagaagtatatgttatttaatgatcatgtcagttaaagaataatgctcgtcgttatcacatttttctattgccgttattgctcttcgttttaattcttaacacaattgcaaaatgcatgaattcatttgagtttaaaattaatatcgtctaaaataaaatcgaggatatgatattgctctttgttccaatttcacagaaggtatgaaccaatctgaggtttaacaggtatcattaattaatctttatatgagataaaatccagtatatagctgattgtgttgttgtctaatgctgacatgtcgattttcttgactttggaaattattttttttagttttgattttggtggattatttttttttagttttgtatgttagatttcttatgagtttttattgggccatatgggcctcggtttaatcttacttagcccacaagctgttgttgtatcatagatattaggttaaacgaacatatgtgtatataagctgtttcagccgtatgaatacaagcaagaaaaccttttaccactttataggtttcttaacatggtatcagagcttagatctgacctctcttgatctaagtttttttgattaaattccgcttatttacttcttttctttgatctattctttgattaagcttcggttaacaaagacttttcttaaaagagaatgagttcaccagcgtcgatctcttcgacgagctcctctctctcgtcttcaatggttaacaccaatcggaagacaatttcaccatatgatctatcgtcaggtgacaatccaggaatcataatctcgagacctttactacgaggtccgaactatgaagcttgggcaacaaacatacgtttagctttgaccgcacgcaagaagtttgggtttgctgatggatctattccaaaaccaagagaagattcagaaaactttgaagattgggtagcaaacaatgctttggtggtttcatggatgaaggtgaccattgaagaaaacatctcagattcgatatcacatctagatgattcccacgaactctggactcacatacaaaaacgttatggtgtcaagaatggacaacgtgttcaacgattgaagacagaattggcaatgtgtcgtcaaagaggaacaaccctcgacgaatattacggtaagctatcaagtctttggaagagtttgtctgattatcaacaagcaaagacaatggaggaggtccggaaagagagagaagaagataagttacgtcagcttttgatgggtcttgatgagtcgatttatgccactgtcaaatcgtctctactttctcgggttccattgccatcggtggaaagaggcgtttaacgttttgcagcaagaagatgagtcaaaattggcaagtcgttttcacagtgagagaact

SEQ ID NO: 8631 - DNA, 1268 bp, Arabidopsis thaliana landsberg
gcattccttctttatgatctcatcatagagaacttcttcatgttcttctgaaatttttagggtttaagcttatcttgagtggcttttcttaaatctacctgaaaccttgaagccttgtgtgattatcgaatgagctttgatcctttcatgttcctaaactgcatattacctttagaatctcatgttaggtcaagtgcatcaggtgtttctgataaggatgttgatttgtttgagaatggttttctacattgcctctttgttttcatcgtctggttctttaagtttctctaattaggattccgttgctttgttaatgtattctgatagcatcattcaaaatgttgattgagtgtggaacgatgtttccattgcttacatcttaatgctttcatcaaattttgtttgcagcgggttctctacatagatattgatgtccaccatggagatggagtggaagaagcgttttacaccactgatagagttatgactgtttctttccacaaatttggggactttttcccaggaactggtcacataagagatgttggcgctgaaaaagggaaatactatgctctaaatgtttcactaaacgatggtatggacgatgaaagtttccgcagcttgtttagacctcttatccagaaggttatggaagtgtatcagccagaggcagttgttcttcagtgtggtgctgactccttaagtggtgatcggttgggttgcttcaacttatcagtcaagggtcacgctgattgccttcggttcttaagatcttacaacgttcctctcatggtgttgggtggtggagggtatactattcgaaatgttgcccgttgctggtgttatgaggtcttttccatctcctttgcagttcttctatgttttttgataatcatataggtttttgttcttgaaagtgtttgtttctgttgcctcatcgcagactgcagttgctgttggagtagagccggacaacaaactcccttacaatgagtattttgagtatttcggcccagattatacgcttcatgtcgacccaagtcctatggagaatttaaacacgcccaaagatatggagaggataaggtaatatctcctactttccatttttatggtcattgtacttcagttgccactgaacttctagctagtccactctaatttagtaattttaacatgctaatgatgctccctcgagattgtaattctgtatgtaacatatgagtttatctttgtgccggttccatatagtttacgaaagctttaca

SEQ ID NO: 8632 - DNA, 1304 bp, Arabidopsis thaliana landsberg
agatgctaaaatataattgggatggtggaaatactatagtgaaacctttcaaacatctcttcatcaaaatcatatgggagagagaaattacgtgttctttggatcacttccggttataattcgccattcttcaccttccatagcagggtaacagatcttaagtggcatgtctgctacaagttctgcccatttggcttcgatgaaatcaagaattgcatgtgactgatcatttgaagccaaactgctcactatagaccaaaggttccccaaagtaaagaatctgaaatccatgtgagcaggctgaaggtttccaatcaaatatcctcctctgttgggcataaagtccactaaccatgaagggatctgatctggatatatgttgaatttattaaccgcatcgtaagagtattcctcggtctggtaacggtatatttcattaatctttttcaggtccaaccagtagtattccctgatgtggaaatttaaagcaacaagacgattgttgagagctcggattagatcagctgacccgtcctctggcgtaagcatctcacgagcgcagaccaaagccgaataaaagagtgcctgacaaagtaaacgataaataaagcggttttacaacagcatagggagcttctagtgcaaactcagattgaaggaactgctcacctgaatctccaggggatgaccatggattcccattcgacggtctatcatgcaggacccatcagtgactaataaagtagggaacatatcaaaaccatcagcgagacacagctttaagatcatcttaattccagtctgcacatcaactctttcctgcacggaaagatcaccagtgcattttccatatgctctcaacaaaataatccaccacaagcctgaaattccaaaacaaatgacaagtgagttagttattttataccagagtccttttcacatagggatctgaagctttctcttaccagaatcaaccggggcaacacgtccaatagctgcttccccaaaatcaggatccaacacttcttcggtcattgaatcatcgccatcgagaggaacagttttcaccttgaaactacaaggcatcaaaccttgacctggactatggcaatccatggttttctcccaactctggtcaggaataagcatcatatcagcttataacaacaccaaacaactgcaacttatcaatctacactggacttgggttaacaaaaaggggtttactactacaacccatttctccttaaccacaaaaaacatttgacaacatccacactattgcttccatctgcccttatcaa

SEQ ID NO: 8633 - DNA, 2246 bp, Arabidopsis thaliana landsberg
gtatattgaggaaacactatactttcatatgaaacgaaaattacaaaattgaagaaggggaccatttcaaaaagccaaaacataaaggtaataaataaggaaaaaaaaagtatgcaagaaaaagcaaaagatgataaaacataaaaataatattatttatatgaaaaaacagtgaagggcatataccaccgacaccactaatgtagctaacaaaaaccaaaaccacgagctcacatttaatgatctaaacaacattaaatttttcatagaacataaacaaagacaccgattcagtagtatttgaccctgacacttgcacaacattatcataagtcaattttctcatttttctatcatatcaaccaccactcttattagttagatcaatcaacaagctatttcaattactatcaaatttaagattatattgaaataaatgattaatgaaatgattaccgaaccgccatcgagcctgaaccaaggcaatgttgggattgtgcatgaggaaaggaatgctacggcgaagaaaatcaggttcgggctgaaaatcggcgtcgaagatgacaacatactcgcaatgcttgacataactacgtttgagtccttcctttaaagcaccggctttgtaaccaactctattctctcttatttgatacctaatattgattcctttacttgcccatctttgacactccacttccaccatttgctgcacattttgagtatctcatttaaatcacacatcaaaaaaaaaatctatctattaatgttacaaatttattaatatttccccttttctttcttacccacaggaaaatattacatctcttttaaataaaggaaaatatcttttgaaaaaaatggtaaaaaatctaatttgattggaggaaaataatgcacctatatttttgtgaaatggactaagtaataataataataccttaacagtaggatctgtagagtcatctaacacttgaatcacgagacgatcggacggccaggaaagtccacacgccgctcctattgatagcttataaacctgcacggcaaaaatcacggggaagcaaaagaaatctctttgtcaaactttttcacttttagtccactaattaatgatttactacgagttaacccctaaactataggtttaatcataaaaacccaaaatcacagagaacaataaataaatatgcgtcacgactctcgccgtttcgggatttggaacggcggaggaatatgaatacgtggggaaaagttatcttccgtaaaatctgagattacttttctcgaaaaacttataactttaacgagaaacagagaaaaacagaggaaaaacagagcaatgaacagagaaccgacctctcgttcgttgaacatggggatttgtacgaggacgacggggaaattggagctaccaagctcttcatcatcgtgaatgggctcgaacttgtaacgtttgtctggttttttccagaagagtctgacgaggacgatgacgattcccatgtaaaccctctcacataaaagcatgacagacataagcaaacagatgtaaacagctaattgaagaagagggacaatcactggtgcttttacaagctcccagatcatgcctagttggcctgtgatctccatcctcacgccgtcgaatgtctccggcaacacaaactttggtgatacaccgtccatttttccttctctcttctcttctcttagagtgtaacaatggttggtgtgtttctctctctacgatgaggttttggtgtaatgggtttatgagatgaggcatagagagagagattgccttgagaaaaatggaggcttttctctctctacagttctaaagagagaggaaacttaggaagagagagagccagaaggagaaatgtggtttaagggagaagaggaagagaaggataaacgaggaatataaatggtgataattttgtttttttactttattttatttatttgtaagattgttttcctttttttgattgattttttatttagattttttagagagtaataaaggttaaaaggaaataaaaggaagaaagaaagaaaaaatacatttggtttgtttgtgtctttatgagattctattttttcagttaatgaaatttctggtaaaaaacaacagaggagattttggtttttcagtttctgtgttttgtcatttcagaatctgtgcctgcccaatgggaagagaagggagagagatatagattaataatgaatttacg

SEQ ID NO: 8634 - DNA, 861 bp, Arabidopsis thaliana landsberg
agcaccagttcttcaagtctgtccatatccatgaaatcgcactggtggaagttctgtccaaaggctagtctgaagattgtaccggcggtgatggagatagaggtttttctcaaatctattagggtctgtgtttgagcggaatttgatattttcttgaccagcaagtcaccttcttcctctctgatatacctgaaagacttatgctttttcggactaaagagctcaagccccaccagctttttcatctctcgccagtcttcaccgtactgagtgaaaccaatgtctttgaagttgcgagaaaacaacccattcgcgactagcttaggtcgggtgcgagtatctaagtcatgagttttgagaacttctttagctgcttccttggaagagaacacgaccacagggacaactccaaaacggagaagcatcactggtccatattataaagagagcttgtgaaaaacactgtgaagcgatcttccaagctggtgcaagtttcctatgatcggaagacctgtaggtcccggaggaagcttacttttcgaaggtaaaagctttttaaaaatgatctgaaagagagggaaaaggaagaggatacataggaggaagatagacattattcttgtcttttattttgccttagcttggttttgtttttttctttgtatttggagtgaagagcgttttgttctcgagagaccggagacgatatataggcgcgcaatgcatgtggttaggcttttgtagtaaatggtttgcttttgcagaggattgatttagttaaggtgtttaatggagagaagccccaaaaaacataagattagatttagtggtctctctaaccaagctgacaacataatgtgg

SEQ ID NO: 8635 - DNA, 520 bp, Arabidopsis thaliana landsberg
tacatattgctaggctagtggaaattgaattaaccatagttagaaaactcctgtaaaactcttggcttttgtggctcttttgatcaaattctgatacaccgcagatttaagatcctttgtgttataataggacttagcttaggtagtatagttcgatcaattttgcatctgatgacggtttatcctgataatacttgcttgttctcatctttgcactaaagtatttatcacttgttcatcacgacggagtgccattgcatgcttttgttaactgccgataatgatttcgctggataagatcatgtatatctcatatcagagcttgaagggtctgtatacattttatggataccagtaatggctcgtagcaacttagtggtattgggaatctgggaacctataagttgttttcaatggcttactgaggctgtacatcgtctgaatattgcataccattacattggatgaaatcatttaaactacagcttacatgtgagatagctggaatttccatatttat

SEQ ID NO: 8636 - DNA, 1178 bp, Arabidopsis thaliana landsberg
gagatgatcgtaagtgatctttaaagaaccgaattttctgggtctattgatcacatccaacatggcagtgacgaggtctgagtgatcatcaagttgtttagtcttcaaaagctcatcgatcacatcttcaaagaaagtggtgagtttggaaaaggctatgttcatcctcgaatgctgaccggagatccggtctacaagccacccgagacctctggggaagaagtcagtgaatgccaagctgcatacgttggtttctgtctcttgcaccagctcttcaagtttgtccatattgatgtaatcgcactcgcggaagttctgtccaaaggcttctctaaatatgatactggcggtgtaggagaacaaggattttctcaaatccaccaaggtttgtgtttgagcataatttgatattttcttgaccaacaagtcaccttcttcctctctgatatacctgaaagacttatgtttttttggactaaagagctcaagccccacgaactttttcatctctcgccattcctcaccatactgagtgaaaccaatgtctttatagccgtgagtaaacaacccgttggcgaccagcttaggacggttacaagtctctaagtcatgagtcttgagaacttctttagctgcttcgttggaagagaacacggccatagggacgaccccccaacggacaagcatcactggtccatgttctaaagagagcttgtgaagagaactgtgaagcaatcttccaagctggtgcaagtttcctattagcggaagacccgttggtcccggaggaagcttctttctcggaggtaaaaggtttttaaataggatgaaaaagagagggaagaggaagagcaaacctaggaacatagacataattattgttttttttttgttgctaactctttctttttctttgtatgaggagagtgaagagcgttttgttctcgagagaggatatatataggcattatgcttgtggttaggttcttgtaataaatcaaagtttttgtgtaatatatcacagaatttgaattaattaaggcaactctgtcgaggcacattattatgtgcggttaattgatggctatcgataataccacttaaataagacacggtgagtatactggtctttctgtgtaatccaaaccgacaacaattcggtgccaatctacatatct

SEQ ID NO: 8637 - DNA, 2430 bp, Arabidopsis thaliana landsberg
aatactcttagggctgagattacttgccctctttgccactttatctgcagctattgtaatgggactcaacaagagagacgaagacttttgttgtgggcaaagttggaaatactccaattcaagctacttttactgctaagttcgaccacacaccagcttttgtgtaagccttaacaacactttaattaacaatctgtattctaaatgttgattttgagactaatctttttgatgattttggtgtataaaaggtttttcgtagtagctaatgcaatggtgagcttccacaacttgttgatgattgctcttcagatatttggagggaaaatggaattcactggttttcgtcttctctctgtcgccattcttgacatggtaaacatagaaataattaaatatatacaaatatacatcttaaagtctttagttgttaacgactataggaccaactagttggaaagtgatgattatatgttaatatattttattctcatttttagtttctattaatttacaatttttaaaaggatttagtgacactatatttcattaaattttatcattattactattttgttttcacgacattttaaactatttcgtgaatgagtttagaaaaatttatgtagtttcggatttttttggttgattgttttaatcgattaattgccaaactaaagtttaatgtttagatttcgatcgattcggtttaagttttttgtatggtttatattagttgtagttgacactatttgttaatcagtagactcatttgtgctgcctttggcttcttttcgtcggaaaaacagctgaatgtgactctaatttcggcggcagcaaacgcggcggcgttcatggcggaggtaggaaagaacgggaacaaacacgcgagatgggacaaaatctgtgacagattcgccacttactgtgatcacggcgccggagcattaatcgccgcattcgccggcgtaatccttatgctcatcatctccgccgcgtcaatctctcgtctcgtccaacctaataaatgctgctccaccaccgcatctccctcggtcgtcccctgaaaacatacacacgtgtcacgttcccctgttattttccttttcttttcttacttctttgtttcttcttgagtgtgtggtgtgtatctcgagtgaatgtgattgatcagattgtgtaagcatttggctcgtctcttctttgtaaaactttcttcttatggtttattcttaaaccaattctccgactagggttaggttactaaaatatccattacctatactcgttatcaatacccatactcgttatatcaaccataaatcatctctcatagtcatgctcaaatcatgaacctttttaattcgaatactggtttaggtaagaagtagaatcccaacgtaaaaaacacatctcttctacaaactcaaaaatcactactatataagattaccaagaaaccccataaaacacaatcacaaacaagagctcaaaaacaccaaagcaaacaatgtcgaaaatctcaaaagcttcttctctctgtttactccttctcgtcttcttcctcttcagttcccgacccgcactctcactccgtggcccaaaacttcaatcatcggaaccaaaatcagctcaaaccctaatggatgattcgtcttcaatgaacaagatcaactctggaaatgcaaaaaccatgattgctggtttcttcagtcacaagtttccattaaagggctggcctttccctaagtacccacctttccctatggttaaccctaatattgcaacaaacccatctggagctcaagaggaatccgcaaagttaccttcttctccaagcaaagacaacaaagatggacgaaacgcttgaagattagagtttacttatttatatggtttttacattgcatcaaataaaaaatgtacctttaacaattaaatggtaaaagaaaaagatatttatatatcatcagctcgaagcgattttcgttatgacagttacaggaatattaacaatgtgtcctgtatttccaaacaatccgattctgccaaaactagaactggaactgttctttgtcaccgtgagggttacgctaagtacttgagtttctcccatagctatagaaaattgagtaggtgatactttcattgaaacaccataaggaggactccaaccaacattgtgcgtctcatttccggctatgtttctcatcgatcttcggaaaatttgcatgccactaagtgttgatactgcaattgatggcaaattgaggtcaaaaccactgactgttgtgttgttagcgggacagaggaatccggtgtagttgaataccacctgagccgagccgctgatcccacagagaaatgatatataatcttcaaaacctatatagggaaaagacattctgagttgaaaaaacaaacttgagt

SEQ ID NO: 8638 - DNA, 2232 bp, Arabidopsis thaliana landsberg
aaaaatattagtgagagaagcaaaaaataaaagcgattttggtaatgtattttggatgacgaggtattagcttcctaaccagtagaaatctccttgccggtcatgaaattggattttgaagtccccagccaattctgttagacctggctctccaggtaaggcaaagaccataacccctttctttggggcactgaaccaaaagtcttcaggctgaaaaatcatgaaaattcacaaaggcttcaacaaaatacttgataacaataaagtaataacaatggcgtaccgagagatccttggtccgaggatgctttttcgtggtaaagagaacacctgcatagaatttacaaccagatgttagctctgcaaaatactggctttatatgttgtcatgaagcaatggatcgaccaactcaccattgtgatctgaaatagtgatggatggcctaatccaatagggacacctatggagccggaatcccctaagcatacacctaacaaaaaaaagtgtttgatgtcaataaacaattgtatgctatattaaggtgtatgaataagatacttacctacggcctggttggttttcaccgttgaagtaggtcaaaattctttcaaagtatttcacatatctctacacaataatgagcaaacagactcaatagttagcagaagagcaaagaatgtttacatgagcggcttaaaatcacaaaactagacatacaatttggctgggtagcacaagtccttttccatccacacatcgtttctggttgtagaagtccatacactcttcggcagtgggaaagaactataaaagaaaatgaaacatgattggttcccagtgacagattgtttcatacaacgttaaaaggaatttcttaccttcagatacaacagaagactgcatatcataagccctgtccttgccatgccagccttacagtgaacaaccacaacgttctcaatgtcctcctttaaccatgaatatgcactttggcagaatgaggtgaccaaatggattggcgggcaattatgatcatcaaatgggaaactggccacctggatgcaagatgatcagcacaaaataagatttatagggacattaaaacggacagaagactgagggtaaatagtaaacaactgtgcccccattatttgaacataatagttatcaacctagaaaaagaaatgatgccgtacagaagaagtggctacattatctgcaacagagaattaagccacttcatggcagccggtttttatatgatcatgtccaacgattcaggtaagaaaatgagcaaattatcacaagattcaactttgtacatatgcaacaatgtaaacaatctttttggtggatactgtttaataagtactccagagctaaagaaacttgaattttgactaagccattttttctgaattttctctaagccagtggaagatctacggagcaaattttctgaattttgactaagccattttttcttaaggaagccatgtgttcgccagatgcaaggaaaagaggaaaaaagaagaataagggataacataccttcccttcaaataatgatacatcatacaatctctctgaacaaagattgtaaaccttgtattttccctacaaaaaagaacaaagcaattataaaaacagtacaagagaagagcagaacctaaaaatataaggctgtaacaaactgcaaactacatcatatataagttaatctcaaaaagaaagatggtaagacgagattgaacacgtttgaaaataattagacacattagctattattgagatatgaatatcaaaatgccaatgaaaaatttcttatatcattgaaatccaactaatatgacaaaattctagaaacacaatataagtatccacagactaatatctttaatttgagtagaatcttctattcggcaatatgtcattatgcagagcagcttatgaatacagatatatcatcaagaacttataacataaggtgacccagtctttatgttaaaaatatattccaagtgatacaaaagggagaaatagctagatcaacaacaataaagcataagtgcgtcacatggccaaagataagggattaatttgtttcactaacaaataagtagtagtaccttgtgttgagtttcaagaaagttaataacttcttccatttggttacggtagaaaccaaacaacgatgttttgaacgaatattaatcatattaacttgaaac

SEQ ID NO: 8639 - DNA, 2267 bp, Arabidopsis thaliana landsberg
aacgatggcgttgttggcatccttccccgaatgctagagcttttcctttctgaaaattataattcagagggggttgggtacaactatattatcttaagatggatcgagtgattaaggagtgatcgatgaagagtgttaccagttgttcttagacaaatcgtctgtgttccatgcttgttttccccatacatgacaagctgagttcactagccaagttatatgatatacccatactattcttacaccctgcaaaacccaagaaaaaaaggattagagacgaaaatcaaatcagaaaccgtgactctatggaaatgttagagtagttataatcaagtttcttctgccttttttcttcttttcgttccgtttacaaatttgataaaaaaaaattcaatgtagtttcacttttagcatgcaaatgttgtttatatctaactaaatacaagcaactagaattaagtccattcacgagaagagcatgagccacaaatctttcttacaagaaagataagatatttacttgtggttctgttttgttcaacaaacacaacttgtgtgcctaaggtcaataatctaagttgcactaaattacaagaaaacgcaagagggaaatcaagtgaggagatttggcccagcaaattgatagctacacaaaaaaaactggtagaattatcttgttttggccgagctaaaacacatcataatcctatcagctagttatgaaaaattaacagtgaatagattcaaaatgcaagactagccacagaacataccattccccaaacgatgaatggaaagccacccattgcgtataaagcaaccgctagagccagcggatgcaaaatgtaggtggttcgaaggaatcgatagaatggctgcttctccaagtccccaacattattaggctctccacactttaaacatcatatacaaaacagagttttagaatacagttttcagaaaaatattaatatgaaaaaagagaagaagcaaatcgttaccctttgggtgattgtattggtatcaaacatccaattcatgtgactgaaccaaaacccatcaagtgggctatgagggtctctgtctgaatcacaaaactgatgatggtacctatgtgtactcacccaatcaattgggtttccctgaagaaaacaacacacaaacatcaatcacacaatttgtgacaaaattacacattcaacaaaaactacattatcatcaaatcaaatcacctgaagagcttgagctccacaataagcaaacaagtactcaagccatttaggtagcttgaaggctttatgagaaagattcctatggaaagacagagtaatccccagaagacctgtaacgatataaagcccaaaagcaaccgaaacagctctccaattgaattgaaacggagccaaaagactaagcaaatgcatagacaaaacgacagcaacagctccaaagtccatagctttccattctctctcccaccaaactactttttccttcttcttcaccaacacatcagataacattatccttctgtaatctccctccgtcgctgcagcagctgtggtgacatctctcttcaaacccttttcagagaatgcaacaacgagactaggaggcttgaaaggagcaagcttttggtgatgggtgaatgaaattctggtgaaattcaatgacggtgttgctgtgttcaaagttcttggagataacgatggtgaacagaggaaaacgggtttgggttttgttagaagagaagccattatcgatgtgatggctaagagaaagaaggaagagaagaggcttaaacccttaacttatatactagtagtataaatatgttaatatgagtgcgtgtataaatcagggtcggtcttttttgtatgcttcacaattagtagtactagttgtgatgacagagacgtgcaagatctcatcttttttgtggttcacgggactacattgcggctagatttggaaagagaggataagatggttttagggatttggattgccaatttggggcagttatctaaaacccggatcttctcttcaatttttcgagttgttttgctgaaaagcccgtgtttttcttggaaagttaacaaatcaccccaatatttgctttcaaacaattgggctcattgatctcttgaatgggcttattttggttttgagcccattctttcttattcattaaaggaaaaatcccaagagtgaaagggacatgttccatagaccttacatttcaaatttgatatttgtctctatga

SEQ ID NO: 8640 - DNA, 615 bp, Arabidopsis thaliana landsberg
ttatagtctcaccgaaccgttttttgtttcattaatttcattttttatttcacagatcctattcagtcaactcccatctctagtttagatttttatcttatctttccatctaaatccattgtaaaagaagggtttcttaagcagagagaatctataggctctttgtagcgaatctgtgggggcggcgacattcgccgctattggtttcttcggcagcgaagaatcgatggtgatttggtatttctctctctctctctctaacgttccacttttgagcattggtatgtccgataaatagcagaatagctgaatcatgaaataatggtatctatatgtaaaccatggatcatcattttaaaacattcggttttcgctttgttgtttgtgatgcagataacttgtcttgagtgtttttcccaaaagagaaatcaaatgagcaaccgaggagataggataagcagcctacctgatgagttgctgtgtcagatactctcaaatcttcctacaaagaatgctgttactactagcattttgtcaaccagatggagaagtatgtggctttcaacccctgtcttggatatagatattgatgctttcgatgatgccactacattc

SEQ ID NO: 8641 - DNA, 632 bp, Arabidopsis thaliana landsberg
tacttcatgaaaatgaccaaaaaacaaaaggttcatctaaaaaaattcaaaaaggaacttacctgcgggaacactgcagcaattttcattagaaccaatttgcaatggggtgcttcagttcgctgcaatgaaatcaagagctgtggtatccaagaaagccatacccagtgaggtacttggtccaagtgtttatcaaatattctaccaacaggctcatttgttggatcgaaactaagtagataaagaacacgagccatgtgacttctggaattggaaactccaaatcttataccctgaagaaagcaactgacggcatattctaaccagatttcatcttgtgtatcttggtatgcctgtaaaacgaaagtaaaatataaggtctaatatgaggagagtgactgttaatagcgtaggaaaagaagcaggatctaatcagaagaaataccatgtcacagtaatttccccagcttatccatcctttgggtaaatttttgaatagggtgattgcgttggaatatgcaagattagcaccttcagtgtcgtttagcttcaaatgaaaatccccctttagtcgaaatatctctgccttgttcttcgctagaaagaactccaaatttgtgctattaacaaga

SEQ ID NO: 8642 - DNA, 322 bp, Arabidopsis thaliana landsberg
ctgatattgctcctgcagcttctttagcagcctgcaaagatgtctgtatccgttactctgtaacgtcccacatgcgtggcctcgcgtcctgcaactcacacagcattagactcgtagctaaccaaaccatttacttgacgctagcaaggtttatagtctagaatctaacatcgtgacaaagcttataatattctgacctctctcagccagaagctggtcgatttgctcctgagttccaggaactaaaacaaaccttattcttagatgaagaacaaacgctatgccccgcacatataaaaaatcttttcctttttttcttaaa

SEQ ID NO: 8643 - DNA, 459 bp, Arabidopsis thaliana landsberg
ctattcccgctgatgaaatatgactacgcatacgattatatgacatcgtcactcatttttaactcattttcagaagctgaacatgtgtaatgctattcttttcagtattgacactaacgtgtatcacctttgtttgtgaatttgcaggaccaggaagaagataactctgccattgtgtttgcagccatgggtgtaaacatggagactgctcagttttttaaacgtgattttgaagagaatggttcgatggagagagtgacactttttcttaacttggcaagtatttcaattaagatgtagatgccttgaaaagatatagcagctctaatgtttccttgactttaggcaaacgaccccactattgaacggatcatcactcctcgtattgctctcacaacggctgactatttggcatatgaatggggcaagcatgtccttgttattcttacagacatgagc

SEQ ID NO: 8644 - DNA, 1562 bp, Arabidopsis thaliana landsberg
tctcgcctccgccggcgaacagttttattatctctctctttctgcgtgttccaatttcttccacaaaaccctaattttctcttaaaccctgaaattcgtgtaacctttcaacaatctcttcaattttgttttcgattctgaatccattgtttacgaatctctcatctaaagctacattcttcgttaaatcgtttttaatcgactcgctcactcgtgagttgactcgtcagctgtttccataattgcttattgaatttttatacgatgatgtttcaatatggaagaaactagaggaatttctgatccagagaatgggagttcgagttacggcggtaaaccgccgaatccactctccttctcttcttcctccgccgctgctgccgtttacaggcaaaccttcgacggcgagcgatcgttggcgccgtgtaataagaggtcactggttcgacactcatctctcgtaagattcgtttctcttcaacttgatttgtggatcagttaggtttattttgtgtattgaatgatcaatttaagttgaggttttgtaattattgctctgcttttggatttgatcattattggtttcctaatgtgtataattaaggtagaaagtttctgtttttaatgtgtcattatgagatgtttgaggttttctgattgattttcattttggtaggtgaagacaatggtgtcagatatatctgttgagaatgagtttactatagagaagaacaagtctgagtttgttcctgctacgcgttctggagcttggtctgatattggctccaggtcaagcatggaagatgcttatctatgcgttgataatttcatgaatagctttggccttctgaattctgaggctggtccaagtgccttctatggggtatgttctttcttcagttttcctgattttttgtagatttgtagcataagcaaacaactgtgaatgtagtgaaaatatggggatctcttattgaattttgtttgttattaggtatttgatggacatggtgggaagcatgccgctgagtttgcatgtcaccatataccgaggtacattgttgaagatcaagagtttcctagtgaaatcaataaggtgttatcttcagcatttcttcaaacagacactgccttcttagaggcgtgttcattggatgggagccttgcttcaggaactactgctttggcagctattctttttggaaggtttgttgattcaactcttattatcttttagttttgtctaacctaaactcttacatcttggttatgttaaagaaaaacgtgtttgggaatagatgcttatcctcaactgcgtagtgtgcataatcttgacctttaacacaatcatgtacaactaattcgcttgtagatgtattctctgcccatatgtgctgctgctataatgtagttattgtctcataatggctttgagtcacgtatatacttgctcatttcatactctattagtattctggtatgaaaccgtttggtaccgggttaacatatagttttgtggtaacagggtcttggtggtagcaaacgctggagattgcagagca

SEQ ID NO: 8645 - DNA, 1241 bp, Arabidopsis thaliana landsberg
  unsure (1)..(1241): unsure at all n locations
gatcattggggatcatacggtagacgaaatcctgatgccactgatgctacgtcagctggctcgcctaaggaaatgaggagaggttttgagaagatgaagagtaaagtcattggaagtccggttatgacaagaacaatcgtggatctttgtaagtagactccaagcatgtcgtatctatgagctccatgcgcttgcccacataatgtctccactgcacttcccattccaagctatgtcaccggccattaaaaaaacaaagattagattctgaagaccaaagagaagactttattttttttggtatgaaatagaagactttattcattttaaagattagactagattctgaagaacataaacatcaacttgtatttgatcatttcatcggatccgtttagtagtatttgtgttttatggatatttttgatgtgatttgaagttttgtatagctgaaattagtttttttaagagaaatgaaaatgtaaagtaccatgagaccaagagtgaacatattgaaaccgctgtttcctagagaagcggcagcgagttgcatacttcccaaacgaccagcgaagatacgagtgagcatagacatgccattgttgatgacgtagacaaagatcgccggagccgccaagtggaaaaggtacttcatctcgatcaacgacgcaaggtagatccgccgaaaatatgacaagtgtgtgtccgttaatacactctccatcctgaagtcagcttctgattttgttgactccagtaacggttgctgaaggttgttcacggcggtggtcgcttccgaacccatttatttttttaaatatccaaaaagaaaacaaatatttatgaaaaaataaaaacaaaacttcgtctctctctctctatctctatcttcgtttaagtctgtatctttctgcgacttggctnnnnnnnnnnnnnnnnnnnnnnnnnnnnnnnnnnnnnnctgctattttttaaattattgaagaaaaaacaaagctgaaaaagaggaaaataagccttgtttctttttttaatcataacatccgtttcgtgaaaattatataaaatgtttacacaaaataaggcgttngcatgtttggcatgtggtgaaccgatcctaatcgtatcttactctttaggctaaaaagtaactaaaattgaatagnttggatcaatatatatatagagtcatatgagtcctaccgatatgactagctagtacgtacatggaaacaagttag

SEQ ID NO: 8646 - DNA, 1316 bp, Arabidopsis thaliana landsberg
tattattcatcaacttggtcttccttcagaaaatgaaatccatttcaacttttgttttttacttcaaaaaatataataatattttttctatctctttaagtattccacatacaacaatacactgataatctttacgttaaatttattatgcactaaattagaatgctactagatatcaactttgactacatagtaaattttggtagacaaatatgatatatagttaaaataaactaaaaatggaagttgttgtatacaatgtacgtgtataattcatttgtaatgtcttattttggaactatcatataataaataactgagtcagttagaaaaaccatacagaacaagtagcaataggcccaggatgagtcaaatacgatgtaacgtacagaacaagtcacttttataccaaacaatgacgtgaactgagataaaagatggtcgtagcgagcaattggcaggtgcgccgtgcgcgcttcttcccctcgatcatatttgactcatcccgggcctattgctatctagagcttcgatactttgatcacaagaaacgtataaacatatctcatcctttgctttgtttattccactaagattacatccatttctactacgttttcattctgcagaaaaatttaaagagagttatgttggactcttatcctttttttaaccgtagatcgagtctatgctactaatcttgattccaataaatcacattcatcaatgacattaattcattacaaaactttaaaattttccttgtaaaataacaaaaatccactcaagaaaacaaaaataaaatgactcttgcagtctaacgagcatcaggggtagctccaatatcaaagttcatgctgacttctattgaactctctgagttcatgttttgactcgttcctcctcttgcgttttcatatgacaaacattcgtttaattcgataacaacttgagacattgttggtcttctagctgaagaaggatttagacatgacattgctagttcaactgctctccagacagaaccagagtcataatcaccataaagttttggatccataatgttttgaatgtctccttttgtaagcattaaccccacccattctgctatatgcggcttttcacgactttgattgatcacaggttggtttgtgatgatctctaatagtacaattccaaagctataaacatcacttttctcgttcaaccaatttgttcgataatatctgcaaaatcaatatttatctaattaaaaataaaaaatatatgatatcctatcaagtgatgatactcatgatagatgaaaactggcaatt

SEQ ID NO: 8647 - DNA, 869 bp, Arabidopsis thaliana landsberg
tcgtgaaaaaccacatatagctgaatgggttggggtaatgcttacaaaaggagacatcaaaaggattatagatccaaaatttagtggagattatgatgctggttctgtctggagagcagttgaactagcaatgtcgtgtgtaaatccttcttcaactggaggaccaaccatgtctcaagttgtaatcgaattaaatgaatgtttggcatcagaaaactcaaggagaggaatgagtcaaaacatggagtcaaagggatctatccaatatacagaagtcagcacgaactttggtactgaatatacccctgaagctcgctaggctgcatgagccatctatcttttgttttatttgtgtgtgtttttttttaataaataaattgaatgtttgtaatgagtttttgtaattaataaatgtgatttttatcgtttaagattagttagcaagactcgagatgtagtaaaaggaatgactcaatcaaaatttccctaaacccttaaacctagaacctagatcatagacggctagaccccaagttttgttggaagattgaaaaaatgagtaaggatataaaacttcaaaaaataaaatagacgcacaattaggttcagtttttcaagcctatatcgccaagaccacgttcaaaaaagaatttactaagcaaatacacaccatttaaaaactagtaaatcatgtagaaagataaaagttacatggattcttaaaagggaacaaaccatgaggtaaactcctttgagcataggctttaaccatgcagaactctcatgaaaccaaaaaattctagcatcaccctagtccgtataacacccgaatgacatctcccggctaaaacaaagtcacatttgggagt

SEQ ID NO: 8648 - DNA, 1764 bp, Arabidopsis thaliana landsberg
acaaagaaaaagaaaaactaaaacgcgcaacaacaacaacaacaacaacaacaacaacaacaacaacaacaacaacaacaacaacaacaaccgaccaaacaaagggtccgaaaatcaatcgacacgttttgttagtttaccgttcccacgactcgtcgggcagatctctcagcacttgtcggtcctaacttaatgtccttttaacagtaaaattaaaacacaaaccgttttctttgttgaagttaaacgaaccaatttattaaaccgttgacttattccattttatccttttttcgggtaaagaatcaacgagacctgatcaaaccacaacttgaactctttgttgataaggataaaagttaaagtactcaagttttctttcttacaacatcccaagaacttctccaagtgtcgttactgacatcatcaaggtatcaaaacctttcttcctaactatccatttgtctaattaaaaaggttaaaagctaatttaattaaagagttagtactgttttgaatttccccaagtgggaagtctttatttatggcttcacgatttcaaaatccagaaagacaagtagaaaagaaacgtccacgtcggataataaaattaaaattccaactttatttctcgttcacatttgacacttcatcacacgtataaatatcgtcgtgtgtccttagaaatttacacacgaaaagttagttaagcagcaacaaaaaaaaaacatggagaaacagaacattatctcaaacacttcttcttcttcgtcttcttggattcgtggttcttgtgttggaagaggttgttttggtacagtaagcaaagctttgagtaaaatcgacggtggacttttcgccgtgaagtcgatagatctcgccacgtgtcttccttctcaagcagagtcgttagagaacgaaatcgttattctacggtcgatgaagtctcatccaaacatagtgaggtttctcggtgatgatgtgtctaaagaaggaacggcgtcgtttcgaaatcttcatttagagtattcaccggaaggtgacgttgctaacggtggaatcgttaacgaaacgcttctcaggcgttacgtgtggtgtcttgtctctgctttgagtcacgtccattctaacggaattgttcactgcgacgttaaatctaagaacgttcttgtttttaacggtggtagctccgttaagctagcggattttggatcggcggttgagtttgagaaatctacgattcaggtttcgccacgtggaagtccgctttggatggctccggaggtggttagaagagagtaccaaggaccggagagtgacgtgtggtctttagggtgtaccgtcatcgacacgctccccggaaaaccagcttgggaagatcacggtttcgactcgctgagtcggatcgggttctctaacgatttgccttttattccggtggggttatcggaactcgggagagatttcttagagaaatgcttgaaacgtgatcggagtcagcgttggagctgtgatcagctcttgcagcatccgtttctgtgtcaagatcatcatgactcgttcttcactgagtcgtctccgcgttgtgttctttgactagggtcaactcggagtttgacgaagaagaagagagcgacgaatggagaccagaatccatggtttcggcgatggcaaggataagtaaattagctataaccggaggagcaaattgggaatctaatggttggactgaggttagagacacttccgaagagtcagaggcaa

SEQ ID NO: 8649 - DNA, 1853 bp, Arabidopsis thaliana landsberg
tgttccagcaaaatccaatgcagcaggtgagaaaagaagtatacgaacattatcacactgagtcttgagtttaactcgattgtattcattcctcaagttttgtattgtcttaacggaactctccaacttcaggatcttattatgaatctagtgaataccttacaacaagctgctgaaacaacagatggtaagatagacacttctatccactatgtctgatatagcgataaaatattggcgacagttgatcaattttctgatccttgttataggttctcaaaatggaaaggtgccgcctttgcctcgaggatctgacagcaatggaaccgtaagtagatttatttaacctactattcattctcaaaataatgtcactcacatttttggtctctgtcttgggattacaggttgtagaacttacagcagatgagcgagagaggttactacttaccaagataaccgagcttcgagctaggttgttcctcttcttcaatcaatcaaacctttcttataggagatcaatgtggtatagtctatctaattgcttctgaaattcaatttctttaggatgaaagagttgacggaagaacttgaagtagaaaaatcaaaacagacccaagtaagtgaattcacttgatctcatgaacaactcatgaaacaaatttgctagttgttgaaactgaacccacattgagtaaaaactgatttctgaaccataatcatccatctcttgtgtttatctacagctgcagcagaaattgaaatcagtcaccggtcgcgagcaattgtaatcagagaccgggaacactgagcttactacagagaagctttttaggaggagagaaaagtatgttttgtacactaagaaaaccagagagctctctgatcatgaaagcaaaaaggacaggtttggttctgttctgtataagtgcagaagcagagtcaccatcggccatttgtttctgacagaagaagccggaaacaaaaacagatagagagagataaatagagaagaaagctctttggccatggaaaattgtatttgtttatttaatctaaacactacaaaactttacattttttattattgttagcaacaaatatagactcttccttttttgtgtggattgtaaatgaaacattatttgatgtatttgtttgcctctttgttataaaggttagatttcttcagaaacttattacatggaaacaatcttattttcacttatgatcctttagctaaatccagagttgtcaagccttcaagaatcaactcactactagttccaggtaccttcttcttagaccgcttccaccgcaagaaaaacacaaccatgtaagcgaaaacaacgattataaccgagcctgcattagtagagacgtaccacactgtatctggagatataaccgacatcgaaaccaagtaagaaacatacaatggcactgctatccaaagaaaccaccatacatagccttcaccagctggtaacaaacaaaacgccatgaaaatcgctccaacgaaagccatagtattcacacctcgaagaacaaagaaatatttatgactcatcacaacagtaccaacactctttttactttcttctgctgcattttcttgatatacacctcctggtggctgcaaagctgtttgataagtagctgtgattatcagcgcggctatcactagaagcgcgctgcgtgttccttcagaagtctggttcctataccgggctgtttgcgtgaacaaatgctcggtgaaactaatcggagatctcaagatttccgacactttcttggattttggatagagaaattccactcttacctccccattttcggattatgttttggat

SEQ ID NO: 8650 - DNA, 762 bp, Arabidopsis thaliana landsberg
  unsure (1)..(762): unsure at all n locations
gttgggactctcttttcaatgcatgcctggcattagttagtccattagcaggcaatcttgacaaaaggagttacctgaatgattccagcatgatcaaaaaagagagttatcggtttctccagaggaccaagtccctggccagtgagaaccatctgacatccaagtggcctttggaactataacagtttcttgtggattgtttcccatcatcatttccatctgtttcttcttggcccttagctcttcgtgcacgttataagcatcagaccttctccttatcgcttcaggcaatgagttgattctgaccttaaactcatcatattctctcttcactctcctcctttccctcacaaaatccagcctgactttgttcttgagaaagttacgcttctgtccaaagtaggcctcagggttccttggctctatattgtgtttcctgcaaaatggcacccatgtacttgcaaagctagctgtttgagccannnnnnnnnnnnnnnnnnnnnnnnnnccatcgtctgacaagtagcaagcaagtttctccacagggtaatcaacagcaaggatcgagagaatggtgttggctgtgaccagaggtggttctttctcagggtctgcagttgagacaaacacatcgatacccggaagatcagatctntcctttgggttcctgagggttggagactcanagcgttctttaagaacaccctaatcagttaatcttgtaaccggacagagttttggagctgatccaaagccagacaa

SEQ ID NO: 8651 - DNA, 1203 bp, Arabidopsis thaliana landsberg
attgaaagttgatttgatcatcactgattactgtatgcctggaatgactggttatgagcttctcaagaagattaaggtctgcattttcccgccattttcctgtttcagattacggttgttttagtaacaatgttgaattttccggtcatctgaaacaggaatcgtccaatttcagagaagttccggttgtaatcatgtcgtcggagaatgtattgaccagaatcgacaggtgtgattcttattgatatcttcacagattttggagtttttagaaactgttgattggtttgataaaattttgtaaaaaaaaaaatgatttttgaacagatgccttgaggaaggtgctcaagatttcttattgaaaccggtgaaactcgccgacgtgaaacgtctgagaagtcatttaactaaagacgttaaactttccaacggaaacaaacggaagcttccggaagattctagttccgttaactcttcgcttcctccaccgtcacctccgttgactatctcgcctgaatcgtcgccgccgttgactgtttcgactgaatcgtcggattcgtctccgccgttatctccggtggagatcttttccacctcgccactttcatctccgatagacgatgaagatgatgacgtgttgacgtcgtcgtcggaggaatcgccgattcgacggcagaagatgaggagtcccggattagattagtggaactattctgggatgccgtgtaatattatctatctccgttaacttcgtttttacctctgacggtgtttttaattgcacgttgacttgacgccgtcaaattttatagatgtccctttaatctctcgcgcctccacgtgggccttttttccttttccttaaagcttttcgaatatcttttaattattttaatttctgcacaaagttacgtttttaacttttttagtctttaaacaaagggaaaattgcaatcgaaccttcgacattcaccatttattatgataacgagacttgaatatgcgtttttttcttatgtattgggtcctaaataagtcaatatcatagacatatggggttttataatcagaaagttagctagatctgacaattcaagaatcagagagctaaggttttttttttcagatacaaatcaactagtaacatttgaatccactatagtcattaaacagttccataaatatatatcagttttatgaccc

SEQ ID NO: 8652 - DNA, 551 bp, Arabidopsis thaliana landsberg
  unsure (1)..(551): unsure at all n locations
atcttaaaaggaaaaattttgcaggtaaattagggaaccacaactaatttttctaagacnaacnnctagagttcttgttgggaaatatgtcatttaaattattagtttatcatttttgataatttaaagcatgaattttgaatatggtgattcaaatcttcaattttatgttgattttcaacttaatcacgaattttcgttgagcaaactaattgagatacaaattctttttttcgatgccatcagtcgatttagagacgataaattattttaaatttaaaaaataaaagagaatccaaaaaaaaaaaaaattggtcatagattttcaagatctaaagttttttattgggagaatttctaacaacatgtcttaactaacttagttaacaaaaattcatgattaaatcgaaaagtcacataaaattaaaattttaaattactatttgcagagtttattctctaaaccaactaaaatggtaaaatgataattacattataccctttaccaaattcggagtgtatctattttcttccatttcccgattcattaa

SEQ ID NO: 8653 - DNA, 1914 bp, Arabidopsis thaliana landsberg
tagagatttgctatctgattaaataaaaacgaataatgcttgggtttaaaattgtgaataacaatgataatgtttctagtttccggcaaaagtagcaggggaagaatgattacgtgaatgatgtaggacccaaaacgttttgaaataaattactaaatttttgaccaaattgagttgtttaatttggagaggagtgttggccccatcactctctcgtcgacctctccattgtctttatggaatgaatgataaaagaggacacctcacgtggactctgctgccacaacgactctctccaaccatatccccttcacatatatgacatatttttcttacatttactatatattaaagactccacattgtacattttttcatctcatttattaacgcaacgttcagatttttccatttttaactagtcgtgaaaagtattttcgttgtacggtgaatattgtagcccttttttacggtgggtgtttttttttcatttgattgatgagtaaatctacatcgagaaaagaatataatgaaagatataccgaaatcttttgattattaacagatttattttgtttaaaccttttttttttttttactgttttaaaaagttgactaaatgcttatctgaaaaaataattaacgtgaaaaataatttgatataattcggattaagttaactataacagactgattttgattgagcaacgttgaaatattcacattggctaattacatcaatccatttttgcgttgattaaatgacacttttttttcttcaactattaaatgatattcccattgttgacatttctctaaggatatgattttaagtaattttcataaagaagcaattttctgtattttcatttgaaaaaaaaaagatatgtaatgagatttttcttttaattttttaatgttatgtaaagctcacccatataattctcactcatgatctttgtttctttaagcttttcttctccattgtctctctctttcttatcctctctttctcaatcaattccttcaaacttatacactttattttttttcccctcttgtcgaaaacatcacatataaataaaaaaccaaaaaccctaatttataaaatatatataaaatagttatagctccccacttatatatgcaaaagccaacatcaagtatcttaaatgtcataatggacggtggagacagcgtcggaggaggaggagatgatcaccaccgtcacctccaccatcaccaccgccctactttcccttttcaactactcggaaaacacgaccccgacgacaaccatcaacaacaaccttccccttcctcctcctcctctctattttctctccatcaacaccaacaattatctcaatcgcaacctcaatcgcaatcgcaaaagtcacaaccgcagacaacgcaaaaagagttattacaaacgcaagaggaatctgcggtggtggcagctaaaaagccaccgttgaaacgagcgtcgacgaaagaccgacacacgaaagtagacggaagagggaggagaataaggatgccggcgttatgtgcagctagggtttttcagctaacgcgagagctaggtcataaatccgacggtgagacaatagagtggcttcttcaacaagctgaaccatctgagatcgccgtcaccggaaccggaacaatcccggcgaatttcacttctttaaacatctctctccgatcttcaggctcttccatgtctcttccttgtcattaccgcttcgccgctttcactgttagccctaataacatattttctccggtgatgcttgaagagggcaacagcaacaactttgtggtggcgttggctttatcatccccatctacagggacgtgcacctaccgcgtctctgtttcctgggatagataacctttacaccaacgacg

SEQ ID NO: 8654 - DNA, 898 bp, Arabidopsis thaliana landsberg
tgagtaaaagatccaccgcacagtagtcgccagtttggttatgtcactccagaccaagcttaagccactccagacacaaggacttgaggccgcattgtaaggaagtgttgcaatcgttgcatcatctactggaagaacctcaagaggatcctctaaaggcttaggactaggagtaggtttttgattagaagaggatgggttgttaggttgaataatgggtgtattattctctagaaaaaactacaaaccaaagtctcaaacgtacgtaagaagttaaactaaaagaaaaaagacaaaacgtgtgtaaatatatcaaactaagatgagcaaagaaagtaaaggaaggaagcagagtccaatccaaacattagagtttgaagctgcactatgtggagctggtgatggtcccatctgatactgtactggagcatgattaaccggtgactcagccaacggagactgtgaaggagacgaaaaagagcttggtggtcggacgggtccaggaaccggagcagcgacaggtcccaatgaggctggtaatacatggatttgcagcttttgtcccatgtcacagtgaccagaaaatccgcatatgaagtgttggagtcccggtttggttagaatgacgatatcagacccggtctcgtatcttgctagcggtttggacggttcacacatctcgtaatcattgtgagtgacttcggtgacgtcgtggaagtctttgttgtatttgaagaccaaagagtctccaacttgaaaagttattgtagatgcccatgtctcgtagttgacgctcataatcgtccatccgtcggagtcaccaactttgtgaacggttcctccaacggaaattccaaaaagtgctacaagaataagcaaagaagtaaagaaggcgttg

SEQ ID NO: 8655 - DNA, 1919 bp, Arabidopsis thaliana landsberg
ttatgtctacaaaagttgctatcaaagaacttaatcctgagggtttccaaggagatagagagtggctggtaatgttggacatatcgttatgtacttgggaatgtgtggtttttttataactgttggtgtttttttaggctgaagtcaactatttaggacagctgagtcacccgaatttggtgaaacttattggctactgctgtgaagatgatcatagattgttagtctatgaatacatggcaatggggagccttgagaaacatcttttccgaagtaagtttatttcatattcatcgcatatacgtgactaaaggtggaacgtatggatggtttatacagattagttcttagtgtcattataagtatcttgaagaggaattgataaagcatatgttcccatattataaagaaggagtagtgacgaaatgtgtcgtcttttcgaattcacttgacaggagttggatgcactttgacatggacaaaaagaatgaagattgcgctagacgcagccaagggtcttgcatttcttcatggtgctgaacgctccatcatataccgggatctgaagacagcaaatatattgcttgatgaggtcagctattgcctcttctgttttgagattacatatgtttttaattcttcttcttcaatagatagtgtctacaaaggtagtgaaatgacttggtttttctatttgtccgcctatgtttcccctgaaaggtgtatgtaatgcttgtgcagggttacaatgctaaactctctgactttggactggcaaaggatggtccaagaggagaccaaacacatgtgtctacacgtgttatggggacttacggatacgctgctccagagtatgtcatgacaggtctgtctttattactttccgtcagcatatgtctgaattcagcatgtttaattgacacaagaaccttttaaaagtcatggctgttttgtcaagcagtgttaaaaaggaccctttttaagcatatgcatgttgatacgatcacattatgtaaatggtcatatatgtgattgttgtaatagggcatttgacatccagaagtgatgtgtatggattcggtgtacttctccttgagatgctccttgggaagagggcaatggacaaaagcagagcttgcagggagcataacttggtagagtgggcacgacctcttttgaatcacaacaaaaagcttttgaggatcatagaccctcgaatggatggacagtacggcactaaggcgttgatgaaagtagctggtttggcataccaatgcctaagccaaaacccgaaaggaaggcctctcatgaatcatgttgtagaagttcttgagactctcaaggacgacggagatgctcaggaggaagtcatgactaatcttcatagtaggggaaagtctgtaaccttatatgaagcttctagcgattctcaaggcacaagagatgggaatggacagaggaggagaagaccggaaagtggtagaagcaagagcgaagccgcggtcgacactgaaaaatatgtttctactctttcggaaccggatactaccaaaatttaagactcaagacagaatgattcaccagtgatttgagactgtaagataagaaagtagcagagttggcttaaaatgtataaataagttgagtcttcgtttcgggttcttcttctttttgaattacaaatattagtgcaatatgcaatttgatgtttctttgaaattcaaatgaattttggagagattatttgttagttgtcgtcgacaagtaacttcagtgagagtgcatgaaattttcaaaacatattagagcatctccaatgggaggttgtgttggaaaatttgtgaggttctcagcgttttcacgcccgactcggaaaatccggtccgaccggttgaaccgtgacccgaacacttttccgg

SEQ ID NO: 8656 - DNA, 1726 bp, Arabidopsis thaliana landsberg
ttcttttatggtggagcgttctcatatgttcccttggactttatcttatattaattcaacaaacaaaattcacaaataaaaagagtaaaggtaattgataacttttgggtccctgatgcgtatacgttagaaaaggcaacaaatagggtttgtgctgctcatgcatgtactcatacttgtgtcatatatgaaagagatctgctcatgtgccttggttcgagatattatcactacctaagtaaattttgacgtatacactacgttacttaatgaaatttttggcagctagtgattaattaaatttaccaatactacataattccattccatggttgaagtgtggtaacatttcaaacgagttaaagtaatgattcccattatacaatataagggcttggttttgatgacctccacgatcgctaatgtgtgaaacaaaaattggaacttcttataacatccgtaattttctttaactttatgcttaacccaatgattctagaaacacgtcatttactaaacaaataataattttttttgtacaaagacattcctactatcgttttttctttctagtttgtttgcttacattaatttggacttttaaattaaattcaggtttaaagtcccataaccaatacacagaaaacaaatcatagaccctttccgggaagatcaatccattgaagttgagcctcaacctcaccacattcgacatgtctcagcctaagaactatatcttgaacgagcttaccatcagaccatataacccgagactcctcggctaggcagttgtcgcggctaggctggaccgtggttacgatggtcccagatgggagatcatgtaagtgcatcttcaacgcattaacgaacggcttaatcccgaattctgcatctcccatcttgtcgtctttggtgaacgtgtcataatcatacaccgtctaggcaaattgacaccgtaatcatgttttttttttacgtaacattttgtaacattatggcgatttgaaaataaaaaatgaaaaatatgatcgtagaattggtagttccttaccaagaggacggtaagattggggtctgaaactgagagagtcaagtcttcattccactcaggatttacatttttgtaaataactcgagtcttcaatttctgcacattcaattttctcattcgtttatcataactactatctttgcgttaaataatgattctcgaaatatataaaatagtaagaatttgttgttagataaattctacgatgcgtaaagatagattacggtctccagccaccggacctcgaggcttcagatcaattagcaagtataaataatattcagataccttaattaaagtacttccaaaacactcgaacaaccaaattaattacaaatagctagattcttaactactaaactattacattcctaaaatattctgagagccgcttcaatatacctaaaattcacaaattcaacatgtatattctttacgaaaactgaccgaatcaacctagccatatgtatatattgtttaatgcacatctaaagtcttcaacactcgtgatctttcaaactggcgtcttattagtaaatttaacaatgatcatacaagaagccgaaacgctttaatgaccaagatgtttaaaaggtcaccattattacgttgctatagttccatccactaaaagtaacaaattatattctccatcataaagttgaaaaagtatct

SEQ ID NO: 8657 - DNA, 1728 bp, Arabidopsis thaliana landsberg
atatatatattctccacaaattatttactgcctctacataaatgtaattattcaaaataataagggtcgtagtagcgccatttgttgcatgggcccatctaatctaactaagatacgaaattttgatttgtggttgaaaataggtcaacaggttctttcaatgtcatggctgacaaagtcgataccaagttcgtctgggttccgatttccgtcccaagtaggacggttcaagcgcatctacagaaaaacggtttgtactttcaaaagaacgcaacttttatttcgaaagttcgatcctttgggtccatagtattgacgggtgagtagattacaattctgattgctttagggtttttgccgatttggggatggttgatctttcagttgaatccttaatctgatttgctgacattagaaggttcattccatgttttgtcttaatccccatctagttgccgaaagggtttagattttggggtcattgcttgaaatttatgcttcagatgcgttgatcttgtaccgtttagaactctgtgttgtactcggattcaaagttgttccctttacatgtcatatctctgttttggttattttcatgcctcaccattgaattcttcgtttcaggccactcaaccaactacgagtgctatctttcacccttgagttcactgaaagtgttcctgcttggtttgctgatgagctattgcttgtggagttagtttaaatatctgcaaatgtcaagtcttcttaatgtactgccacatatcctttatatcactattacctatgtaacttctaggattatttcaatgcaaagatgacccccctgctttggttctgcttcaaaattttgatttttgattctaatttgcagatatctcactgtagctatcatggatactcaggactcactagtaggggaggcataaacactgttgaaaaccatagatgggtctggcacaacaacggagtcaggttgtcgtttccaagagccgagtcttctataaacatcactatgggttgtacgcttcagcgtgggatagcaaaaagcttaagtcaggaaaacctagtggagttatctgatgaaaatgatgatctatgtcctgtggagtgtgtcactgagttcaagacagatgatgaattgcttagcgttcttgaaaagtcgaaagaaactaattctttggttgtggttgatttttatcgcactgcatgtgggagttgtaaatacatagagcagggcttctcaaaactgtgcaagcaatctggtgaccaagaagctcctgttatcttccttaagcataatgtgagtttctgatctctcatctttgatgtataaacaataaagaagtagagaaaaaatccattaatagctcaaatgctgctatttgcaggtggtagatgaatatgatgaacaatctgaagtcgcagaaaggctccgtatcaaggtaatccctctttagaattttggtactatcaacactcaaaaattaactgaacagcgtagtaaagagtttgatatactacaatcttacaggcggttcctctcttccacttctacaaaaacggagttctcttagaatcatttgcaactagagacaaggagaggatcgacgcagctattctcaaatactacatcctcggaatcttgaagaacattcgacaaaaccgcactctttgggttacctttcccaaatcattgaatatgatgtaactgatattaacaacaaa

SEQ ID NO: 8658 - DNA, 343 bp, Arabidopsis thaliana landsberg
cccagacaggcagtattggtaactaataattacattggttgatatacacctatctaaataatgttgtactatgtagtatcacaagtggtgggatggccacctgtgaggaactacaggaagaacatgatgactcagcagaagaccagtagtggtgcggaggaggctggcagtgagaaggccgggaactttggtggaggagcagccggagccggcttggtgaaggtctccatggacggtgctccatatctgaggaaagttgacctcaagatgtacaaaagctaccaggatctttctgatgccttggccaaaatgttcagctcctttactctgggtacgtgttaga

SEQ ID NO: 8659 - DNA, 1596 bp, Arabidopsis thaliana landsberg
aattaagataaccaaatgagctatattataacttaccttatcaggatgtctagatgtggaagcctcttggtcaaacttgtgaggagttccttctgtcccatgagaagtatcctctgactgaacaaagattaaagcaagcattagtttctgaattcactttatctgaaatatatagcaaactttgaagtaccaagctgtctggtttttcgttagtcgggattatgatagagccaggcgtatacatgtctccattgttcttgaaactttcttcccacataccgatttggttgagaggctcgtaaacttcaaaccttctcggtggaacaaaatgtgtcgatgttgtattcatgtttcttcaactagcaacaaaacaaaacaaaaaaagaaatacatacaaaacttcattcatcaaaatcaagaattgcaaaagatacaggatcacaagttaaagagatatgtaagtgatttgcttgcagccaaaagcaaaggttgtgacattaagtcattatccatcacccaattcgtcaacgctagctactaccttccctacatctataagctccattgatatggcgaaacatcggagtcatcatatacacccgaaaagccctgttcttttactagtgatcttttgaaaggttgtcaaatagatacaagtcactgaattttgttctcaaaacctctaattgcatttccaaaaacagaccaaactctaatgtcattgtcagttattggttcctactgtatcttcttcttttagccactaatggtggaccatcttaaacacctcccaataagggaaaaaaatccattactctcacccagtgatttgatataacattcttgttataaaagtcaagattcgattataagatatagaaccaaattatcacatagcaaatcatgaaatggtatatcagaagcaaccatcagaataaaagttacagcttcaataagagaatgaaacagagaaacacaaagtttgaacctttttttgcagtcaagcagagataatgatattcatatcaaccaagagatgaaaattcagaaagaagagagatccgaagtcgaaccttgttctggtcttttgtgtcaaaagggcttcaaaaaagacgaacttttcccgcggaaaccatgaaaagagaaaactaaagctagatgaacttttcactttcagcgacgaaatcgaacgctaagcctagaaatctgcagcttaaaccggtctgatagaataagggatggtaaaatctcgttctctgaacttgtcatctcgaagaaggagaagaagaatcattcaagagagaacacgacaactttaaaagagagacctttgattgagttctttaaatttttctatatcctaataaatgtcaataaaaatatatatactaacatttatttctgtttttttttttggtttggtgattcttcggtgatatttggcctttaagtatatgtactagatacatcagctacacagtcaaaaaccaaattttgacatgtttaagatacctttaagtccataatttattcgattactaatttaatcttggttctgggtattctggatatctctcattggcatgtctccactac

SEQ ID NO: 8660 - DNA, 1817 bp, Arabidopsis thaliana landsberg
  unsure (1)..(1817): unsure at all n locations
tactacagagtatatgcatcaaaatccaagctactttattcctccgacatgatggaaaagacaattgagtttcgacaattgaaacatctaagtgatgaagctgtacattgctcaaaatctactaacaaataaatgaagcaaaatctagcaacacagaaacaatgcagatacgtaagtgatttttcctggcaatgcaagtgctcggtttcaaaagcttaacctagagcgaactccaagctcaacaaggggaaacagagaccatgacttaagcagagagacagagctcaccaagaactcttcttcttcgagccagtgtaaaaacccatataccatttcacaaactttttcaaacccgtctcaagatcaaccgcaggtttataaccgagctctgcttgcgctaacgtgatattggcatgagtaaactcaacatccccattcctcggtagaggcatgatctttttcttagctttcatcttcaaaagcttctctaatatagtcacaagcttagtaacaggaacaggagaagtattccccaaattataaatcctaaacatagcaggacctttcttcttaccaccactaccagtactcttctcagcagtatctaacgcacctaaacaaccttttacaatatcatcaatgtaagtgaagtccctagcaacactacctttatcaggagattcaaacacagtaatcgtcttccctttaagaatatctttagtaaagaagaaatacgccatatctggtctaccccaaggtccatagacagtgaaaaaccgcaaacccgttaacgataatccgtagatgtgattgtaagtatgcgcaattccttcacctgctttcttcgtagctgcgtacaaactcgctggttgatcggtacggtctttctccgaaaagggtactttcgaattcagaccataaacagagctagaggaagcccagactatagcaggttgcggattcgctgatttcgatacttctaatagattcacaaacccagcaatgttactgttaacatatgagccagggttttgcattgcgtaacgcacaccagcttgagcagcgagatgcataacatgtgtgaagaggacaacatcaaagagctttctgagtaaaacggcgtcgtttatatcgccttcgactacgaaaacacctgatctttctaaaaggccttgtcttgctcgtttaagctttggatcgtagtatcgattgaaattgtcgagacctagaacaccatcgccgcgtcttcgtaacgcgatcgagacgtgagtaccgacgaatccggaagctccggtgactaataccgttaaaccgccgtgagacctaggacgagcggatttacggacttgtttctcccagtgagagccgccgtatttcgcggcggaaatggaggannnnnnnnnnnnnnnnnnnnnnnnnnnnnnnnnnnnnnnagataaaacgaggtagaagaggaagagagcgaggaagagagaagcccaaagggtgagttttgagagacggagataacggtggtggtggagaatcccgtacggtggaactttatcggttttgtactttccgggagtagaaggaagatcatcaaggtgagacattttcaccggaggaggatttagaaatcggagaaaatgtcgattagggttaggtttggatttttgggtcttaaggaagcaaaattgagcaagtcaaaaatgagaggattttccgggaaagaagaaagagacgatcttttacttacttgttgtaatcatatacaagtggatggtttaatttggtaatgatgtgatttattatttggtccatctttaagatatggt

SEQ ID NO: 8661 - DNA, 792 bp, Arabidopsis thaliana landsberg
tatggccaaattgatcaggttgctaagatcctagcttgtatacacgtggcctagcatgtatcgacataggatagatcacattagactgggtagaattcttgattaaaaaagtaaaatagtcactcctttttctaatgcattggtattggagacctcctgaaaaacaaagcaattgcataaagtaaacattcacttgcattagaaattccccaaaaggagccgattatgcacgatgtactttgttgacgctcgatataaaggataactaatatagttaatttcgcaagagatcatttatatagtatgacatgatacaatcgaggttagatactacttttatcatgattaccccctggatgtcacattctattataaccggtgctattgtataggtattgctttcataatcaatcgtggcagagaaatgcagaagttaaaagcgaatgtagcaaatattattagacaatgattgcgggtaaaaatagggtatatgtgatcgtgtacaaaagtgcatgcataacatgatcaatatagaatgcaatacaactatacaaatgtcaacaatctacaaacacgttttaactttgaaaagcaatctaaaattcatgaatctaaatatactctctggcagctttcttattaccatatcttaaagattgaaccaaataaataaatttacatcattaaccaaattaaaccatccacttttaatttaattacaacaagtaagtaaaagatcggctctttcttctttcccggaaaatcctctcatttttgacttgctcaattttg

SEQ ID NO: 8662 - DNA, 579 bp, Arabidopsis thaliana landsberg
caaggaattcgaaggaaagaagcttgtctctgcaaccaaggaaggtctgaaactggatgagactgaagacgagaagaagaagaaagaagagctcaaggagaagtttgagggactctgcaaagtgatcaaggacgttttgggagacaaggttgagaaggttatcgtctctgaccgtgttgtggactcaccctgctgtcttgtaacaggcgagtatggctggactgcaaacatggagaggatcatgaaagctcaagccttgagagacagcagcatgggtggctacatgtcgagcaagaagacaatggagattaacccagagaactccatcatggatgagctgagaaagagagctgatgcagacaagaacgacaagtctgtgaaggaccttgtacttcttctctttgagaccgctcttctcacttctggtttcagcctcgatgagcccaacactttcgggagcaggattcacaggatgttgaagcttggattgagcattgatgacgatgatgttgttgaagccgatgctgacatgcctccacttgaagatgatgccgatgctgaaggtagcaagatggaggg

SEQ ID NO: 8663 - DNA, 452 bp, Arabidopsis thaliana landsberg
ggactgcaaacatggagaggatcatgaaagctcaagctttgaaggatagcaacacgggtggttacatgtcaagcaagaagacaatggaaattaacccagagaactcgatcatggatgagctgagaaagagagctgaagcggacaagaacgataagtctgtgaaggatcttgtgcttcttctctttgagaccgctcttctcacctgtggtttcagccttgatgagcccaacacttttggaagcagaatccacaggatgttgaagcttggattgagcattgaagaggatgatgccgttgaagctgatgctgagatgcctccgcttgaagatgatgctgatgctgaaggtagcaagatggaggaagtcgactaaatattgcacaaagtcgactaatattagcggtgttaaaagttttggttctatccttttacatatctttgagaatttttttct

SEQ ID NO: 8664 - DNA, 1537 bp, Arabidopsis thaliana landsberg
aaatacaatttcgaatatgtccaaatgcatacaatgaatataatatatgctggcaaaaagttctgtgtcccattatatagttagacccatataataaaaatgattttgataaatttgtaaaattcacttaacatatacatatacttttataatatgaattgcaagaaaacatattaacctatttttttagtttatttttctttctgttttatgtattaggtagaattcaaatgtcaatagtcaaggaaatttgctagtggggtgaaatttacatataataggtacaagtcaaattatgtataacaaaataaatttttgaatgtcaatagcttggaaatattttttaaccgctacttaaaaactttcataaaacctataagttatagtagaacttccagatagagtgacacgaatttagcttagctaatcaaatcctcacattccttatcttaaataatcttcgaaaaaagtgtgacccacatgtctgtataaaacgaaccgattagattgcgacaacaatacattccaacaatttatcgatcacttttccatcctccaaaatttttgcagtaaaatctcttttcactttcaaatcaattatgtcacatcccaccgtagaacaactacatgctttccatgcacaagaaagagagatattctctaaactagttcaaaaactccgaagaccaccagctgagtcacttcttgtcatggccacatggctttggtttgaagactttggcttcggaaacattttctccatcatcacggtttttagcgatctactcattgtagatctcgctaacgaggctgtcttgtgctttcggtgccttgaatccgaccagcccccaaatgatgtcagtcagatccctctcaccgagagattcatgaaaaatgacatatcccttcaaataatccacaatcatcgatacactgccattacgggaataaagaactttttaaccactatttgttctagaatattctctgatatccttcaacgagttcttccatcttcatcatcctcattcatcaccaatctccgccaccctctcatcattcccggtttccctcatccaacttttgggagcatcaacgtattgcctaatatcgttgctagggataatcttccaaacgcaaattcatttctttttcctcatggtctttggggctggaacgctaaccatgtcgcgactgataaagaacggacggtattcctaacgttttctcgtggttttcccgtgtcacatgctgaggtgattcatctcttcaccgagttatatggagaagattgtgtcgaaagcgtttacatgccagaggacggtggaaattcctccaatgacaacacaaattgcaatggtcatcagcaacaaccactattcgcgaagatggtcttggactccgttgttaccgtagatcgtatactcagcggccaggaaaaacaaaagtttaagatcaatggaaagcatatttgggctcgaagttcaagaataataaagacgtcttatctaattaaataaagtcataaggattttag

SEQ ID NO: 8665 - DNA, 887 bp, Arabidopsis thaliana landsberg
agttgcgtcttacttttaacttaaagggattgacctgcacattttagagataagggttaatatgcgaaaaatgacaagttggagggtctttttttttgttctttttgcaaaaacccctaaaaacacgggccttttaggtgtataaaacgaggcaattagataataaaatgcattccaacaacttatagatttctttcacattcaccaaactttctacagtcaaattcgattatgtctcttctcaacgcacaaaaactacatgtttttcatgctcaagagagagagatattctctaaattggtcctcaaattctcaaggcctccagctgagtcacttcttgtcatggccacatggctttggcttgaggactttggcttcgaaaacatcttctcaatcatcctcactctcacagatccactcattgcgggtcttgcgtacgaggctgtctcatgctttcagtgcctttctttaaacaatcccccaattggccgagtccctctcaccacaaaatatctgaaaaagaatatatcactccaaatgatctacaaaaatcgatatagtgctatcacaggaatcaagaacttcttaaccactgtttgtaccagaatcttcaccgacatccttctacgagttcttccaccttcttcaatgtcttcctttgacgcaagacttcgccaacctcttcaaatccccgggttccctcatccgatttttggaagcatcaatgtgatgcctaatgaagttgatagggataatttctccaacaagaacaacaacttatttttcatcccaaatggtctatggggctggaacgctaattgcatcgccactgagaacgatcggaccttgtttttaacattttctcgtggttatccagtgactcatgc

SEQ ID NO: 8666 - DNA, 1013 bp, Arabidopsis thaliana landsberg
ataaagtttggattatcctggagcacctcaagatccacattctgcttccacagtaaagctagacctcctcctcgaccttgtggtgacaccagtttgtgggatgtgaattgcagagcatggagcttctgaagtacaaagtcatcagagtttttttgtctccatgaggaacagtaaatcaggggagatagtcttttgtatctccaccagccgccgaactgtcatggggttcccaagaccccaacagttccagctcaccgcttttaaggaagagaaaactgtggattctgaaaatccactatattcttcactattgcaggaataataacagcctggtttggtgctctgctattggacggaccagcctcctcatctatcaatgtaagtctttgcttagctggttttctctttgtaatattctgtagagcagcgcttgctacagtcactcttcttcttggtgaattttgaaccagaactttgtttcttttgctagctttggcccctgagagatgaatggggcttttgttgattggttttgcaagagggggccttccagggatggttcttctagttgttgttctggtagattgttctctgttaatggctctggtaaggtagcccccgatttgtcttggtttggtagctcagagagttggtttagtcttgctgctgtagcaattatttgttctgcagtttctgccattaacccacgattttccccttgcaggactctctgtttgcgggctaaaatctctgtcggatcagcgcagctagtatattgaactgtgatctcccttaattcgtccataacttcctcagtggttggtatgggaagtggttgatgggaagattcacctgcacaagatgttctctctagaggcggcctcctagctctagaggaggttgagtggtctgtgtaagccacagtctgtaggtaagatttctctctccattgcaggctatagtttttgattaggagcttgatatctgggacgttctcttgtagattccctcct

SEQ ID NO: 8667 - DNA, 706 bp, Arabidopsis thaliana landsberg
agctgcctgctgcgttgtttccgaactcttcttcttccttgtaggcactgcttaactcattgtttattttagcaatagtttctggagatgaggttgggtctatcattgctgattccagctgctcttggcaatcccttactcttttctggctattaacctgtctctctttactccattcaataatagcccttctgcatctactgattttaatatccacctcctcatacacattacctctccagttttgcacaattaattgtgttatctctttattcttcttgtaccttctatcgtacctgaaaagtcctttctttctcttcttttgcaggtcaaaataagtaacaagtggcctatgatctgaagcttcaaacaggagatattcacttcttccagaggggtattcttcaccccagctactgtttgacatcgatctatctaggcggcagaagactaggtgatcatgacgtttgcccctccaagagagaaaattaccagcatgttggagatcatagaggtcacattctgagattaaagttctcaggtctacaaaggtaccttccggtctaattatgcctccttgcttttcagaagagtctacaatatcattgaagtccccagttagccaccaagggtctgatctattctggcctcttgttgaaagttgattccaaacttcttttctttttgctctttccggttctccata

SEQ ID NO: 8668 - DNA, 2083 bp, Arabidopsis thaliana landsberg
acaaactaattttaacaggaattaatcaagtgctataacccctaacatagtaattacctaatttatagaatacatgtttttccttcaaaattttttatgaaaagacaagtaaaatactaaccaactcagatttgtgtaataagattaatttgtgttgtgttcttcttgtaatgatagaaatataggtcacatcggaaacatctactagcgcgtgaagcagaagctgccagctggaatctccggagacatgccacggtggcagtgcccggagtaggaggaggagggaagaagccgtggacagctcctgccttaggctatcctccacacgtggcaccaatgcatcatggtcacttcaggcctttgcacgtatggggtcatcctacgtggccaaaacacaagcctaatactccggcgtctgctcatcggacgtatccaatgccggccattgcggcggctccggcatcttggccaggtcatccaccgtactggcatcagcaaccactctatccacaggtaataataattcatttgtaaaaatgttacatgtttttccattattagttgtatggttaaatcatgaaaaataatcgaaatgacataactaaatcagctttgttgaacaatcatgacactgcaaaaagctagtctttgtacactattggctttttaacacatgcaacatatataagtataaaacggaatcattgaattagattgtggttttgtctaacaacgcaattagtaaaagattgcaagatcatgaatcatttttatgtagacaactaataaagatttagagctatgaattatgtatggattttacaaaaacatatttctaatcatggtttatgtgtatatatgtgtagggatatggtatggcatcatcgaatcattcaagcatcggtgttcccacaagacaattaggacccactaatcctcccatcgacattcatcccgtgagtgcaccttttttggtttcaattttgtttattagattttgattatgacataacccaaaaaagttttcgaataaattttggataattaacaatatttcattacttgacggttgcagtcgaatgagagcatagatgcagctattggggacgttatatcaaagccgtggctgccgcttcctttgggactgaaaccgccgtcggttgacggtgttatgacggagttacaacgtcaaggagtttctaatgttcctcctcttccttgagaaagatctccaaaatttgtcgaaatctcaaacttttaacttcatttttttggtatcttctatgtatttttgcaagggaaagacgataaatccttgttgcttgatcatatgtatttctctatatgagtgcatgtatcgaagttaagcaactttaatatatcgttataatcttcgatagcagaatctgtaatttttattaactttcaactcccgaagcatcattgcaaaatgactaaatgcaacactttttggggttaaaaatgcttaacattttaaaacattactatcatttattcaatcaacaatttatagttttatacaattgaagactagacgggatatatatcgcatgtgttttttcaatggcttattttgttttataatgccaactttcacagctatggattgtgactatttataatttcaaagaagtcaaatatttttaaaactcaattaaagtccataaaaaaatttgcaattgataatgttaacatatcgtggcaaaaaaaaagaaagtacaacacatatttggagtttagatatacgaatattcttttaattggttccatgtaaaaaacttaattcaaacggattcgattggtgacacaaaatggtaaaaacaaaaaagcggaaaaagttttaaaaatactagaatagttgaaagaagtaaaaaaaatacaggtacaaaaaatacaatagtacaaaaaaatactagaatagttgtagatatacttttgtgtttagtaaactattaaagcattaaacattgtaccatgcgatagagattaccaatcaaaagccaaagtgatgatgcaggataagttaataacaattactgtggggtaagaagttaaaatactc

SEQ ID NO: 8669 - DNA, 4844 bp, Arabidopsis thaliana landsberg
aaacagttatctagtacacatataacacatttttatcaatgtgattggtatctggtaaggaggctttcaacaattaacaatgtattttccccataacacattagcctagactacagaatggtttttaatatttataaaaaaattaactaatttgggcgtccactattgtggttgtgtcgtataccatgtcagcgtcgccctacaacacagacgtgaataagaaattggaaaaaaaacaaatacttggtgctaaaatattagcgggtgtaaacaataaattatcacacccaaaaaaacgaagtaaaaatgtataaaaaatacaactcgctaccaaaacagttatcgagataagttaaaaactaacaagacgaacctcatcgcctataaccaaacattgttgataagcaggttttttaggtctgcttatgtgcttcatgctgtgtgagttcagttcaattcccctaatacacacacatgtcgatgcagctatagggggtgtcaatccagtccactgttattgctagcaattaagatgtgcacagaaacaactaagtcaagccatattataatgatggtgggtttctagtaacaaccctaggtcaggattcaaacaagtaaaaatgagaacttaagagccctactcgatcattgggtcgagtagaaccaacaggtgacaaaattaagaaactaaaatgcaatcaacaggggatacaaataacaggtaaataaaagtgtaatcaacaggggatacaaataaatctaatagaatttctaaggatggatccattgataagggcaactctagggtttatcaaatggctaataggcgaaagatagatacccatgacgatagattcaaaaactgggtcaatccactaccgtgacagagacccccataactctaccacttcctaatctcaggtctcgttgatgaaacatagcaaagaagggtttaagaaacaatctaccaaagccaataggcagacaagccaatcccttggtcgagtctacaaatctctggatttcgtaggtcagacatccatttgaacgtcttttggatgctggacgtctatgatcgaatctccacattagccggcgtaaaccgcataggggccaagcgaatccagaagggtataaatctaaacactaaccacctaactaacctagagattaccctaatctaatccatcctcaagaaccctaatcactactcatgcaacattctcaagaacacaaaccaagaaattactaaaatcataccaaaatatagatctaaacaagctaaacaactttacttaaacaatcaaatgcaaaaacgaaatagattaaaagtaattaaggtttcaagattcataaacacaaagaaaaactgaaagataaaacatagatcctttggacaaagtccaaactgatctatttatactaaaatgttgaaaacctagattcactagaagacaagagacttgaggcggtttgggcgaatactcgaccttggggatcgagtaaagagggtgctgcaaagtctgcgcctttgtgtctatgctccgagtaatcaattggtcgagtagatgcttcatcctctcctatccgtatgctcagatgtctggttgagtgggaaatgaggaggattcgaagacgctttgatagctcaccaagtcttgtagatttggtcgcccttgttagagtaaatgggtcgagtataggatcgagtagtaaggtcgagtagatcgatatgatgctgcttctaagactgccttgatccagtaagttggtcgagtgaattgctgcctcctttgtggctgcctgatcgactgaactggtcgagtagaattctctactgcttccttgttggttggataaagtagagtgtcgagtgattgcctttataaactccttctacacctgaaaacacaccaaaacattcaatatgtatgcaaagtgatcctaaatgcctaagtgtgtaaaataagctaaatgtgatgcaaaatgatatgaaacaatgagtgatcactaagctaaatgatgataaatacatgcctaaaatgagtaaaatacagtgttatcaactttcccaaacttatctcttgcttgccctcaagcaaacaaaaatcttaagtttgaaggtggggattcaaaaaccgaagcatgaatatagaacgggtaagctcaatgtctaggtaggtaattctaggttgcaagatgatagacctttacttaaaaacgttagccatactcgtcacaatgcaacctaacaacctgccttaatatattcaagcattctcatcaaccaattcccttgaatattcattaagcacgaacagtggatcaagcaatgcaatggttatgaactcacttggtttcgggcttaggctaagagacaaaaatggtccctctattgatttgatcgagtaacaggagactctcagagaaaagattgagcttcagcagaatgctaaaggtaaaagccaatggacacatacaagaacagactcccatctacccaatgatatagtatgatagctcagaagatgatcgcagtcccacaaatgtcctaactctaccctttttctcattctttctctcttttggttcaagttctaaaggggttcttctttgaaacgattcaagagtctagcgggtttggttttatactttgacaaacttaaggcttttcttcaaatcttatagcatatagggcgttgtaccgttttctttgaatcataatgcctaactctctttgagttccaaaccttttactagactaacactttatgtatcgcccttaagaactctaaacttttactcttttttttttcttttcttttcattctcattctctttcccagtcaatccatacacaatcccaatcccaaatacaagtctccacctagtcctagcatgggctaagtctacatgaaagacatctatttggattaacagagggtgatgaagtgaataagatgatccaagtatgtatatggtagccatgagttcataaacaatgcatagacatgataattgcaatttcagttcaggttctaatagataggggatggcatcagataagcgagtttcgaatcaaagcggtatagtcaagttgtaaattcaaagcagggtgcggtgcggtcttacttcagagaaacaatcggttatgcaacagagaactaataacatgggcattgaacttacttcattgaatcaaaacatgcttaacggttcgaaatcatcattatcccctatgcaaatgagcaatcctaaatgcaagcactctatatacaatcctaaaatgatatgcaatctacatgacactctgtttttgtgaaatcattttctgaaaaatattcaaatttttatggttttttatatgccttagatgatgcaaaatttgaaataaaaaaagagaacacaatgttaaacatgtcttgaaccctcccccaaacttaaattacacagtcccttgtgtaataaaaatctgagaaagaattcaagaccaaaacacaaaacacacaaagaaaaataaaaagctaatggtatgtgcaatagttgaggtggtttcctgctcgttgatgtcatggtaagcatcccaattcattcccgaggactgcccatcttgatctcactaattttgctcgacactctacttgttctgagcccacggatcctgctcgacactctactcgatatcacgtcgagtatcttggtcgagtgatcttctgcttgtcataagaaggtccttgctccttggccgaagcattcttgttttttttcttcttttctgctcgaagtgctcatgagatgaatgtcttgcaggagcttgggggcgacttacctctcgttgctcataggcagattatcttgaaggtgaaactctgtgcctcttgaaaccacttttttagggcggttttgtctcaccatggtggcgtctgaggatgaacagctcagtacagcttgaatcgcggcgatggccttgacacatttttccaacatccggtcttgaaacttcttccaagcactcatcgaaccaacattcttatgagctacactcacactcttactcactcttggtggtggtttgtgttcctcaaaatggaacctactcgcattgtagttctcccaatccatctcctccacttcttcattctcagctccttcttcaatcttaacccttttttcattgtccggagcttctctcgtcgggggtgctctatccatgaaaaaaagtttttcattaggcgggttgaaatcgatgttacctctcactacgatggttgtgagctcttggctgggtaggagaaatttggcatccatttccgtcctgtgctgaaacttgagaatatgcatcccctcatgactctgatgctcaacaaacaaagcccatctcaggtgaggaatgtcgatccatttaggggcaaagggagtcgactaaagtggcactccacaagccattagtataggtgttatcactcctcctatagaaatggttctcttctgcttattcgctaaaccacaaagatgattcaataaacgcattgatggtgaagcatcattggtgtcaccctttataggtactttgttcttggtatagagtaggatatcttttaggacaatatcaagcagctctatctcgccattgttaatcggtccggtcttctctcttgcgtagaggacgttagccgttgctttctagaagtaccgaatgcaggggttttgcgttgctcttggcccttgaggacgagaattgggcgtcatcatctattgttacccaaagatccaaaagctcctctttcttgaacttaggtttaacatcagtccctctagggaatccgaacatatcctcaagagtt

SEQ ID NO: 8670 - DNA, 1950 bp, Arabidopsis thaliana landsberg
aaactgcaagccatccctccgagagtcaataaaaacataaaagaaaaacaaaacaagcagtcagtgaaatcaaacaacaaccataaaaaataatcaagacaacaaaaagaaaatccaatcaatcattgatcaacatatacacacgttcgtaacatcaacaaaatctccatataacgtcatcacggtattgctttgtctacatttggggaaagcaatgatatcatcaccttttccaaaagtgtagacaaagaagcacagagatgacgtgttcttatccttctgcagtcaaaatctaaactctgcagatgaacaagtatctatctgtgtgtatttataggaggctactctagggttacgatgatctggaaaccctagaataatctatagtgaagtcaccgctaatggaagacggaccaaatttgcaaaacatgggttaagcccaaattgttataaaagcccaattgttacataatctgcaaaataaaattaaaatatccaaaccatgttcctctcagaaccgaaattaaatattgaaccggtttctaccaggttatttggttttatttaaaccgatggtttataatgacccgaagaagtcggtaagaattatgagtaatcctgcgtccaaacaataactttcgtcaacggctcaagaggggaagaagattgaattggaaattctgggaattggaattggagagggagagagagaattcgttcatcatggaggaagtgacgagatctgtgttagcagaagaaatactgaagcgtttagatctggagaatctctgttccgtcgcatgcgtttccaccactctccgctccgccgttgtttccggcgttcttccttctcttacctccctcgatctctctgtaagtttccgattctcgtcaatttggagattttatttttctgaatagagatgaaattgatcgaattttcgtttctctgttaggttttctctccggacgatgaaactctgaatcacgtgctgcgtggttgtatcggactcagcagcttaactctgaattgtctccgccttaacgctgcttctgtgcgtggagttctcgggccacatctccgagaacttcacttgctcaggtgttcacttttatcctcccccgtcctcacttacattggcaccctctgaaacaaatctccggtacaattccttcttcccatgaactttttaatgaattatcatgcttttcgtcgatgtttgtttttgaaatagatgaaaagtaacattgatggtctgaatgtcactaattgaattgaatactgtgtctttcccaagcctttacttatttgggattgctttggcttttttgtcaattatattctttcttgatcagattttttcagtgtgatgcatgtagtttcgagctatatagttgaagttgtgataattgagtaatgagtgtttctgtttgggttcaatgacagggttcttactctggaaatggcagacctggattctcccgatgtttttcagtctaacttgacgcagatgcttaacgggtgtccttatctggaggtaatttgttaaagcttgctgaggcattggtccgacgaagcgagaagtgtgaaattgaattgggttttatattcttgtgatgcttgcagtctctgcaacttaatatccgaggtatcctagtagatgccaccgctttccagtctgttagattctccttgccagaaactctcaaagctctaaggttacagccacttcttgagtctgaggcaattcttctcatgaacagattcaaagtgactggaacttatttatctcagcctgattataatagtgccttgctatctccttcaccttcttttactttgcaaagcctgtctcttgtcctggacttgatatctgacaggcttatcatagctatcacaggttctcttcctcaacttgtcaaactggacctttgagatcgtcctgaaaa

SEQ ID NO: 8671 - DNA, 689 bp, Arabidopsis thaliana landsberg
tgaactttgtatgaggatactgcctcatgatcaaaacactgggggatttttcattgcagtccttcacaaagtttcacctttaccaggtgaattagaagaactttctgttgcataacctctctagttgattccttaatacgaattccggatcattttcttgcagactttcaggagaaagtaactcagaaaaggaatttgtctactagaaacaacatcaactcatctgagaagtcttcttcgtatgaagcagtatctgacactgtggttactaaacctgaagagggtacagaggaaatagttttagaagcaacagtttcagagaatggctttgagccgccggagatggaaagcacctgcgatgaaggtatcgtagaattggctcaaaaacttgatgatatagaaggcaagagagaagtaccatcaatgcaagggaagtggaaaggcctttaccctgttgttttcttgagagatcaaacagtgatcaacgggatcaagacatttttcggcattaaagatgaatcgtttccgctgtatggtcatctcgtgactagaaacagcgacataagcagcctcggaaacgtgaaaaggatttactatgtttcgaaagcagttaagaatgttcttgagcttaattttgcagttgggaagccgctcaagatctcctctgtggcctcaagatgtgtgttact

SEQ ID NO: 8672 - DNA, 2694 bp, Arabidopsis thaliana landsberg
tagtttaagagtacaaaatcaatggttcaaatttgtttctcttctttacttgttaaaatttaatcatggaagaaacaaagtcaatggacatccaattatagtcctagtcatctcattctcctttcaacaaggcgaatcaaatcttctttatacgtaatatttatttgccagcctgaaatatataccaaatcatttttaaattaattgcctaaattattagaacaaaaactattagtaaataactaattagtcttatgaaactagaaatcgagatagtggaatatagagagacaccattaaattcacaaaatcatttttaaattacctaaattattacaacaaaaaactattagacagaactaagtctataatgaaacgagagatcgtatttggaatgtagagcgagagacaattttcaattcattgaatatataagcaaaaatatatagacatctagtccgtagactttggtgagatgaagtctaagtacaaacaactgaatgaatttataatcaataatattgattatattgtgattagaaagaaaaaaacaacctgcgttatttttcaatattattgtgaggattaatgtgaacatggaatcgtgtttctcctgaaaaaaatatcagcatagagcgtagaacaatataaatatatccaccaaaaataacttcaacatttttatacaactaaaaagcaactttttgtatatataaataaatttgaaaactcaaaggtcggtcagcacgaataagacacaacaactactataaattagaggactttgaagacaagtaggttaactaaaacatccttaatttctaaacctacgcactctacaaaagattcatcaaaaggagtaaaagactaactttctccaatttttccccaaagaacacaaaagaagaagaagaaaatggcagtgttcaagaagaagaagacatcgttgacatctctgttcttgggatgttacaaggcaaagaacgtaagcaaatacgaaggaggggagaaggctgtaatgaaaataagaacttgtccggcgttcaagaggctgtctttatcggacataagcgatccaagctcgcccatgtcggttatggatgatctctctcactccttcacatcgcagaagcttcgtttgttcacgttgtctgagctgagagtgattacgcataatttctctagaagtaacatgttgggggaaggagggtttgggccggtttacaaagggtttattgatgataaggttaaacctggtatcgaagcccaaccggttgctgtaaaggctcttgatcttcatggccatcaaggccatagagaatggctggtaacatttctttctcttaaagtatgtttttgtctacattcaagacttttctattcagaaggaacaatttaattacgaagaccgtctcgattattttatatattttttgaattttggtttatcttgttaattagctatatgaatctggccatttttcagtatgttattaaatatatgtatcttttgtgaaatttcttcataaagtttttttttcagtgtatacaaaatttatttttgtttgcaggcggagatattatttttgggacaactaagtaacaaacatcttgtgaagctgatagggttttgttgtgaagaagagcaaagagttcttgtttatgagtacatgcctcgaggtagcttggagaatcagctctttcgaagtacgtcatctactatatttttacctaacttgctaaaagttgtttcaattttgctatatatgttctagaccgcgttacaaaacattttttctgtttaaacctaaaagaacaactccacgaagactttaattacgttttaggtatagaatgacacgaataaaaaatattgaagaaaagaatccatatggttcacgttaacttcgtcaagttcttactttatttatgggtcgtacactacattaataacttcttaaaaaactatatattttttacaatttagataatattcaatagtattactaactttgaaaagtgtgtgaattgggacaggaaatagcttagcaatggcttggggaataaggatgaagatagctctcggagccgccaaaggtttagcttttctccatgaagcagagaaacctgtcatctacagagactttaaaacctctaacatattgttagactccgtgagtttttttttcctttttaaattttgtatccactattaaatcaaattaaagtggtatttctcaactgactctttgatatttcaggactataacgccaaattatctgacttcggtctagccaaagatggacctgaaggcgaacatacgcatgtaactacccgagtgatgggaacacaaggttatgctgcgcccgaatatatcatgactggtaacatttttgtaaggaatttatttcttttaccgtgaagcgatattctttgagatatgtctttaatggtttacatgtgttgtaggtcatttgacgacgatgaatgatgtatacagttttggagtagttttgttagagctgataaccggaaaacggtcaatggacaatacccgaacacggagggaacaaagcctagtggaatgggcgcggcctatgttaagggaccaaagaaagttagagaggataattgacccgaggctcgcgaaccagcacaaaacagaagcggctcaggtagctgctttcctagca

SEQ ID NO: 8673 - DNA, 2453 bp, Arabidopsis thaliana landsberg
  unsure (1)..(2453): unsure at all n locations
tgcatgtacatagatgatagatgagttgccaatcggttaatatatattaatgtgagacaaaaatagaagtaggaaatgaagggatcaaagaaaagattcaaagaatcgaaatcactttgtatttgtttggggcattgttatgggtctttgatagcatcacatgaacaaatatggatacccaccagcatatggagtgacttggatctccttgatatggctttgtctctttatgttacctccttctccttgtatttgtctactcaattacaatagactaaagttaaaaaaactaataaagaactagaaaagacttcctcacacaattattaagaaaacatttcgatatgtatagacgtctgttgaaattaaatttcagttggacccattggtttaagattggattattctttatgatttttttttttccacttgtaaatgtgtcgcatatatagaggttggacagtggacatcacaatggcagcataagttggaaaaagttccaaaaccctgcccgctgagcgctggcccaataaccatattcttgggtttttcgcatacttgggcttttaacgtgttcggaatgaaggccaaggtaaggattattctcaactgacttctcccactagcagctcacgtcaattcgtatcatcaaatcatgggcctagcccaatcattcgtttcacacaaagcccaacaattgtataattaagtgatcctccgagccaagctttcgattgtcgtttgttagttttcgaattgacatgttgtgggacgcatggccacattgatattttaagtggaattagttgcagactgaggaagggaacctataccaaaatatctaaatcgctttctaattttataatttttaaacgaaaaaagtgaagatttcctataatacacatccttacaaaattccccacaaaaaaaaaaaactctacgtaccataatcgtataagaagactgtaagctatactcacaaaactataaaaacgtatcaatggtctagaagatattctcatgtcacacacgacacagaagacttaaacaagtcctatcaatctcttaatccgagccgttgactagctaaatcacatctgacgttaccagcgaaaccaacccttgatttagctaaatcaaactccatccacacgttttgctgatgatggtgacctataacaaatgcttctatccccaaaagatcagagttcccaaacgtgaagcaatatacttcttcttttccttccgacccggctccgnnnnnnnnnnnnnnnnntttctgacccgacacactcatctccgcgccacggaacattaaactaaccatgggtaaacccgagaaattgggccgtgtcgttgacccaaccttgtaacaaaggtccattgtcccttggaacacgaaatccgggtcgtctacaagcctgagaaccgatttggtttgcgtaataaactcgttttttaaggcagtgtataccggacccattaggaacgtaaattgggtacctgaatccaccatcgtctgacctgctccggtatgatccggtacgaatacagatttcggtaaagaaagtatctttgacccgacccggattccttctaattggaccgtgtaagcaacccggtcgaaataaggtaacggcgtcgactgtagaaccagaggcgtatattggattggaccgagccaggagtaggacgcgtcaccgagaagcaaaaaaccggaggaatctgaaccggatatgcaatacgaaaattttgagaaacccagctggttaacaaaagataaagatccccggttcattcccattaaaccggtcgatttagcatcttcctccgaattggagcttaaacctgagtccatacacccgaataaagtaccgggtcgggtcacagacccgattacgaacgtctcatgagccaagttgccttcgattgatgtagcgtcagcgtaggagatagccacgtggcagagatgggtcttcggatcgcatgaagcgggtatgggtaaatcccgggtacgggtcctgcaaattggtgaggagcaaggcacaggggagtacgtagaggatgaaaccgggttaaaaacggatcctaagtttggagatttcttgcagtgaagccatgagagctcgcttccggtatcaagaaccatcgagatattttgaggtggatcgccgacggcgagagtgacggtgagagtaacattgtgtctgaatgaaagcttgtctgaagaagactgaggaagtttctgtgttttgagagagaagagtagtgtttgatttgtagaagatgttttgcagaacgttagagggaaaataagaagtagaacttagatttgaagaaaaaatttttgatagagataaatatgatttatgattactgaactgattttcctggaggttgcatttttgtaacatacatactttgacgctttaaataattgttatttttttttc

SEQ ID NO: 8674 - DNA, 1164 bp, Arabidopsis thaliana landsberg
agttatgtttttacaggagaaagagtaatgagctttacagcaagggttgtggttatcacttggtacttcattgttcttgtgctgactcagagttatactgccagtttgtcatcgcttctcacaacacaacagctcaatccaactgaaacgagcatcaagaacgtgcttgcaaaaggaggacctgtggcatatcagagagattcattcgtactggggaaactgagagaatcgggcttccctgagtccagactcgtgccatttacctctccagagaaatgtgaagaacttctgaacaagggaccatcaaagggtggtgtttctgcagccttcatggaagtaccatacgtgagagtttttcttggacaatattgcaagaaatataaaatggtggaggtgccatttgatgttgacgggtttggctttgtaagttccatcacttctctttggcttgcatacaatccttccttttaatgatgcatataactagtttcgattctgtaggtcttcccaattggatcgcctctagtagccgatgtatcaagggccattttgaaagtggcagagtctaacaaagcaactcaacttgaaactgcgtggttcaagaacatagacaaaacttgtcctgatccaatgaacaaccctgacccaaacccaacagtctccttccgaaagctcagcctcgatagtttcttgcttctatttgttgctgcagccactgtctgtacccttgccttgttgaagtttgtgatctgtttcttgattcagaatcggattattttgaatgacgaattctaccgtggcaaacgaatgaaggagatgtggttaaagttcatggaaagtgatggtgaatcatacattagccgtgtgagatcaacatgtcctcaggtgttaatacaacccagggaagaggacattgatcccattaacggctaaaaatctttgaacttttttctttatcttcttcatgtagccaaagtcacctttgtatcatcacagctcactgattctagtgcaatcctttaaacacacacttactaactcctaaccttttccaagttacaacgagacttgaccatatgtgcatcttttcccggcgagccaaaaccgactttgaagattgtcgtcaatagtatcaaattaatggaactcagaagtcttaaaatc

SEQ ID NO: 8675 - DNA, 1353 bp, Arabidopsis thaliana landsberg
ggaaattggccaatagtatgctttctctaccatgaaaataagagcaggcttacgtgtgttctgccccatcactgcatccgctacagatagcgagtaaatcttcacgaccagcatctccacagatatcacaaacctttacctattcagcgaaaaaaacccctttcgcatgagaattatttcagtgaacaaatactgcaacaaaggaagaagtagacgtgttcctaagttcttctaatatgagacaaaacagcattacttacatcatgttcgaccatttcagaatcatcactctcgctctcagacacagctgatgagttggacgaagagctcttacttgacttaccatccttcctgttctctcctgaacgcgtagatccttcaactgaaggttcctgtctctctttgttacccccgggtcttgatttttccttgaaatttcccttctcagaactgactctgtcatcatggttggatgatggattctgcaaagattctaatttcacttcatctttcctagatccacccggaattggatcagaattgagagctgaaccatcagctaaatccttattgccaatctcgttattagaacaacctgacttcaactgtttggctcgatcagcagacaagatcccatcttcctggtcttctatacagttagagctctgatctaacatattagctgatgcagaaactttatgtttcatcctgctcccagaaagagatggcttagaagtcattgcagcagctccggaatcatctgatatcccagaacatcttatagtttccttactctcagcattctcagagagagcatcatgactggaattgacaagattgcttgcttcactagcagtgttatttaaactcttgtgagcattaaccatagaagaaggcaaaagatcatcctcgtttacagaacactggctgcccactactccatgacagttttcatctgatgactcgtccaactttgatcctgtgaaaccaacattacggtgcatgcatgatgaacaaggagcagaacaaacattacaagttccagactccacttttgaaaaacctctctgacccatttggcgcttaccaactcttctatcagcctgcaggtgatataacaaaatagaagctgttaaagagatttagaaaaaggaaacaataatcaaaggagtgaattcgatagttaactggtccatatagtaacaaagtctagttctggcaatagcaatatatcaatcataagttcaacgatcaagggttcatgatctagtgacctcatgaaaaagagataattcagcaacaagaaaaagagagatttagcttatctcaccatctttaattaaattaaatttc

SEQ ID NO: 8676 - DNA, 3347 bp, Arabidopsis thaliana landsberg
caagaaaaaaatatgacaatgactttgagtctttgatttacaaaatcatggtacaatctaaaaccaaatgggtaaattaaattgtgttattgggtagaattgtttgttccaatgcaaacacttacatttttttaaaagtatgaaatcatcgttaattataaatgggccgatttgacccaataaagccttgataaaccgggctaagccgtctgaaacccgacccgggttgttctaactttttgaccctaaaacgaaagacccttctttagcacgtcggggttcgttcaaagatcaagatctgcagacatggcggaccaaacaaccaaagctgtgaataccttttcttttcttaaatcagctcaattttctagtggaatatacttcgttccccagtaagatgtttgcagaaaatggaattgtaatgtgtatagttacaacaggcttttatggagattcaagctagcatgattgaactcactgggaagctcaaacaggtgaatcctcactttctttgtatttatcaagttttagaatcaaacgtgacacattgtataagggtttacttgtaatttgttagttcttgaactgtgtttggttttataatcccttctttcatgttgtgtaatgacaaaattggctttcctaggttattgtcatgtgttattgaaaaactgacatgtaattttcattacatgttattgagagtagtgtaatgacaaaattggctgtcctaggttattgtgatatggtgttgaaaaactgacatgtgatgtggatgggttttatttataggtgcagaatcagatgcgcaacaaagagggagatagaaagcgagctttcttaaccttggaggagctgaggccattgcctgaagagacaaacacctacaagtcaataggcaagtgattcaattctctggttttgagacaaggactagtaaagttttggtctaatttgtgttttattcttgttttcaggcagaacgtgagtggtggttatttagtcagtccaactagagggcctttagagaattttgaaggctgattatagttttgcttcattatatggtgaaacaggtttgttttagagcccaagacagtgctggagggtgaacaagagcaaaaactcaaggacagtgaagctgccgttgcttctctacaggtaacattgagacagtgaagctgccctctttcaatgtcttattgggttattaggagatcattgagatgctggttatctaacatgttttgttttcgggatgatttttagacatccaaggaatacttggagaagcaggtagcagaggttgagaacaacttgagggagctgttgcagcaagaaccgggcattgctcaacagattatgtccatgtctatgtaacttttgtattatcccaaacctttgagtttggagagcttttgggattgaaaccataacatgttctagttaaaagtttgtaacattcaaaagtttttgttcgatcagtattgttttaaagcctctggtctatgatattgcaaaaaactgagatttcttatgcgacaacaaatgcatgatctaactaactcgaaaacaaaaaatttacaaaggatgaggtctctctatgattcttcggagagaaaactaccggctttcgttgtccagatgagaagactttgtttccggtgtggtctggctctgttttcggtgtgatccggctcatatttcgggtatttgttgcccctttttgtctttctcatgaataaattgtgcagtctatgtcagtatcatggttttaggctgatcttctttgcctaagatcagagttgaatgaaagcaagcctatatttgataatttccttgaagattgaaaagcgcttgatcgaagaagaagatgaagaagattttcaaatttccattgtggagtcataatctcatcaaagctaaaatggaattcgctttgtttctttgagtgaagattaagataagtcgattgaataattttccggcgatcttggccggaattgaagctttctgatcaacggagactctcacatctttaattttgcacgtgtcttctaacctgtttcctgcttgctacgtgtctaatataatgcatttaagcttttctttcagtttagggttttcttattggactttgttttcttttgtttggcttccttggtttagtgtttgtaaaatattggcatgttactttggctttctatactaaataaaacacacttttgacaaaaaaaaaaaaaaaaaaaaaagactacaactcgagattgcatctaacattgtgaatatatataaatttaacctcacacaatctaaacacaagtagatgtaatatatattatgaattcagtgaaacaatagttaaaactcaagttgatcaatcatcaatagcatgtgagcaataagtgtcaaaagagatacacatacacatcaaaccccaacaaatacattccttcatgtacactgattttacactacctcttcaaggaaatcatggatcataatgtctatcggcatctaagcaagtccacttaacatatccatagtgtgttggcttctacgtctaaagccgttccccaaaaattcaagattgattgacgtatagaacaggaacaagtcccgccatcttcccatctcttccaggccgcttcttctttacctgtcgtagtttataagttgatcccggttagtttacggttttaaaaagctctactcctcacaagattttagtaaccaattactacttacgtaaaaccagccatcaacttcatactctatctccaattcctcttctgccgtcaagtttagctgcaacatacccatacgtgttttaacgtttgcatatatcatttttttcaaccgtatacaaaactaaatgaataaaagacaaaagcaagcttacctcatcatctcctcctgcagtgaagtcatagagcgctgttccaaatcttgtaccagtagatttcctaggttcttcatcatctgattcataacttcgagaaccagaccctgctacagggttctcaaacgattcacgactttgtggctcagaatacgaataaggcggaggaggctcttctctaatctgaaagagagaggagaaagaagaataagagatggccatgaaaacagagaaccagcccattttacacgacaaacacacaaaataatatccgcttactggggaaccatagccttcatatgtggactggtatttacttccacctgattttgcctatatgagttacccacattcatatagttaaaattagctggcacgaaaataattcataagttcttcttaactgaatttgtgtggaccctcccgttgcctgttaggaagggtt

SEQ ID NO: 8677 - DNA, 591 bp, Arabidopsis thaliana landsberg
actaacgcaaaccaaaccgaattaagacttacaaatatgtatcagacacaagtttcttatctagaatgaaccgcttcttaccaacttctccgtttgttccctggcaagttgaacttgaacagattcaaagtttttcctcagctcttcaattatcatattcagctcctcttctttgtttttcaaactaacctctgtcatcaaattgcacaaagttcaaaaactgctaacgaaaaaatcaacaactaaactttaatgtgtcaacgcacccatgtcaacacaatgcttctcattcaattccaatgcgttcttcaacttctcttgctcaaaagcataatccaactcaagttcttgaaaccatctaatgcaaagtctaagtctttttatataatccatcatattctcgcatctctcctgcaaaatcaacattcaaattcaaaccaaaagaccaaaaacacataaacaaagtcctttaatgcttatcaaatagacaaaactattttggtcccacaaattgtcttataacaacaatcaaatcttcttcaaaaaaaaacacacaacagatcccacgataaaagccagtaaagcttactg

SEQ ID NO: 8678 - DNA, 1728 bp, Arabidopsis thaliana landsberg
atgcagaagattctcacatcaagaagttgaaatccaaaacaaactcgaagttgctcctgcattgatttccgttcatccatctcagaaatctgtcgctgtcgctgtcggctcggatcttcgtattttcgatcttatgtaagttcattgcctccttcataatcaaattcgaacatgtctcttcatagattggtttgttttgaaaggataattagacttgctattgacttgggttcagacatcggaaccttgaaacttctcttcgtgtggctttgtgaaatttaacaagtttttgacgaattttgttatggtgctttaaagctgattcaattgaattttaatcaccaatacaaatgtgttaaacttggaatagaggaatgtttagtttatctagttaaccgattgctttaaatgtttaaatcgacagagagaattgcccagttagtttggtggatgaatctgatgggcctatccgtaaggaatccattagagctattcggtacagtacaagtggcgagctctttgtgtccgcaggcgatgacaagcttgtcaagatttggtccgcagattcttggcgctgtcttaacacagtgtaagttagttactacatatcgtaataattactatgattaattggtggtccatttttagttttagttttcacgcattgtgtttctagcattgcaattccctctttatccaaaacagactctatgcttatctcatgtttcttaagcttataatatcatattaatggcagatgttctgagaaaagagttagcgcagttgctataagtagtgatgactcacatgtttgctatgcggacaagtttggtgttgtatgggtgattgagctggatgggatcaatgacggtaaaactttacctagtaagaagggtgcgctgctgctttcccattattgtagtattattactagcctggtaagataaagttttgtcaataggcctttcttatatgttgtctcgttttttttgcatgatgaaaagctgaagttttaacttactatgtcactcattctgatctgttcttgttcataggagttttctccagatggtagatatattcttagtgcagaccgggactttaagataagggtaagctagtctaatccactaatgcacaatgtcatacctttcttgctcagattggtcttatagtgattctgtttgccatcacaggtgactgtttttcccaagaagcctctagaaggggctcatgaaatacagagtttttgtcttggacattcagagtaagttagagtttaaagcaacatctaatctgatcccaaatattctgtttgcattcttaatgtttggtttctacgatatttatcaaagcgctgtttacaaaatggaagattgtaaacaaagctgagagtattgaacagaaccattaacattatcttaaaccttaataggttcattacctgcacagcatttgtcagcactccagagcttactcagggatacctcatgtctggaagtggagattcaactgtaagtgatcttaaagtctatatctccagttcttacgaccagtgagtgatgattgactccttgctaatgttgttaatttcaggttcgactgtgggacattacatctgggtctcttctcgacacatgtgaagttagtacagtggtagaaatttcgatccttattacattcatctgcaaatttatctttatatatctggttgtggatctctctagc

SEQ ID NO: 8679 - DNA, 363 bp, Arabidopsis thaliana landsberg
gaatccattttataggtgtgcatttttgcatatggacaaactggatcgggaaaaacttacactatgttgggtaggccaggaaacgtcgaggaaaaaggtctgatcccgcgatgtttggagcaaatatttgagacgaggcagtctcttcgatctcagggttggaaatacgaactgcaggtatttttgtagtcctctctcttttaagtagcactaagtaagatatatccttgtgattagaatatatgtataatccttctagttttgtatcatatgtataggtatccatgttagaaatatacaatgaaacgatccgagatcttctgtcaacaaacaaagaagcagtaagaacagacagtggtgttt

SEQ ID NO: 8680 - DNA, 1423 bp, Arabidopsis thaliana landsberg
cttcattgagaattttcttcccaagttggggatcactgtaagaagatttccattgcatctaaatggttaagtactgtcttcctttttccaattccagtttttcaacttgattgtttaacatcatgtttatgtccaggtcactgtgattgatcctgctgatatcgcagggcttgaagctgcagtgaatgagttcaaggtcagttctgtaacattattgtcctttttacagttggaaagagagtatgtgtctcaaatttattccgacttgtctggcaggtatctctgttcttcactgagtccccgacaaacccattccttagatgtgtcgacattgagctagtttcaaaaatatgccacaagaggggaactctggtttgcattgatggcacctttgcaacacctctgaatcagaaagcccttgctcttggtgctgatcttgtcgtgcactctgctacaaagtacattggaggacacaatgatgtgagtaaaacatgttccatatattgtaaaacatctcaaaagagcactcactggttgtatagttattaacaaagattgtttctcggtggtttaggttcttgctggatgcatctgtggttcactgaagttggtttcagaaattcgcaatctgcatcatgtgttgggaggaacacttaacccagtaaattacttgactgtctcatttatccctcttattatgctgttaattcatgaattctcataaaaggtttgttaacagaacgctgcgtacctaatcatccgaggcatgaagacattgcatcttcgtgtacagcaacagaattcgaccgcttttagaatggccgaaattttagaggcacatcctaaggtatgcaatatctcttttttgagtaaatatcctgacactatccaggtgagtcatgtgagtaaatatcgatgcaattttgatttgcaggtgagtcatgtgtactatccaggccttccaagtcatcccgaacatgaactcgccaagcgacaaatgactggttttggaggtgtggtcagtttcgaggtaatatgatctatcaccaacctaatctctatctactccagattagcatctaagtatgatcctgaacaccttgattatctttcttgggtagattgatggagacattgaaacgacaatcaagtttgtggattctctaaagattccttacattgcaccatccttcggtggctgcgaaagcattgttgaccaacctgctatcatgtcctactggtatgtctttggcaaaatcgaacaaagttatctttgattccatatgcttccgtctttgacaaaatcgaacaaatttccgatttctaatgggtggttttgattacagggatctgccgcaagaggagagactaaagtatggaatcaaagataacttggttcgtttcagctttggagttgaagact

SEQ ID NO: 8681 - DNA, 1771 bp, Arabidopsis thaliana landsberg
gtattggttcatcgcaatgtctagccacggttttatgtttccattgtaatgaatcactcctgcatttctgatttcgtccatgctcactcccgggttatagcctaacccaagtacatgccatgatttgtccaatgatttcgtctttgaatagaatgtgatcaatcccggaggtagagttcccaatttccagagagttctgtcttcattctgctcggaaaacataagaaccaacagaagataagtacctaaaagagctttgacatgtctaggttactaaggaagaatcatacattacatagttaaacaatggacttaccaggttctgccagtaatggtattgatcggtgcacttctcgcgtctccaggcattgagatcgaatatgttcattccaaaggcccaagcacaggcactggggttaaagttctctttgatcaaaggatgagagaagtttaagtattgaccatatcgatgaaaagaaccaaaacatgtctcaacggctccattcaccttgccatccaagttgattttccataaaccagtcacgtctttctgcaccacaacatcatcgtccaagaacaaaatcttattcagcttcggatacatctctggtaagtaaaatctgagatggttcaacatcgagagatacttggggttcttgaacttgaggttatgtgaatctttagttgcgttctcagcttgattctcaaagtaaaacttctgcaacttggcagactcaagctgcctcaagaccggcgcataggaagagtttaagaacttgaaatcctccacggatttgatctcaacatgggcaccacggtccaaaggacgcatcttaaaccacaccttcatggctgcgagattcatccgatctgtcaccacatggaagacatgcttccatggctcctcagcgttcatcacaaccgatctcaccacaacagacacagcaatgacattatcagagaaaatcgcatagtggtaaagagttggatcctctgcggctgggtcaggtggagcatccttgtacttctcaggattagagatcctctctcctacaagcctcatggccaaacaatgaagacttttaggaaccgacttggctgaaatcaagctagcaaccgcaccgtttttcttagcctttgtcaactgttcttggacagcaaagattgtatctttcaacttctggattttaagctgtgtatcataactctctttagactcaacgatcatcatcctcgctgtcttcaccttatccttcacttctttctcaagctgcctaaacgaatcctcctcaagagcattaccattatcagacacagcagatttcaaaccaggtttcgactgcaaatccgagaagttgatagccaaatcttcgaagagcttaagctgcttagaagcatcaagctttagcttcctagcgtaagcagcatacgcattcaccagtgtcaaatgatcaatggcttgcttgtgtatcagatccaacctagttttcaatggatccgattgcaaagccaaaaacgtcctctgcatatatgcgttgcccatactcggcaatgtctaaaaaccagacagcaaaaatcaaagctcagattcaatgaaattgccaccgattcatttctaaatttgttcgaattacaaaatcaatcaaaagcagagaaataaagaaggagctcagagattgagagatgcgtacatgatcctgatgaggctgatgacgagaggagttaagaacgacggagaaagtggcgaggaagagaaaagagaacaaagcgg

SEQ ID NO: 8682 - DNA, 2177 bp, Arabidopsis thaliana landsberg
agttttgtccataaatgctccaaaccatgtttgcatgcatagtagtgttcagaacctcgtgtttgtgtttctctttctttgaaattttttaaggcaaacatggagattctacttaaattgggagaatcaatcccattaattctacgtaattaatttcacatggttaatttttctgaaaaacaatttttctataagtaaattgttagctgcacactgggataaagcaatcaggagtaacgtgattgtgtagattccctataggtaaatgaaccttatcattttccctcgcatttttttcggatctcatgtgcacgacgatgccatttaattttttgaccacttttaaatccgtcaataaatgttacatgactgggattccaatgatgtgtatttaaagcgtgaccccaaggtacagatgagaaagctttaggaaaaaaaaaatcaaatacagaagagaaacaaaaaaatggaagcagcaagaatgggttttcgagctaaaactctccctcaccttggcaacggtactcgacttcctcttaagaccaaactctcgctctttcctatgcatttgcttcaaaaccacactactctttcccggagatcaacaaaactcaacttatgtgtcaagggttgtagtaagactagtggtgttgagagtagtcgtcccttgcctcacagtgctcccgatctttggggagatcacatcctctctgtccccaccgaaaactcggtaagtacctgatctgatgaatgtgtttcataatcagtcgttattgtagaacattattctgagcactgatattttgtaggaatttgatacactagagacagagattgaatcaataaagccgaaaatgagaaacatgctaatgtcgtctcacaagactgacaaagagagaatatgtctcatacacttgcttatttgccttggtactttccattactttgagaaggaaattgaagagattctagaacaggcttttcggaagttggacatgctatttacagacgaagatgatttggagacaactgccatcatgtttgaggttttcagattatatggacacaagatttcttgtggtaagacatgcagttcccattattaccatttttcaatgggatgcatattttataccattacatatgtatttagctatatacatatataacatatatatatcctggtgtcaatttagatgtgttcgatagattcaaaggtgttgatgccaagttcaaggaacatctagtcagtgatgttcggggaatgctacagctgtacgaagcagcgcatctcgcaacacccttcgaaactatattggacgaagccttgagtttcacaaggtatcacttggaatctttggccggccaacaagctacagctcctcatatctcaagacatatacttaacgcattgtataaacctcggtttcttaagatggaaataatagctgcccgggaatatattcatttctatcaaaaagaaggtcatgatgagacattgctcaagtttgcgaagctcaacttcaacttttgccagctacattacgttagagagctaaaaactctcaccaagtatgttggcctacttttattcatatttcccggtgaatttcttatatgtacatcctttagtactttaccaaaactcatgagattccgactaaaaacagagagataacaagtagatagatttatatatcttatacattaatttagatctcatcttactttaggcttgacctgtaggattgcccatctcgaattaaatccctcttttagattttttttttttttatcaggcaacatactcatgtcgggtcaattggaataacatctgttatcatataatttttagtgagctttcaattcaaaacctgtaggtaatatgttgattggtatgtgtcttttatattatattttaatataatcttagatgtaagattcttataatattttctatttaatgtttttgtggttgaagatggtggaaagacattgatcttccatataagctaccttacatcagagacaggcttctagagacctttatcggtgtcatggcggtgtatctcgagccacactattcacttgggagaattatagccactaaagtttcccaagtgatagtagttatggatgacacctgtgatgcatatggaactttctctaagtagaag

SEQ ID NO: 8683 - DNA, 1200 bp, Arabidopsis thaliana landsberg
cacaggaagatagttacacattttagatagtgtcgacttttaacttattacactttcactacatgctcgctacttctgatgccaaacttgagatgatttctgagcttcagaagaaggctctactcccgtagaaaacacgggagctagcactctttggcgtctgctgggacgagcttgagttctctgattgggttgggctatcgatgtccaaaggaagtttcatcttagccagtgactcagtgaattgctgcaagctttttgtgtacatgtcaacaatatcttgttgcactaccttttgctctggttcaatgtgcactgtcagaaccggtttcacaactgcttcttcatcagtcttatctaaatcaccactcttgatgatatctgttggcttcttcgcttcttgttctgaatctgagttgtttccttcactagattgctttgaaacatcatgagttcccgaggagccagagctaactgcagttgatggagatgagattccatttgttgagacagtattggccggtgctgcttcgtcaacagcagtttcaacaactgcagacaggatgctgtttacttccacaaagccagtttcagagcttgcaaaatcatcagaatcagaacacgtagtggagaagtacttagacaccatttgattgttttcacagacaatctttggatccaaaaactcactctcatcaaactcgataggagccaactcggtctcatccgcagttggaaccgcaggaatatgcatcacgtcaggcgaatctcctgcgtacgagagagacaactcgacaaaacctgcaggagagtgatacaaatcggttgaagaaagggagaactctttctccaatttcccattcctcacaatcacttcagacaaaggtacaagagagaatccaagtaactgatcctcaagataattcttcacgcggctcatcataaatatctcacacttaagcgaacaatccaggttcttaacgtcgaactgaagggtatcgtcgaagacagggttttgccctccaccattgatgatctttgtggacaaggagttttcgggatcatttgtgagacaaagcttagcatacacatcttgcttatgatagatacagatgttgtggatgtccctagcttggtgaacaaaaacctcaagcacaccgatgaaactgtctgaatcagacgacatgactatattctttg

SEQ ID NO: 8684 - DNA, 1066 bp, Arabidopsis thaliana landsberg
gattctccgatcatcgccgctgattttatatttatcatcatgtatagatttgcaggttttatttttttcgttgtgtgtttttgttctttgttaaatttaacctctatgcatttgatgtacatgtttttgtgttggtctcactttctcttattctgtataagctaagctaaagtctccatggttagtgtctgtttagtattaaaatatttcaatttgctaattcttaatgtttttgtgatgatattgcagagattttgtaggtgacaatcaaaagtttgacaaaatggtaagacttttgttttttttaaatttatttacattattactatgtggatacaagcttaatacgattttatgaacttgcaggtgaagtttacagctgatgagcttcgaaggattatggactacaaacacaacatccgtaatatgtctgttattgctcatgtcgaccacggtataatcttcatctctttttttgtactattcttgtcagttttgatctcttgtttgtttattgaatttgctggtcgaattgtaatctgaatctaatgcatctctttattatactaatgtttatagtctgttttgaaattaatagcgtctcttatctgttttctgagtttgctgaacgtttaaaaaagtttaaactaatgcatctttatttcatgatcaacagggaaatccactcttactgattctttggttgctgctgctggtatcattgcccaagaggttgctggtgatgttcgtatgactgataccagagctgatgaggctgaacgtggtatcactatcaagtccactggtatttctctctactacgagatgactgatgaatccttgaagagtttcactggagccagagacggaaatgagtacctcatcaatcttattgattcacctgggcacgttgacttttcttctgaggttactgctgctctccgtattactgatggtgctcttgtggtggtcgactgcattgagggtgtgtgtgttcagactgagactgtcctacgtcaggctcttggtgagaggattcgacctgtcttgactgtcaacaagatgg

SEQ ID NO: 8685 - DNA, 1934 bp, Arabidopsis thaliana landsberg
gacacaacgtccactccatgcttagcatggtttagagactggagcatcgtgataagtgcagacctcgcgtccccttcctggtaaacgctggtgcagtaattatgcagctcaattacgtttttgcggtctgtttcagtcacttcgtccatcacgttcttgaaccagtcaaacgacccctgctctcttgtgacccagtagaagtaagctctcttggttctgaacgtctcactttttcttgatggagaaacaggaggtgtgaccatattatggatcggtgactgtcttcggttactgccttcttccacgcctttcaagttattgattatgtcactcactatgctgatcatcggagtggcaccgattcctagacccactagcagaacaacttcaaacttcttgtagtcttgtgctggtgctccatatggaccatcaattaggattcttggaaagctaagggatcacaatttaaagaaaaaaatgacctagttagagactgcatatgtatagctagagtataactgaattatagttagttactgataatacttactcagggatgtaatcccagtgcttcgagtcggctctgttcagtctgtgttcatcaggagggcgtggcttgcacacctgtggttcagagggagttacatacttggaccaaaataatatcttgtgtttatagtctagagtggaaatggagtaaaatacctcagagaataatgatcttaattgcttagtccagtctcctaaaaccctgatgtggacactgaggtagtcatctcctggagctgaggtaattgagaatggatgcctgtttataagaaaacaaatgttcagttttgttccatacaaatgtcttcacataatatgagttttttttcctcatttaccattctaatgtagaaactgcagaacagttgagatacatgtattgtccactcttgtatctgaagttgcttggtcttgacaagtgaagcgacaagacattccctggtaacacagcaacctgttgaaaatgtaaggtactaatagagatgaatttacaaagtcctccttttcttggatatatcaatatagaaatgtttatagattccacctttagcactgaaacagcctcgacgcttgacctgaatgcacgaatcagcctttcacacaagtaaagaaccaccggtaccatcaaatacatccatgtctattagatcacatgaaaaccaaaattagagtccatattccaactctgtaatgggtctaatggttaataagttactaaccgttttcttgtaccatggctcgatgatgaggtatacgtagaatccatgaacgacaagaagcgagtagacgataacaaataagtggtgagagtaccagaaggcattgaagcctgttattttcttcagtggtccaggaaggttgagcttattacgtctgaaccatgttgtagccaatgtaaaggctatggtcattagtacaaccattccaatcccggtaactccttctaccgattgaacaaagtccaaatatctctttgtctgtggcccaaaatacttctccattggctcatactgatcttcgtctgcagctatcagtcgggggaaatcacatgctaagtgagatgtagcatggattccaactccaactgaaattcctatagctatgacctgtgtaaggttcaatcataagcattcttctatatatataggaaacttcttttttatactccaggaagctaaaacattaccttgtgaaaattgaggctgtcatcgaaaggaacaatagcacttaacttggttttggtccgcagccaagtgatggagttcctacaaactggctacaaaatcatagccatgtttagtttaagcgtctctgcagctcctttagctatacaaacacaaactcccatgacttcgtaagcggatctttttcgatactccataaac

SEQ ID NO: 8686 - DNA, 2766 bp, Arabidopsis thaliana landsberg
acctaataaggcaatccggggaaaaagagtgataaatgtgttcaagagaaaattagtgtatggtttaaatacacatcatatacacaagacacgattttgttacttggtgaagcgagaacgtacccaaaccaaaatagatattttggcatttcttgttgtcaactattgggaaaaaataatagattagacgtactagtgtagttataaattagtagttgacatgacatgggagaatacattatggaaggaaaatgcagagtgaagaacgtgtggggtcgagaaacagcagacaagtgtgcgtggaccatcaccgctctgtttttgtgttgttcgtgaaggtcgtgccctaaccgcaaccccaagccgccattgccgctaactttaacacgtggcgcttccccatgtgatttgtcttttaccgccacgtcggcctagcccacaatcgttcttcattgtggtctagataaagcccaacagcctccgtgggctctacccggaattgccgggacaaaactttaatttctcaaaccaaaaccaaactaacactttgtgcctggctcttgtagctcgtgtggtctgtgaaggtgcaacatatgatgtgtgtgatgctcgagcaaggcacagaaagagaaagatagatatagaccaaagaaaaaaacagaggataaaaaaaccaacactttgtttgcaaaccgattggttgtgcctacataagccataataatcatatccgcatctaagcaagttcacggacaagaaaagaaaatggaatatttacattcaattaaaagcaagaacaccaaattaagtcattgacgatccaaaagtgttttccccactgtaggtaacatacaagaagccgtcttcttccttattctcatcgtaaatggttgacatcatcgctcctgcaattgagtttccaataataaaaaccaacaggtttatgtaaggactaaagagttgtttaagtagagattgagaggaggagacagtaccggtgggaggaagatcattatcaccaaagatgaagatagctttctctgcactaagttggattctcttacgaatcacatacacaaactggcctaccgttagatcagctgggacaaggtatctgtaaaatgtaaaatccaaaacatgaagaataagcaagagagactccaatgttaagaatcagatttgatattataaagaaaaagaggatcatacttcttcttgtcaatgtttgggatatcacttttctctgacttctccacaatcacctattacaaaagagagacattaatataaccatcttattctgaaactatgcattgaactctcaacaagaaccacatctatctatcaaaaagtgttatttttgcaagatttcaatcaatcaggcctcacaagagcttctcaaatagggtatattcctatgtgagcaatatcaggaaaactaggaaacagaacaaaatcgatggcagtgacataagaagagagtaagaataccgggactctgtcagaatacttctctctgatccttaaagcctcagctttcctcttctctgcaatataaatcaatcatcaaccaatcatactaacttaaattactggaaaaaagaagaagaagatttatataccgaaatcatgatcctgcctgaagctgacgttactcatcttcttttgattcctgaatatatataacaaatttccagaatcaccaacccaaataagaagaaaagaaaaacgataatttaccaaatcccaacacaaaaccctaatttttctactacccaagtcgtaatacacttatctctgtatattcttgtagaaatcaaacataaattatatgcataaacgaaatcaaatcggagaaaacttacctctctggattatgcgacttggttaagatcaaaaactttggattcgactttgtgtgattcaattaatcttcgactgcgatcgtcacagttatatgtgtatatatacaattcgtgtaaccttttccttttttgtttaccgaaagattatcgaattagtgaatgacacgtcagctgataatttaatttaatcaatgcaaaccaaaaatcgaggtaaattagcatgatttaaggaaatgtttaagtgatgttgttaccaaatacaattgtagtggttatttatgcactaaggcccataactagttaataataactcattactctatgaagcccattataagccttccgtatatttggtttgatagaagataagaagcccagcccatttcgatttatttgttttggtggttcagctgagatcaaagcagcatgccatatctaaaccaaaaaaaaattctgtattaaaaaagttcaataactaaagttcatggacaaaaaaatctacattgttgaatgttgatcattcaaatttgtaagatcgtatacttcaaatatagttttaaaagattgtatatcataatccttgacttcaaatcaacgatggatcaaaactagctttttttattgaacttttaatagtcaacagaattgaaaactgatttatgatagtcattaagattctagcacaatatccacactatttccaggctcgtagcttacgtaacgtaatctatatggttatcatatacttttgaggaactctcccagtaattaagtcattgaaaaccagtagtgccatgcggcggtaggactttttcgtctaattgttttttgtaggttaacaatggttcaaacactaataatttatatagtttcaccaaacaattaaagaatatactacatg

SEQ ID NO: 8687 - DNA, 1201 bp, Arabidopsis thaliana landsberg
actccttgataatctacaaataaccagcatttttgaatattatatatataacatggctaaagggataaatgtagaagagggaaatgatctatctacctgctcaacagttttgccagttatttcagatggcaactttggagaaccagccactggagcaacagctgtgctcgtcctaataaataacaagaaacatattaaagtaacatcagcaacaacataatcaaggtgaatgtagaacatgtacagccgttttggtcattatgtgctggtcaaaatatgaaaaaagcatacccactacttgaaggaacaacaagagttgtctgtgttgtagtagcagaactagtagcaggagcagtagtagaagtcgaagatgggagacctgaacaacaacaatatttccttcagaaagaaaagaaaaaactatagcttctgatcggtaaaacaactgggcaggtatatatgtattcatgtcatagactataagcagaaggcaagccaaagcataataacgcgtatatatagattaaggtagatcaagtacatcgatcacatatctaatcctaatcaatgattcccataattctctaaattgttattcctaatcatcgtagcaaatgggataggcaaaatcacaaacaaatcctgagacaaaacataaaaacaacttactgaatgagaatgcaggactagtagtttgtggttgtgaagatgatgcaggtgttgatgtcttcggtacagcaaacccagtaaaagagttcgtagatccagtggcaggagtcgagctagccaaaccaaatcctgtagtactgaatgtagcagcggagctagccggagtggtgttggttgcagatgaagtcacaccaaaagaagggaaagccattgtagaagcgggagctgaagaagctggtgcactagtagcagccggagtcgaagaagaagtagtagtggtggttgcaatggaaaacactgctccggatgtgctagatgcaggtgctgcggacgttccggttgaaaggttaaaacctgaattggcggatgtccaaatgagaaggaggacgaagatgaagccgtttgtggaggacagaaggagtggtggagctggtggtcgacttgcagtgcttttcaagaaagagaacccggtagaagcggagaatggagaactgaggcattcgagtatggatgtgatgaggattgaaggtga

SEQ ID NO: 8688 - DNA, 231 bp, Arabidopsis thaliana landsberg
gaaccctaactttttcgaatgtgatgaatgagattttgccccgatataaaaaaatcatcagtataaccaagaatgtgcatcatcaaagttttctggaatatattagatcgattgagaatgatgtatactgatctttggctcgcttttgtgccaaaataagttagtcaaatgaggtcaacatgatcattgattaacctacgaatgttcgtagattgttccttacaaaaaaaa

SEQ ID NO: 8689 - DNA, 1516 bp, Arabidopsis thaliana landsberg
agaaggttcgatgaaggttcaagccgttgtggcttgggctgtttcagagcttgtttctggtaatcacgccaaatgtcaagaactgtttgcgcaaaacaacgtgattaggcttcttgtgagtcatttagcgtttgaaacggttcaagaacatagcaaatacgcggttgttgcgggtagagcaacgtcgatgcatcacgccgtcgtaatggcgagtaaaatcagtagtagtaaagagaatttaccggcgttgaacgaggaggaggacgacgataatcatatcggagtctcgagtccgatgacgaatcagatgcatagcatcgttgcaacaacaatggcgatgaaagcggttggatcaggatcgaaatcgaatctttctagccgatttgttaccggcgacgacgataaacccccggaaaagataccggagaagagttatagtatgagttcacagatcaaggcttacggtagtatcgcacatcaatcgcgaaacgcgtcggtgacgagagggagagagcttgaagatccggtgacgaagacttatatgaaagcgatggcggcgagagcgttatggaaactcgctgtaggaaactcatcgatctgccgagtcatcaccgagtcacgagctttactctgttttgcggttttactagacaaaggagacgaagagactaagtataacacagctatggctatcatggagataaccgccgtggctgaggaaaacgcagatctgagaagatccgcgttcagacgcacttcaccggcgtgcaaagcggtggttgaccagttattccgaatcgttgaaaacgccgacgccggatccgatttactcatcccctgtgtaagatccatcggaaacctagcgagaacgttcaaatcagcggaaacgcatatgatcgtgcctctggtaaaactcctcgacgacggagaaccagatttagcggcggaggtagcgatcgcgttagcgaaattcgcgacggaggataactttttagggaaagaacactcgaggacaatcatcgaagctggaggatcaaagcttctggttcagttagcgtatttcggagagaacggagcacagattccggcgatggttttgctgagctacgtggcgatgaatgttccagacagtgaacagttagcgaaagacgaagtgttaacggtattggaatggtcatcgaagcaagctaatgtacttgaagatgaagatatggaagctttgttgtatgaagctaagagcagactcgagctttaccaatcaagaggatctagaggctttcacttgtaattttcccattgaatgaattattagaaaatactaggatttgatttccacgtgtgttccaatgattttttatgtaagcgactctgttttttaaccactatcaaaaagttgtataaagttttatttttcaatacctaattttgtgtattgacaatgagagatcactgatcaccaacattttgtagttttgaaaagcataagcaaaagctgcaataccatagccctgaagct

SEQ ID NO: 8690 - DNA, 1372 bp, Arabidopsis thaliana landsberg
tatatatatatatatatatatatatatatagactgttataagcttaaatatagactaattaataactccatgatgatgctagttttcagagaaaaagtttcataggatataatgtgtatttaaacgatgattaactaattaaaatgtgtgttataaagttctgagaataagtaattttttgttcgtccatggataattctacatatatacgagaatatctacaagtatcacaattttgaagctgaggaacatgtttccaatttacattgatattcagaaggaatgaaataacatcccatagtttttgtaatagcatgcataaagacgtatggtggaactggaactgggtaaagaacgtgattatgggttaggtccatatttttagttttttgctaacctttaaaaaggcaataaccgttaaccttttaatttgaaatcaagacagttggaaaataaaaaaataaaaaaatcaagacattcaaataataatgaacgatctttattttacacccgaattgtaaatttattataactgtaagggcctaaactgtaaataaatagacttaaagatttcaccggtcaaagtcacgagaacaagtcaaagtcaaacgttcaattacaacccataaccttcgacggtaacctcaccggcttactcgacgtcgccgggaataatcaccggtctcggcctccacgaagattccgcgacgttctgtgagaggcgagggtaaaaaccttctcgcttcacattcctactcgaagcctaatcgtgttccttcgactagattcgccggaatgaaacaagaaccctttatttcaatttcaaacggtgatttaacgcagatatcggaatttacggagcatagtgttgattatacacttggaatctgagtcattaataacttgtcttattgaaatcctggtgtttggttttggtcctatgatacagtttttaaaggagaagaaattcgagcaagttatacctccggcgaaggttgaagatgccaataatatcacgagcgaaatagctacaaatgcgttaaggaaaggggttaatttcttatcagcattgcaggccagtgatggccattggcctgctgaaaatgctggtcctttattcttccttcctccattggtatgtctctatctgctctaatgttctcatctctacaaggaactaagaacaaattagtgttttagatttgaaaaaagtaatctttgtcaaaaatgactgtacatagattctatccaagtttcagcagcaagtggcacagaggttattatccaatttccgatatttttgtttgtttgtaaaatacaggttttctgtctatacgtcactggacatctccatgagattttcactcaagac

SEQ ID NO: 8691 - DNA, 1211 bp, Arabidopsis thaliana landsberg
ttattgacataaataccccaaacctttgatatttattgaatttcccttgtatacatgaagaaggcaagaagccatattcaactgtaatctatctgctagatatatcgatcgctttgatagtagtgtggcacaatatgctatgtactgaaatcaaatccaaaactcaaataaaatactgatctctaagaaacaatcaatcacataagaaaatggatgcataaaatatcttacaattttgatgctttaacaacctgatggaagagctgggtcagtcactgttggatcttgagactaaattaaatgaaaccgaactataaaaccggaactggaaactcttaaaagaaaagtaacagaactgtgtcctaaagtaaatgttacagaactcatacactatccttaaagtgatctgtattcacaatggccctatagttctctctctataactttctaacctgtaaacgacgaaaactgagcagcacaacaacaacaacaacaacaacaacaacaacaacaacaatgacaatatgagcagcatcacaacaactgaccaaaggaagaagaagaagaagaagaagaagaagtaacaggtgaaaaagactttgaaaagctttgtctttttctctaagcaatcttcttctctcttgctgaaggcaaccgccattgtctatgccaatatacagaaactctcgaccacatcggaaacccgaaactatactcaagaggacgatcagccggtccaccaactatcaacggtaaccacaaatatctcgaatctcgcaaatccgccggattccacctatcggccataaatataaacacaccaggaacacctggtaacggaatcacgaacgtgctctgcgcgaaaaacgtcgtcgaacggaaaatactgttcccgccaacacatggattccctaatgtctcccacggacccattatcgactcagcggcatgagctaatgcttcgtttggtgcccatccggtgcaaccagacgtgatcatgtagtaagtgttttgatgtttgaagatagccggagcttctctgtgttgtcccaccatgattctcttcattaccggcttcacatcgaggtaattctcggtcaggggaccgatatgcagcacgctgttgtcctctgatgaatatatcaagtaggctacgttatcatcgtctttgtagactgtcatgtctctactatcaaacccgtgtggcgatc

SEQ ID NO: 8692 - DNA, 1797 bp, Arabidopsis thaliana landsberg
accatactccccaccacccggaatgtttgcaaagcaaaaaacttttccgttatgcttgctaagcacaatacggctggcactgaaagacggtgttatgcttatgttaaacccaccatatgcatagagcaaacatgggtgtgatccatcaagcttaatatcctttttcgccacaataaacataggtatttttgttccatccttgctgggatagaagacctataaagaggagcagaaaccactttaacatatgcaaagtaaaaagtagttatgaaagaaacaggaagacgctacaagagagtgtgttacctgaatggcttgaaatgcttccctgtcaaatccgggtacagtaacctcccggaataccttaacttctggagattcattggctaagtcacacttgtaaatcacaccaggagtgagaaagctagtaaagctaaagaaaaaggtattgtccttgcgccgagcagaaacatcagatactgaaccaatatctagaggtaattggtgaagcagtgaaccagatttcaagtccctaatttgcagaatatgctttacatcgctcatgtagcatgcgaccaggtgattcccattgacagcacaagctgatgctaagacatccttttcgtgttcttcaacaacatcagtccagctgtatggttcctttagatcaacccggactaatttgtacttaggggcatctttattcgtcaagaaagtaaacagagtctcatcatttgagataacactatattgcgcgtcaaatgtgtcaacaagcttaatgaatggaagaaaactgctgcttcctctgaaactctcaagacctcctgacaatgaagtcatatcgcagtagtataatttgttgacagggtcacaactctctccaatgctcatgatcagatactacaagaagaaataacattgattagacctaaaactaagaatccaagttccagatctacaaaactaggtaacacagtttgaagtcatgaccatcatttagaaaaagggaaacgatcaaaatgattttacgtaagtatgtgcagaaaaaataaatttgaggtttaagagcgtaaccatagttaaagaaccaacataagaacttggtgtgttaccttcccatcgtcagtgacttcagctccgaacatatatttgggattctcattatctctccagcataagatatcttgagaattgatccgtcccaatgaaatggtaatacagctcatgataaaggttagaattagtctcagtgccagcatcaatatcctctccttctctgcaaaacaaaaacagataaaattggtaaatcaacttagctttctgaactatatcgaaaggcttcttccaacacatcttgtacttacttgggagctgggtagcgaccatagaaaaatcctttactgtcgtgcgtccatgtaatgccggtaaacttaacctgttccacgagaggaacataaatctatcagaaatctggacggtagaactttattgatcaaccccactagtcagtaccatctttaagaccatacccatgataaagtatcaggctccactttcttatcctcgattttcatcagcttaatcgtcacccagtcgctaccacttgaactaagaccataggccaagtacttagcatcctcgctgacagaaaaggtgtttaaggccactgttccatcatcactaagagtgttcggatcaagcaaaacctctggctcagcatccagattatcctgaacccgaatgcaatcaaattcaatgagaaaacaaagctagaacagagtatgcactgatacaaac

SEQ ID NO: 8693 - DNA, 2754 bp, Arabidopsis thaliana landsberg
tcagaacttgtaactctcttatcttcactttcatgaagactctctacacctcttgtggaaacagcgttctttggtgtccctctggaaattctgacaagttaatcagcatggatgaacaaaatcttgtcttctggagtttagactcttcaaagaaaaatgcggaggtgattgttgctacaacaagagaaaggataaacccattaaatcatttttgcctcctgtgtttttagaccacctttgaggtactttccgcttaatcatcttttttgctaataataggttttatctaaggagtcagctggtatgcgtcattctttatctggtggagcatggaatccacatgatgtgaattctgttgcagcaacttctgaatcatctatccagttttgggacttacgtactatgaagtatgtcatatttgttcctctcttatgttcgcatgaaagttaatatactgtattcctgcatgcacagctagcgtgtttcctctagtcaatagtttgtcattattaatttttgggttccaaaatcagatacctttatgttgagcttgatatgtttgcatatttacaggaagaataattcaattgaacgtgcccatgtacgtaatgttgactacaatctcaagagagaacatatactcgtaagatttctctctctgtatgcaaatattttaaatgcttgtcaagcaattccaacaaagaattacacagtgctccaaagttagaaaacaatctgttatatagattgcaaatgggtaggaacaaggaagtaattgtgtcatttctgatttaattttttcttcatagcaagaactttttatctgaaaggtagtaggtcccctatttacagaaatggtatcagatggttctatttatgcattggactgtcgattgtgtaggtttctgcggatgatgaatctggtatacatctctgggatcttcggaagacaaagtttcctgtgcaagagctccctggtcatacacactggtaatttacctctaaactcatttttgtggattattattttttctcttccatgattctgcttcatatgcacacaaatctaatgctttcgacctgaaattttgtttctagcgtgactgttctttctgaattttctttacaggacatgggctgtcaggtgtaaccctgagtatgaagagctaattctggtacccattttctcttaccttttttctcttagcacagtcgaacgaatctaaattgttattgtgcttgtcactactgacagctttaagctgctagtcgatgattctagaacaatttctgtcactcacaatgtatatttaaagtgtcagtttctgataaattaaccaaacacagagcgttggaacagactcagctgtcaacttgtggtttgcttcagcatctagtgagcataaaacatcagaaaggttaattctctttattatcgcacacaacaatttttccaactttgttttgaacttttattctaatgccgatgctgtgcagcccggtggaagcatcacgtcagcgtgtgaacccgttactaaactcttatactgactacgaagacagtgtctacggtaactcttggaacaaactgagtttagttaccacaatttcccactaaaactgcatgaagtcactatataattgctgtcacaggccttgcttggagctcgcgtgagccttggatttttgcatcattgtcatatgacggtagggtaagtgactttgcttttgacaacaacctaaagaactatggagaactaagaaatagacgatttattaccccaaacaattctaaattctgaaagcagtttggagagttcatctcataattttggtgtttgcttatgttaggttgtgatcgaatccgtcaagcctttcctgccaagaagataggtcccgatggaagaaggcttcaaagaaaaagctgcattcatatgctatcatttaagacaaattttgaatgtttttataataatcacaacatcaaaactattcttctacagttcttcaacttttactcgtgtctttgttcatctctatctctcagcacaaggcacaaagatgtaaaaccaaccctcgtgaaaatactttggtacaaagtcaatgaacctgctgctataattcagtttattgtaaagaaaatatcgggatcaagtaatcaccggtgtcataatgctacacatgcctacttgttttccctttttctatagctactttctctggtaaagccacaattccgagtactaaaatatgactgaaaaaaattgatctgtcctcagatcctgataaacaaaacaatgctctatcgcgtggttctatgtacaggagacattacatgcaaaatggtgacaacaaggcttagcaccaaggttggaaaactcactgtgaagtgcccaagcagaggacagattcagtgtagtgatgtgaaggtcactgatgcgtatctaactaatctgatagcattgcttcaagctcaggctcatcagaggtagatggatcatcgtaatctaaacttgtcccgttgtataatcctctgtcctgaagatcactctgttcttcctcatagtctggctccgaccaatctgggtcatcctcttcggtttgatcatcattggttacagttactgctgcgtctttattagtggatttgtttttctttccaagttttctagattctaattgcgcctttgccttagcctctgtatcttcgcatatgcacgtggatgggttttcgtgaaattcacctctaccagc

SEQ ID NO: 8694 - DNA, 1866 bp, Arabidopsis thaliana landsberg
gttcatctgatccgtcctgcagtttaagatagataacaaacgaatgagggcacttttccttggctgtcaaaaggttcgaacatggtggatgtccagaatataaaattgtacgaaattttgagccagcaatcacctttagcagcttgtcttgctcaatagcttcttccctgacggtccacgcagaccaataagaagcacataaaatggtaccgacagccataagccaaagaaagacctcagccacatcaactgctggacgtttcggcgagtagagctgcagagtaactgaacaaatatagtcaacaccaactcaaagaaaaagagagagcacagagatgccaaactatgataagatatgctaaaatacaagaagagcaatctatgcggaagtacagtttgatttatacgaagaattacctatagcgttacttttgactatgttctccagacttctaccagcatcaacaggtagcataacaacaggaatagtaatatctaaaacgttttcacccttctcgcagaccatcttgaaaagatctgcaaagcaacattcaaccttgcaaaactcaagagggatttaactagaattgggaaataaataatcacttggaactagtacaagaggaggaatatatacagaaaaaagcctttagtgaattacctgtactgttgtttatgataaggatggcagaggcaccagctgcttcagcaaccttagttttggtggtaaaactgcatttaccacgatgaacaagaatgacctctcctgtaagctaccaaaagataatgaaactggaattacacaagaaggaaagatgagtacaagagagacaagccaaaaaggaaactttaccttatttttgggagtgctgcaacaatcaggagggtcagcaatagcaagtttgatgagggtagcatgtttctccttagattccaaggttgggccaaacctagcaccaacaccaacatactccgtgtactccgacccattgactcgagttgggactttcacctgtccatgaaattatatgttgtagttatatatgttggaagatgacatggcagggtcctaaacgcaaaccagatctatatcccaatttcttcactcacaccaaatgactccttattatagctaacaagaagcttgcaacaaattgaaagtccatgcgactaaaacgagggtttagttaggtaactcatggctatacctactctccctctattctgaatgacatcaaatctggaatccaaaagttcctctagagtctgtaaaaacccaatttctcaatctgctggcaacaacagatatagaaggaggaggacagtgagaaagcaatcaacagactcattccactaaaccctagtattacaatccaaagcctaaactaaattccaaattcctgaaagtcaccaagagatagacaagagggacaaggagataagagaaagagtaagaacgacagatcaaagtgaaatagatcaaaaatcaaaccagaacgaaattgttgttgcaaccaggtctctgcggaagcgaatcgtcgtggtgaactatgtctccagcacaaacgaaactagcactgtacaacaacaacccgaagacgaacgagaaacaactgagagatttccacaagatcatattccagactccacggaatcgttaaaaggagggaagaagaaaaagaagataaaaagattagagaggaaagatggagaaaaaatggaggaaggtacaatgaacgagagagagagaagagaagagaagagggaaaaaaaataaagtctcgtgggagagagagagatgaaaaaaggttggtgtcgttttaaagggaagtaaaagcttaaaacgctggctttgacttttttttt

SEQ ID NO: 8695 - DNA, 1841 bp, Arabidopsis thaliana landsberg
ttgaaaccactcatggctgcatctacttctttcttttcttcatcatcttcttcttcttcttcttcatcgtcatcatctggtttatcttctccttcaccttgcacatggagatacatgactttcacgagcttccatggaccagatgtccgcaacacatttcttagtcatttgaggaaacagtttaacaccaatggaattacgatgtttgatgatcgaaggatggagagaagccaaacccttgcccctactctcaagcaggcgattagagaatcgaagatctacatcgtcttgctctcgaagaactatgcttcatcgagctggtgtcttgatgagctattggagattttaaactgcaaagaaaaaagaggacagagagtgatgacaatcttctacggcgtaaatccatctgatgtgcggaaacaaaccggagaatttggaatcgctttcaacgaaacttgtgctcgtaaaacagaggaggagaggacgaaatggagccacgctttgacctgtgtgggcaacataaccggagtacacgtccaagacaggtttgtattttcattaaattacattttgtctttcttctgatagaatagaattgaaatcattaaggggattttttttgaacgagtattagaatttgtggttgaatgaatgatggatattagagatagatgattaaatatcccgaatttacaaattagaaaacttgtatataactttttatatattaaacgcattgtgtttttttttttcagttgaagaaaacaaacaatataaacatatagtttatgcattttaagtctaaaactgcaaatccttaagtctaaatttaaatgaatgatgtaaataccattttttttataatataaatcattaaaatatttaaaatttaatttgtaagtttattatagactaactcgttttttatcataaaatttactcgtacgtgacacagattcttacctagtgatagtaattataagtccaataaaattttgtaatgatactattattaatcactgtcttttagggacaatgaagcggagatgatcgagaaaattgcaagagatgtatcggaaaaactgaatatgacaccgtctagtgattttgatggcatggttgggattgaagctcatttgaaggagatggaggttttgctagactttgattatgatggagttaagattgttggaatctttggtcctgcaggtattggtaagacaactattgcgagagctttgcatagtctactactctttaagaagtttcagcttacttgttttgttgataaccttagaggaagctatcccattggtattgatgagtatggtttgaagttgcgtttacaagaacaccttctttcaaagattttgaaccaagatggtatgaggataagccatttaggtgcggtaaaagagaggttatgcgacatgatagtgcttatcattcttgatgatgtgaatgatgtgaagcaattaatggcgttggcgaatgacactacatggtttggtcctggaagtaggattgtagttaccacagagaacaaagagcttttgcagcaacatggtatcgataatatgtaccatgtggggtttccatctgatgaagacgctgtcaagatcttatgtagatatgcttttaaaaaaaactctctttatcatggttttgaaaagcgtttacaaagagtatcgaagctttgtggtaagcttccgttgggtctttgtgtcatgggttcatctttacgtgggaaggaggaaggagaatagacaccccccacaccagcttgtaactattcttaaaaaaaatattgaggatgtgtaaccctggctatacagttaggg

SEQ ID NO: 8696 - DNA, 425 bp, Arabidopsis thaliana landsberg
cttggcatattccttacagttcgacgcctaaaggagatcaagcgtttgtatctcccggacattttatgcttgcttgaaacaaaacaacaagatgacaagatccgtgatgtttatgtggagttgggttatgagaagtgcatctcggttccacctattggtctgagtggtggtgttgctgttttctggaagtcttattttcgtttctgttatttttcagagttcaaatcttgtagattgtcaagttcaaagtaatggaatatgtttttatttgtcttttgtgtatggaaatccggagccgagtaacaaaaaacaattatgggaaagacttgaaagaatatccacttccagaagtggtccatggataacaatgggagatttcaataaaatcaaggggaacgatgaaaaaagaggcggaccacgtcgat

SEQ ID NO: 8697 - DNA, 279 bp, Arabidopsis thaliana landsberg
gcacactctttctttggtcaaggagaagggagattaaattcacacacaaactgcaattcaaatcagtatcaaggttgcttgggcagaatatgattctcctgtttgcgaccaacaattgcaaaactgttgagatgtcaatcccagattcatcagtagctggattcggcgatggtctttttcttagattcaacaagcacacccagttgggatagtagatcctcctctccgattgttatcaatatcaagggcaggtgacagtttaattccactctttttgtt

SEQ ID NO: 8698 - DNA, 3146 bp, Arabidopsis thaliana landsberg
  unsure (1)..(3146): unsure at all n locations
cattccattagccctttccacctgaccattagctttgtgggtgtgctactgatgcatatttgatctgaatgctccattgttcgcagaaatcaaagaatttagagctagtgaagttggatcctaggttggttatgatgctatttggtattccaaacctgaatattatgtcttgtatgaattccactaccttggctaaagttagagaagcaatgggtttgtaatctatccatttggtgaatttgtcaatggcgaccaacacgtgagtatagcctcctcgagctttcttgaagggtccaatcatgtctagtccccagcacgcgaatggccatgttacaggtatggtttgcagttgctgtgctagtaaatgctattgctttgacaagaattgacaagcttcacatctctggactaactcggctgcatcactctttgctgtcggccagtagaaaccagacctgaagaccttcccnnnnnnnnnnnnnnnnnnnntgtgtatcccgcattgtccagcgtggacctcctccagaagttgcatctcggtagacgatagaatgcatttcatgaagatgcctgacgcgccccttctgtatagtgtctccccaatgagtgtgtagtgagccgactgtctggcgatacgctcggctgcatttttatcgtctggctcctcttcattctttatatatctgatgattgaccttctccagtcatcagagcttgactctggttgatctataatattacactcttctgcttgatccattgagatgctcggctgtggtatttcttgcacaaagactccaggtgggacctgagttcgactggatcctagcttggacaatacatcggctgtcgtgttccgatctttttctacataatgaaattccagaccctcaaatttatcttctagttttcggacggcagtgcaatattttcccattgaatcattcgaacagtctcattctttgtttatctggcttatgactaccaaagaatctccgtataccattagtctcttgatgcctaatgatatggcgatgtttagtccatggatcaaagcttcatactcggctgcattgttggaggctggaaataacaactggagggcatacttgaggtgctcgcctccaggtgcgatgaagagaattcccgcgcctgctccccgcagcttcagcgagccatcaaaatacatccgccatacttctgcagtttctgggttttctggtacttgttgttcagtccattctgatacgaagtcaaccaatgcttgagtcttaatggcagtgcaaggtcgaaattcgatgtcatgagatcccagttctgcatgcccacttggctattcggccaatggcttccttgttgtgaagaatgtcccctattggaaaaccagtaactactatgactctgtgatcgtcaaagtagtgacgcagcttgcgggcagttagaagtactgcatataatagcttctgaacctgaggatactttttcttcgatgggcctagaacctcactgatgaaataaacaggatgttgtaccggataggcatgcccttcttccactcgctcgactaccaacgcagtgcttaccacgtgagtcgtgcaagagatatatagcagcaaatcttcagccggttgagtcggcgtagctcgccggggcggttttagtactggtggtgttgtcaggaatttcttcagtgcgtctagagcttcttgtgcttctgaagtccattgaaacttatccaccttcttgagtagtttgtaaaatggcagaccttttcctcccagcctggatataaatctgctcagggctgccatacatccagtgagtcgctgaaccttcttttgcgaccgaggagcttccatcttcatgatagcttcaatcttatctggattagctcaattccccggtggctgacgataaatccgagcaactttcctgctggtaccccgaaaacgcatttttcaggattgagcttccatctatatcttctcaagctgttgaaaaccagctgtaaatcttcgatgaagttttctggattctcagttttgatcaccacgtcgtctacgtaagcctccacacgcttgccccagtgatcggctaagcatgtttgaatagccctctgataagtcgctccagcgtttttgaggccgaacggactggaggtataacagaaagcaccaaacggggtgatgaacgccgtttttcctcgtcttcttttgccaaactaatctgatgatacccgaaatagcaatctaagaaagacagcatcgaacatccagcggtggaatccacacctgatctatcctcgggagcccgaagaggtccttcggacagtgtttgttgagatcagtatagtcaacgcacatgcgccaatccactttattctttttgagtacaagaacaaggttggctaaccactcggggtgtaacacctccctaataaatccagccgcgaccaagcgagctaactcggcgcgaatggcctctctcttgtcgggcgtgaaacgacgtagtttttgccgaattggccttgcctggggatagaccaacagtttgtgctcggccagttctcttgagactcccggcatatccgcaggttgccatgcgaatacatctcggttaccttgcagaaactggacgagcgcgctttcctatttgtcgtccaagctggagctgatgacagcagtcttgcgttcatcagcgaaccccagattgatcctcttggtttcttcagtcggccgcatagaggtcgcggcctgagcttcgttcgctggtactgcaaggtcctcctcaggcttagagttcgccagtgttgaaggaaccgttgacggcttggtggtgagggctgcttggatggccactcggaaacattctgcggtgccttggaagtcggcgcgcacagttatgattccttgcggtcctggcatcttcagtatcatgtatgtatagtgtggaatggccatgaacttagccagccccgacctcccaaatgatggtgttgtacccgcagtcgaagttcgccacctcgaacctcaggaactcggttctgtagttctccggagttccgaaggtgactggcatgtagatgtggcccagcgggtattccctcttccgtacggcacagatgccgacagaaaggagtgtccgac

SEQ ID NO: 8699 - DNA, 2260 bp, Arabidopsis thaliana landsberg
  unsure (1)..(2260): unsure at all n locations
attttgggttaaaagaatttccctctattctaatttttaataccatcatctgccaaaaccatggaaaagaatagagatgaagaganaactaaagcagagagaagcagtaaaggcaaatttcacaactaggatttggtccaagaagacaaaaccaagcacgattaaactaaacattagtgttcagatgttgagaacagacaaacttataacttacacaaaccgcaaaaaaacaaatccacataaacagtccaaacgcacaaaataacttagtcagagaccattaataatagttatgcagcttatccacattcattacttaataagacgacgagcggaggccacggtttttgtaagcctggtaccaccatcgccatagcctatgaacacctacacgacgcttaagttttttagaacgctgctcattgtttcgaactttttctccgccatggagaagcatatattcttcctccggagtgatcacacttctttctccactccaataatcaccccggagtctcaagagtcccgtagtctcattgatgattcttctaacaatagctttgcgatcaaccggctcaccattgggagcctttgccaagtccttataagttatgtagacaaatgtagttttggtgttgagactcgcattcggttgctccacttcttcaatcgcaactttcacaatctccaactgggagagatagtgctgcataaacaaaaccatgtagtgtgaagtattaacaatattgaatgccactaaatcactttgatatgcaaacaaatgaaagagagaaaaaaacacttacaactgtaagaaacctatcgtgagcaacaagtgtaagttccaaatagagtcgaatccaatcattgtctcgcaactctgattccttcacctgcaaggtttctcaataaaattcactagtaggcaaaagcaaaaccacaagtgtctctattgatttatgcattttaaatgatttataaatccttatgataattcattaaacaaacaacaaaggatgtactttataaataataatcttaccagatgaaaccgttttgtatcatcgaaagcaatctctgaaggccagtcaggcaattcatcattgtccatataatcatactctgattcgctgtgcggacgtagaaaaggcacattggtagtcactgtgcaatattaaccagcaagtgttagatgtacaggtaaactgccacaagtcaaaatgactgatcaagtaaagttacatgtttacctcgaggtctagcgatagtacatgtcatgtctaaactgccaagacgctcttcatgaactagaacctgaaagatctgcttcaaaccgctatctggaacgcgtgcagccaaagtaatgtagtaagaagaagcaccacaattgattctcatgttgaaactctttagggtatcgagctgcaaatttttcccctgacagatggaaaaagagattgagaatgtaattggtatatcataataataattaatagttccagtagcatatcgactagaaaagcactatattgtttacctccaacacattgtaacgatgaagtcccaccattgcataaaacttgaccaaagaaccataaggatacttgggataactgccttcacactcaaagtgacgaagcctatgaagattgtatgatattgggataccgtcgggataatcaaaaccctaagacccatcagagaaaataatcaatcaatcaatcactacccttaacatcgtaagaaaggaacactagtacacaagctaaacaatataaaaagatgagagaattacgtcagattcattcctctgcggaggagctaacgtgtattccacccggcgactcatctttctccttctccttccaaaaattagcgactgctgctcttatagttctaggctttgcctggcgaaggcggcgaaggtttcattcatgggcttcatttgggacttcaattgtcaatcttgacgatgttgcaacgcacatgttcaatttttattgatttttcaccgtacccttaaaacgccatcgctttaggtaagggcttttacatttactgatttaccccagatcttttcataatctttcacttgcagaaaagtacacacactgatcgttccagcaacacaggagcattttttgagaatccgacaacaagccggaaggggttacacattccaaccacggaaactttccgtgattncgagcttactttattcataagttgatttgacttcttttttttctttggctcaaaa

SEQ ID NO: 8700 - DNA, 1069 bp, Arabidopsis thaliana landsberg
aggacagcacttcctcctgtataaataaatatatgattatgatccttaaactaagtagttaacgagaccaatcttttgttatagtttatagcgaagaataaaagtctacaatgtttaaaagataactatgtactcacagtattatccacgagtgaccgacgaaggttcgaataacaaccatcgcatacgacagtaagaggtgcaaaggccgttatttcttcgcctgcgctatttttgtatgtcactcctttgaccactcctttttcttcaattaaagacttcactgttccttcttctaattgaacactgccaaggttcattgcattttattaaaaaagatgaaactgaaaatcaagtatataagtcttaagattgttctattcatttacaattgattttgagatgaaaagccatgtaatattttagagctcattaaaactttgacacatattagactcaaaacaattatagatgggtaaagaaccatcatatacatgtttcgcaacaaagctgcaataatttccactagatgaatgatcttgactacaagttatacaagaaatagttttgattttggatacaaaataaataaaattatataatttatgtacgtacttggtaagagaagctgctttttggcgtagacgttgtaccagacgaccattacgtaaaagtctaccgactggttcatgaggaaacttcttattatctggaaaaggcaatgtcgcgtgttttccatccttgtaaatggctaaggacttggcttcttgagcgtctatctcctccaaacaatctaatacatatagaaccccaaaattgcaaattaataacgcacatacaatatgattatatgcttgtgtggtaccaagatcaagcaatgtgtagcaacaaaattaaaggtgagtgaagaaagagaccttcgaggccaagctgggctaacatgaagcggcctcccgcttgcatcagcttttccatgaatctttggggctctttcaagtccctctctatcacatgtacttggtcgtccatcctgcttccgcattcaattaattatgcatatctagtaact

SEQ ID NO: 8701 - DNA, 2241 bp, Arabidopsis thaliana landsberg
tgagtgagtttcgccatgccgacacttacgattttctctttctgagagattctttgttagcttcatgctctgttatggtttagctaccacaatgtgatgtgtgaatgattttgctatatgaagaggcaagagttttaagggactactaagtttgaagttttgtgcagaatggtagagatacaatgtggcctcatgattttcgaactggatggagttattgtgtcactataccatcgtggacacttctttcaaaatcgaaaaattcagatcctatagtggtaaataagtttcgatctctctctctacacagtgtagatttttctatagctagttgttgttcttatcgaagttgtgtattttcgtgaactattccaaggaactcttgctcgatatatgtgacattcttgaggtacagttttacagggttcaggtaagtgtgcaatctccagaaggtgttagcacaatgcgaggaattctgaggagatttaatgattttgtaaagcttttagctgatgtaagattctctcaatctttctcaactcaatgatattcaacataatttgtagttgcttttggtcagtgtgattcaaacaagttaactgcaatgtgttttatggcatatgatttacagctcaaaagagcatttcctaggaaaagttttccatcagctcctcctaaaggatttttgcgtgtcaaaagtagagatatgttagaagaggtatgcattctcttgtggagctatgttgttcttttcaaattttctctctttcacgctttcctgcttttgtggttcctcaatcaagaacattttgacgcaggtttcatgtagaagtatatgtaaagtactgtactcaagaattatattacactcattttaaagatgtggtgttgttgcagagaaggtgctctgtggaggattggatgacgaagttgttatctgatatagaattggcaagaagtgttgtagttgcatccttcctcgaactagaagctactgctaggtctggtatgagcccattatagtattacagttaccgtttgataaagattcttaaaggcagttagttaatctatgtttaagtaaatgtgcttagtctttcactataatttaaagttgatttttttttttgttccagcatgccaagttgtagatcagaatgcttccgattccaatgatgatggaaatagcacaagcttgtcgtctctagttcacccaaattctggtggcagttctttgctctcatctgactatggcagcgatactgcttatgaaacatctgagctcggatcagcaagtttaggtcaggatgatgtttctgaaactgatactggagatctaactttggatgaagatctgacaaatccaacagagaagcttgtaaagtttagcatgtccaacattgacgagggactgagtatgagtcaaactattatcgagcagctagaagattttcctaagcacagagtccatttaggatatgccaatgatatcacagagacgaattcgtacaatggaaaagcttctaaaggtgtatttcgagcaaacaacgacttacggcgtcgctctgaatcagaaactagtcactcagtgatgcatgatcgaaagctttctcttgagagcgctgacggggtttcgttactagccggtgagacatcaacctctagtatcttgagctccattgtagatagccagctggatgttaatcatgatatatctgttggtaacctggagataccgggtaatggacgaatagttctcccgctgaaaatgcatagtaaattaaataggattctattaactatgaatgagagacttctcaattcaaaaacagacatggaggatcttatagcgagactaaatcaagagacagcggtgaaggaatatctgaacagaaaggtacatgattgaaaataatagtacatctgttttcaagtttgttggtaatgaaatctgcgcttcttcctttactcttcatgcgaatgtcatatatgtaatcttggttttcctgttcaggttgatgatctggaagtggaacttgaaactactaaacagagaaacaaagagaatttggagcaagctttgatgaccgagagacagagttttaccaagatgcagtgggatatggaagaactcaggcaaaaaacttttgagatggaactgaagttaaagtcaaaagaggtattgaaatttgaaatagttccatctcaatcacattctttccacaattagcaagttcacac

SEQ ID NO: 8702 - DNA, 858 bp, Arabidopsis thaliana landsberg
acaaaaaaaaactaacataaatattgcatacaaataaaactctatatatgcgttatgcatgcatgtctaagaaattactatctctcttttgctagtaagacatggaaactctcaacgttgatcatgaagatactatttcctcagaacaagaacatcgagcacataccaaatccgacaccgacatgcctccgatctccggcggtagagacttcattcgacagtttgcggctgagtcaaagaagttgtggtggctcgctggtcctgcgatattcacatctttctgccaatactctcttggcgccgtcacgcagatcctcgccggacacgtcaacacgctggctttagctgctgtctccatacagaactccgtcatctccggcttctctgtcggcattatggtaatataattagttactttaagcatacatatctatgacaaatgtgttacacattttttagttgatccattgttcataatttattcttttaaacttaaaattgatttaagcttgggatgggaagtgcactagcgacgctttgtgggcaagcgtacggagcagggcaactagagatgatgggaatatatcttcagaggtcttggatcatccttaactcttgtgcccttcttctttgtcttttttacgtgtttgccactccactgttgagtctcctcggacagtctccggagatctctaaagcagccgggaaattctccctctggatgattcctcagctctttgcttacgctgttaacttcgccaccgccaagttcttgcaggtaacaacaaatcagtttacttgaggtaaattcaagttgtctggttatgagattgattaattattataggcacaaagcaa

SEQ ID NO: 8703 - DNA, 1006 bp, Arabidopsis thaliana landsberg
tatcggtagaaaaatattgcggaagcattacgtttgcatttcatcacatattcacacgtgcgctcaagacatttcacacgcacaaatataattgacccacaatcacaaaaaagctggtcatcactaatttttttcaacaatttccctacccctctccaataattgaacattttatatatattcttttggcaaccatattttataaacatatatatatatatatatatatattggtttcaattatggatattatataatagcattattatgtataattcccaattttatgtaagttatgaatatattttacacagcttgttaaatgctttactttaaatctacatgaaaatcaaaatgtattaatatgtccacaatttaaatggttgatttcatattaacatgagaaatcacaaaataataagtataaaaatgaattacgtaaatgatgattttttagtttaattaatcggtcaccaaaatattcatattcgaacatggtcgccacaagcgacattctacaaaaaaaacacatacaagtaaatagaaaatagaatttctcctctcaatgactcacacaaactctctatataaagccattacttaataccacacaaattacaaaaaaagaaagaaaaaaggagataataatcacaaactacaaaagtagaaagaagaaaaaagagcagttcttgaatatttgcatcaatggaggaatccaaaacacctcacgttgcgatcataccaagtccgggaatgggtcatctcataccactcgtcgagtttgctaaacgactcgtccatcttcacggcctcaccgttaccttcgtcatcgccggcgaaggtccaccatcaaaagctcagagaaccgtcctcgactcgctcccttcttcaatctcctccgtctttctccctcctgttgatctcaccgatctctcttcgtccactcgcatcgaatctcggatctccctcaccgtgactcgttcaaacccggagctccggaaagtct

SEQ ID NO: 8704 - DNA, 1096 bp, Arabidopsis thaliana landsberg
tctttttaaagatgtctttcaaactacctctttctttacttctgcttcttaccgtgatcttatacaggtaaagagcctttggcttccagagttccaatttcaagaagacctcgacccattgtatcaacacctgtagtgccttttaaatctgctttacgttcttcagtcgcctccaagaatgaattaacatcttcttgctcttccattgagagctgtctcagtgtttcgtcaaccgcttctaacaagccttctatacattcagtaaagcagaagaaagatcagagtttaagaatagcttcccattctttggcaaatagaccaaaatccagcgctggatctagaaatatagaccagcttaaagttccacccctctcagccggtaggacatacaagttcaatgtatcacgtcttagttctagtgttgactggtcatcggaatcaccgcgagcttttactcctaataaaatggctaaaggtaacaagaaaagtgtccatggtgataacggtcctccaactgattatacaacacagactttgaaacctctgaacaattctaaagatgtatctgttgtccaagatgacccaaagccttctgcttccatgatgaaaccaacgggactccgtgtgccatcgccaaaagttggctactttgacggagtaagttcccaaattcatgaaatcctttacatatgaactaggaagtaatcagagtaacatttgacaaagaaatatatctaatccttatctatgtggaatctcattacgtatatgaatatttgttgttaacaggcgaggggcagcgttgcacgaacacccacgggatcctgtactggtccggtaagtggcttgtcaaaacatggagcttgtagtcccgatgaatttactccaagtagaactgcaaagtcccaacccacaatgtctaaagcagcggttcgtccagtttcaaggagttcaaggctgattgtctcggcttcaccaaagcttaccaacaaaaggtattcaaaagtcagtgcagaggaacaacttggataatgtagctacagttatgaagccaaataacttgcaacttgttataatataccataagcttttaggt

SEQ ID NO: 8705 - DNA, 1391 bp, Arabidopsis thaliana landsberg
tccgtccacattcaaaaaaaggaaccaaaaatgcaacagtacataagaagcaagcttacacataaacacgaatatgatgacttttgtaatcaattcaagtaatatatctgcagattagaaaaagctaaaagcttgtgaacctgaagagcagccaaacgagccttctctttggaaatatcctcaggctcaccttggagctcaggcactgcaaggaaatacacaatgagcctagtgaaaatgagaaacaaagtaatgtcaagagagataaatcgaaaagggtacgccgtacgcacaatcgagtttgagagacttgaaaggaatggaatttccgatgatagctttgacttcttcgagcttcttagcatttccagtcacaaacgtcaccggccgtggcaaaaccaccgctgctttcgccgccgccgccgccattgtctgtgtctcagtctcagatagcgaaagcaaagtccttttgttaatttttctttgcaaaaaatgggcttaagtccattttaatttaggcccattgaaacttatactcgttcgtccaaagtaaaattacgagtaaaccgatcattggtttaagtaacccatttttcatttaattagggtccgcagcgattttgtataatcatgactgctaagcgttagccggacggtaaaagagggtctagcgcctagtaaaaaaattataattatataaaaattaatcgaagactagttttatgattatttaatgttttgaaaatatatttatctattataactaagaaatttatataatacttttttaaaaaattgtaattaaatatataaaaataagattttaggttaaatttataattattatgcaaattacgaacataagttgaacattttagattttatatgcaggaaaatataggcatttttagataaatgtttgtatacataaggggaaagaaagtacatgtagtaattaaaaagtacataattagtttgcttgtctcaacttttcacatatccttttctagtaataagaaaatcacttataacaaatttttttctttcacaaaatacataaaactaattagctaatttgatttgttttatattgttttccatgtagcaaaatgacaacgtcagattgaactacacagtgtcgatgcaagaactccctaatggtgcatgatttaatgaggaaaacaatcagacagcagaacctgtacgacaaccagactctcgtacactaccgcttctggccctaggacccaaaaatatgcaagattctagttcatgtgttacttttacttgtcctcaatatctacttgagctttcattctaaactacactatgtttgattgttttctaaaaaactgtggtttcttaagtttctaaaaagtcattaaaaatga

SEQ ID NO: 8706 - DNA, 580 bp, Arabidopsis thaliana landsberg
tatattccaaaataaaattaaaaagataattaaaaaatatctttagagagtttgtcttatcagaacataatacatgatcatccgaaaaacataacatcttaatagaacacaccaacaatcttcaagaaagaacttggcttaattaactcttccttgtctttcatttcttttaatgcttttgcttctctaaacgctgcctcctagttattggtttcgtggatatcctctacctgagaaggcaatgatataacatcttaaaagaacacacgccaacagtgtctaattatccaactctagtctgcttactcaaacacgctgtttccacatttgcaaattaaaaaaagaattttgattgtaaaaaaaagcaggttttaacttacctaagttgaattgcaggtttcaacatgccaccggacctccgccaagccaagggttcagaaacacccaatgtgaatcatgtttcctgtttactctatttcatcaaagtaaaaaaagcaggtttttaagctcttcaataaaggaatggtgactatactcgatcaattattaaccaaccttgcgggagaaacaatatctcata

SEQ ID NO: 8707 - DNA, 1669 bp, Arabidopsis thaliana landsberg
cactcgggtggatcttggacgagccagacttgaggagattagcttccagaaagccatggttatgtaatttggtttgttgttgacttgagacacaagaaaagtatagtaggaagattattgatacagctatcgatttataggtattagccattgatagttttcagattttgatgttagctatgttcaatgctatctttttatagcttcaaagagctcaagacacattcatattcaaattttttgtttatgctgacaagttaaacaaacttagttgaagatttgactttctatataaactgctaaacaaacccttttttttttttgcaaacctttatattagtatccttgaaaaattctttcgaactttcctccacagtttcttcctaataaaattgattgcaaaataaacaagaaaatggttacatattttctgtatattttaaatgtgattacaaagtcataatggatcaaaaattattgaacaaaaaaaacgtcatcttttagctagcctttagggtgaatcacctttttttttgttacacatataattttgactgcctaacgatcgacgtttatccactatgactatgtgatacaaacaaatagaaaggtttctcttgagtcttgtaattgtgcaattatttgtattaggaagaaattgtggaggaaacttgcaataattatcaactatatgtctcataaaaggcgttgctatgttaggcttttagccactatatatccaatataaaaataaaaaatggatgaacaattgaacattccttgaaattaaagtgttaactttaaatatgaatatttataataaaaaaatatcctaactttttattattattattataaagacatacgttgtcaaactaagaaattcaatttgtaaacgaagaagaagaatacttgaccattcaaatcttagtcttgttctcactgaaaacttgtacaaaaataaataattacaaaatctagagaagttttcatgcaaaattgtatatgtagatgtagtcagatagagttccatatattctataaacgaagaaatcacaacaatacaatgtacaaattaacatcattagattagagtcaaagaatttttaaaaatatatcaactttctgagaagagtacaaagattgtttacgaacgaagaattctcaaaacataaaataattagtttccattttacaaaaatgatcttaggtaatctgcttatattggttaaagtatttctattttctaaccaaaacttaggcaatttattttgtcaccaacatacaatattatattaacaatctatatattactaatctatatgtttttttctttttggtctaaggtaaactttgggatttaattgtaggattgtacctcttcaatagatactccgtactcgcatgtattaatagagcatcacatttatggacttctctatgggtagtgcatgcatctactaagatttatatggacttttgttcttgctgctcatttatcgaaataaagcacaaaactgctgcgatccagctaatccgcataaactaatgaatgacagattcttgttttcagtcttcttcttggggcactatctactggactttactattgttgctaatgccattgactaatatcttgcctactaaaatattgaactgctttattcta

SEQ ID NO: 8708 - DNA, 1943 bp, Arabidopsis thaliana landsberg
aaaccctggtatccatttaggcgaagcagagcgccacattccattaatcaacccccttgatacagccgaagcaacagggaacaaccaacaccacattgtctcaaaattctcttgagttatgtattcatagcatccacatatccttcttagaaggtcaaaatcctgattacaatttcatgtcagaatcacaaatacaaaagatcaagactttgatcttggtgaaagttcaagcaatatgagaagagaaagagacaagacctggtgagtgagagatctactgctgcatttagctattctcatgaaatgttcttcaatctcaattaccacattgtcccaatgaacatgtcgatagttccgagagatcagattccacgcatttgttccttctgctatcagttttcttgccattttgatttgatagctggaaaatttggaagattagtgttctattttatttgaggcaggtgtgagtttaatttgatttctttacccgtggtgggagcatccggaatagagagaaacttgatctgcaaattccgagacttcttcgtctgatgaattgtttgtgatttccttcagaagaagagctctctctgttaagtttccaaggcagtatttgaaaataatccagtctgggattgaatatctcctgaaagcagtcgagtctctcatttcagtgttttcggaatcagttgaagagttatcttcttcgtggttctgaggcctccattccatactcgtaccatttccattcacaatctaactcgagagcaacaacaatgcagaataacagtaagtgggatatggatacaaagcaaaacaaaacgtaactcagagaaattggattatccaccttactctcagaaaccttttcttctcctaatctgatccgtttcatagaggaaacagaatcacggtttctcgaaatgcaacggatttggttggtgacagtttcgaggaaaggataatcggccttcacttctggtatttcgaatttgatgcagaacaacctcttatcactcttggaagaaagctacaaaacaaaagaaaacaaggatccttcaatgccttttagcatagacaaaaaaattctaacaagaatgtgaaatcccattccgatggcctagatttataatcaccacctgagataatttgaacttgaaagaagcacatccgttcaataagttgcacggcttatcttcagcagataattcaatgccttcatagcttactaaaaggaatgcctcaaagtcactcctcttctcaacatgcgtcccactatcagcatacagtagagaagccacaacctgcaacatcaaatcgataacgcgctatcagaaatacttcctgagctaaacaaatgcagaaatttatagaaagcataagagtatgaaccttcacatccttgtgcacaggctgtccaatagcattggttaaaacaacatccaaggaacaaaatgttccactaacgacactccaaacaccatcttcatccaattcaattccagatgtagatggcttatcaacagataaccataaaggtgggtcctggaaaagaaatgaagcgaaataaagaaacacaggacaagagtcttttgttgaaaaagaagagaaggcaaagacaagaaactacctttgtgtagtgataacttgcagagagattagaaggcaaaacttctgcactgtggatgaaaccctgaacactataaccatcttcaccaacactaaataacgatatctttcgtgcgcgatctgaatttgtaccattggtcatcaaggaagttatgacttgctctcctacaagctctccacaaatataaaggcgcatatagtttctagaaacctaggagacaacagagatcagtaaatccgaagaatagagatattggtcaaaataataagagtcctgagagatctttataatactacctcacaacccacat

SEQ ID NO: 8709 - DNA, 1028 bp, Arabidopsis thaliana landsberg
  unsure (1)..(1028): unsure at all n locations
aggacgatccgggtatgttcataaaggagttctgcctagtggcaaagaagtttttgtgaagagtcttaaacttggaagtggacagggggaacgcgagtttcaagcagaggttgatatcattagccgtgtccatcatcgtcatctcgtttctcttgttggatattgcatctctggtggtcaaagacttttggtttatgagtttatacctaacaacactcttgaatttcatcttcatggtacattcatctaacagaatgttttcttgtattaacaaaacctttaagtatggtttctctttaatcaggaacatgattgaaatttcaggaaagggtcgtccggttttggattggcctacaagagtgaagattgcattgggatcagctagaggccttgcatatttgcatgaagactgtaagaaaatctttatctcacatatttgcatcagtttctatctcgctctctacaatatttgaaagattgtatatgttacatcaattataggtcaccctcgcattatccacagagatatcaaagctgcaaacattcttcttgatttcagttttgagaccaaggtatgtgtgtatatatcgactcttgtactacttttactttcattgtctctcatttttgtttccaatctgtgtcgatgtgtgtatcagtcttattgtgtaaatatatgcaggtggcagattttggattggctaagctatctcaagacaactatactcatgtctccactcgcgtcatgggaacttttgggtaagcagctttgtaaaatgtctcaactcatccacacttatttagtttctttcacttgtttttaacattttcttggattcagatacttagctccagagtatgcatcaagcggaaagttatccgacaaatctgatgttttctcatttggagtaatgcttcttgagctcataaccggaagacctcctctggatctaactggagaaatggaagatagcttggtagaatnggtaagtcggtccccgcctcttcggttacttgttaatcccaaa

SEQ ID NO: 8710 - DNA, 2088 bp, Arabidopsis thaliana landsberg
aacccccccaaaaatttggaaaaagaattccaaatattcatgattttcaaaaagtcggttcatttaagagttttttctagcaaggttgtaaatcctttagatataatcgctctcttggtaaaatgttaaacatttggtgaaaattaggaaacaaaatttcaaaaatgatttgagagtgaaagtgtaacttatacccaacaaaacgaagaaaaacacatgccaacatagaaccatggcaccagaacaccggagatctcacaattcttaaagtaaagagccatgtagacgcggtaggttattcaaattccaaccagatgctatgtattatccatatcactcttccatttttcgttttcactcctttacaaaggagtgaaaatgtaaagtggaaaagagatatggatcaatgcataatttctggttagaacttgaataacttaccgtgttgtcctgaatctttactctcatttaaggatagtgatatttctggtgttgtcgtatcatggctctctgttgggatgtgtttttgaacgttttgttggttaatattacactcttagtgtctaaatcatttgtaatattatttgtcaatttcatttgtttgatgttttgcttgtactcacaacatttattgttatgtagttgtcatcacgccaacaaaacttggagtagacgcagcacactactaataatagattgttctaagttgtatcaaaagaaaatataatgaatttttaaatgctacttatctgcgtgaaatttgagttaattatatataaataataagtgtaaattatttatatctatttttaaaatcaattatatataaataatttacacttaaattcagcatcttcatattctgtaaatagaagcttgtttcatttaatttgggcatagaattgtttttcatattttcttattatattagttattttatttttcaaaattaatatattaaataaaaacgaaaacaaaaattatttgactctcaattatattattataaatttaaacatcaaaagtatttatactaataaatacatcatagcttttaatgtttttatcattttattttttgtttatacagtatttagattattttagtgcgactgattggtttatttttaatgaaacataatgttttttcttaataaataaaatatataggtcccacaaaaaaagcagagaaaactctcgagtcgtatatcacagtgaaatctccctagactaatcatttgtgatttctttatcaaaaattccaaattgatagatatgatcagatccatttgttcacacagtccgtaagttgtaggtgagtgaaatagctcacatgccatccatgattcagtatcagttcaaaagaaaaagtttagtttttctttgttgatgtgaacaaaaaataataattctacggtttgtgatgttactaaaatttttcgaattatataatacaacataacattggctccacatacaattcttttcctctcgagtttatttgaatttagtacacatgatttaaaatcagataatgtcgtaagaacaactcacacctaaatgcacatatcatttaatcgtaatgtagcggtttgtaccgtgctttgcccaatggtccttcagatcgaccgggtttgaaagatcatgatgcccttctgcagcaagccggcttagaagcttgttgaacgcgcttccgctcattttccgtccaccaactcgagcatgccttttgttgggcagtgcaggtaaaggatacattgatagtgtagttgtgcaacacgatgattgccaacctccatttccccatttgtagcactgtctgagaactcctgtacatgaacatacaggtggtggcatcgttgtctcgtcgtaaaccacttggttcagccccaccatttcttgacttttccagtcagattttgatcctattaagatatgcttacttgaatcttcgtctgtgtagtcatgggtcgtctttacaaacattatcttgtttaagtcgtcctcgctttcttttttaaccttcctctgatttgttggccctctcttattacaacggtttgtgttgtcgcctttgggttcactctt

SEQ ID NO: 8711 - DNA, 1663 bp, Arabidopsis thaliana landsberg
caagagatcattcatgactattttactaatatctactcttcttccactttacaacctgttatagagcacatcaagccgaaagtaactgctgaaatgaatcatcacctcactaagcaggttactgaagatgagatttatcaagcgttaaagtcaatgagtgtagataaagctccaggacctgatggcctaaatgcaggattctataagtaccattggggcacaattaaatcaggtgtggttgctttcattcaatatttcttttaaactggctatatagagcctgaaataaaccacactcatatatgcctagtcccaaaggttgaatcccctacgcaagttaaagactttaggcctattagtttatgaaatatagcttataagcttatatctaagattatggcagatagactcaagccttggttacatcttcttatatcagagtttcaatctgcatttatccctgggcgacttatcactgataatgttatcattgcccatgagcttctacactcattatctattaaaaacattaaatcaccttacatggctctcaaattggatattgctaaagcctttgataaggtggacttgcattacttgttagctattttaaagcgttttggttttgcagataaatggtgtcaatgggtaatgcaatgtgtcaccacggtttcatactctgtactcatcaacggatctccctccaagaagatcactccaaaaagaggattgcgacaaggtgaccctttatcaccctacctttatctgctctgcacagaaggactctcttctttactagctaatgttgctcatacaaagtctattcacggctttaaagcaagcagaaatggtcctgctatatctcacatgttttttgcagatgattcgctactcttttgtcaagccactgagcctgaatgccaaaaacttcttcatatccttaatgattacactgcatcttctggtcaacaagttaacttccagaaatcagccattctctttggtaagactgtaccccctcatgtccaggatcatataaaaagtcttactggcatcgctaagactggaggctttggtcggtatttgggactgccagaagcaattggcagaaacaaatatgatgcttttgcttatatagtgcagagagtccagaataaatttgataactggtacactaaattcttatcacaggcagggaaggagatcctaatcaaatcagtggcaacaacactgcccacttatgcaatgtcatgctttcttttgcctaaacgtctcatttctaatcttacaggccaaattaggcgattctggtggtccagtgttaaggacaggcagaaaattccatggattgcatggcgtaaactcacgatgatgaaacaatatggtggcctaggcttcagggatctgaatcacttcaatgtagcattgttagcaaagcaaggttggagagtactaacacacccagactcattgatatctcgggtcctaaaagcaaaatactttgctaagacatcactcttggaggctaaagtaggacatcgtccaagtcatgcttggcgtagcataatccaaggtatgtcccttatcaaacaaggtctgaattggcgaattggtgatggccgcacagttcgggtttggaaggatgcatggattaactctccac

SEQ ID NO: 8712 - DNA, 1930 bp, Arabidopsis thaliana landsberg
ccttttgctggcgcactagttgagaaggtggatttttttttttccggcctcttcctgccgctttactttgtggcaagtggtctgaaaactaatgtggcaacgatccaaggagctcagtcttggggtcttctggttttagacaccgccacagcttgtttcggtaagatattgggcactctcggtgtttccctcgccttcaagatacctatgcgagaagcaataacattaggattcctcatgaacactaaaggattggtcgaactcatcgtcctcaacatcggaaaagatcgaaaggtataactttttcaaatccttaacaatttgcgtcatgaaagtttataacttaaatctttcttttgttgtgtcctcaggttcttaatgatcagacatttgccataatggttctaatggctctcttcacaaccttcatcaccacaccagtcgtaatggcagtctacaaaccagcgagaagagcgaagaaagaaggagaatacaaacacagggcagtagaacgagagaacacaaacacacagcttcgaatcctcacatgtttccacggagcaggaagcattccttcaatgataaacctcctagaagcatcaagaggtatcgaaaaaggcgaagggctctgcgtttacgctctccacttacgggaactatcagagagatcatcagctattctaatggttcataaagttcggaaaaacggaatgccgttttggaacagaagaggagtaaacgcagacgctgatcaagtagtagttgctttccaagcttttcaacagctaagcagagtcaatgtccgaccaatgacagcaatctcttcaatgtctgatattcatgaagatatctgcacaacagctgtaagaaaaaaagcagccattgtgattcttccgtttcacaagcatcaacagcttgatggttcgttagagactacacgtggcgattaccgttgggttaaccggagagttttgcttcaagctccttgttcggttggtatattcgttgaccgtggactcggaggttcaagtcaagtctcagctcaagatgtttcttactctgttgttgttctgttcttcggtggtcctgatgatcgtgaagcgttggcttatggattacgtatggcggagcatcccggaattgttttgactgttttccgatttgtggtatcgccggagagagtcggagagattgttaatgttgaagtgagtaacaataacaacgagaatcagagtgtgaagaatctcaaatcggatgagaagattatgtctgagataaggaagatatcgtcggtggacgaatcggttaagttcgtggagaaacagattgaaaacgccgccgtggatgtcagatcggaaattcaaaaagtgcggcggcgaatttgtttttggttggtagaatgccaggtggagaaattgcattggcgattagggagaatagtgaatgtccggagcttggacctgtaggaagcttgttgatttcgccggaatcttcgacaaaagcatcggttttggtgattcagcagtacaacggcaccggaatagctccggatttgggtgcggctgagacggaggtattgacttctacggataaagactctgattgaatgaatcattggttaaaaacaagaacggttcggttcgggtcaggggttggtttaccagagttagtgaaaagttggttaatgaatacggtttaatcaaaatgactggacttggctttcactgtttcatcttttctttcttttttgtcgtcactgttcatctttaagtttttttgcttttgaaagtaaatggttaaatgatgacaaaaaaaaaaaaaatggttgttgtaaaaaaagttatctactttaatcggaaaaataataaatttaaaaatccagtcattgaacataaacctaaaaacagaaatgtcagaagtggggtttgac

SEQ ID NO: 8713 - DNA, 1797 bp, Arabidopsis thaliana landsberg
aagtcttagttgtgttatattgatttttacttttattttgaaagccatttcgacaaccaaagagtgggagggggccgatgacaagaccaagaactccatttgcgactgtggatgagccgatatctacatctatctgcatgggaatgaaaatgtttctttttgagttactttatttgatctacaagcttttaataatgttacaaaatgtggactcacttctaagtatgttggaccgcggatatagttgcaatctactgctttcccgaggagacacggagtgcttcccacgctttgccttactatccatgaaccctgcatatgaatcaatttgctttaagattctacacagagaaagagagaggggaaaagagagagagagagagataaatacctttgggactaaaggtataagcttgagcctgctattacgaaattcgtcatcaccatcaacaaaacgttggaagagtgatccaggtacaagttctttagtcacgaaataaaataccatactatagtgtgttgatccaggaacctaccaaaaataccggattatacatcgaaaattatagtttgtcattatgttgtaattcacaggcaaaccttacttgaacatttactaccgttgagaaaagacctttctctgcagcaacctgaaacggattaatagcatattaattggaatttccatgtgacaaagaagagacctcaaagatagataatagcaacggagcagggtaataacatctcttacttgtgcagcacagcccttgcgtctaaccacatgatccattcttttagtgtctttgaaccaatcgacggcgacaagatccattagatgcttcccagcaggaatcttcagtaaaaggttaaatgagtatcacagatgtaatacgataagaatgtgcatctttctagtgcgttctaaattaattaggttagatattactaaccttccttttatcggcacagaaactcttgccacggactttaaagttgttcccatcagaaatcctccagcagttacgggcattttcgttatcatcgtgtcgcagattacccgagaaacatgacagatcaatgttgagagcaggttcctcttttgaggtttcatatggcacaagaaattcataaaatttagatactttttcaccaactcagtaagcattaacgataaaacacaactatcagttcacctgttttcttggcatcagtctcctgctcctgcttactcgtttcaggctgaaatatagcaaatgtgaagaaagactcaacttgatcaaatcttaagttcaaagagaaagcttgataggccaacctctggttctgaatcaggtatctgaaactcgtcatcgtcatccgagtcttcatccattagcacagagtttctgctggcaccatttgtttgatcaatagaaagggaagacttatggtgatgctttccacctttacccaacgctaaggaagaagatgccatattaaccataacagggatcctgatcggttgacctctatcatctgtctgtgagaaccactcacgcaaacctgcgatgaacatgagtccatgaattagaatggcagatgcacaagtgtggtttcaagaagagcagaagtcattttccaccgggatctcagtgaaaatgagcacaaaagaacttaccagaaacactgttcagcatttgaagaagacaatgttgttgaaatgctggaagataacctgaacccccccccttcagatcgatttgtattagatgtaacacaagtgtcctaggccttccattccggggctttagtgggggg

SEQ ID NO: 8714 - DNA, 591 bp, Arabidopsis thaliana landsberg
tacttttaaatgtaggagataaaagagctcttgccttaaatagttgatgacattgtacggaagttctgcacattggtactcttcccataccagtagagcgctctgcttatctttggcattgacacaagcatgtagaagaaaatccagacattttcttgaaggacataactcaagctcttctttcataaaactcaccaagtccagccctaccttcacatcactagactctgtttccgctattgacttaaacacctgatttcaacaataagatgccaagagttaagagaataatacacaccagaattttccaagatttcgtcgagtctacatatgagaaatcttgaggttatagtatatcagttgacaatacgaacaagtgaaaagcatgtaaagcttgtgaaaagcttgtaatgtttttgaaaacgtatgagagaagtaaaatcagacctcttaaaccaatattccacaccgacgtcatccttggacaagtggttttggtctgctctaacacatccagaatagagctacacaaaagaggttgaataaagcacaggataactaacaatggtgtcaagtaactaaacaaagaca

SEQ ID NO: 8715 - DNA, 1356 bp, Arabidopsis thaliana landsberg
  unsure (1)..(1356): unsure at all n locations
cactaaacgggctatggatctcgtcctcccatcactaacactcgatgcancctacagaatctggtgtacatctctggcttcaaccagattccttacatcatcaatcctattcttagccacgtcgtcgcttgcactctccagctctcttcttggctttaccgtaactccttattcatcattgtctgcattctctacaaaatcacatgtcatctacaaactcttcgtcttgatgacttcgctcgttgcttcgcttctgagatcactgacgttagatcagctctcggcgagcatcaaaagattcgtcgtaatttgaggattgttagtcatcgattcaggagatttattcttttgtctttgattcttgttactgctactcagttcatggctttgcttactactacgagagctagtgttgctgttaatatctatgaagttggcgaactcgcggtaagagttcttaccggttctgttttgttttgctctgtttattcggattgaactcatcactaaatgttttttgttttggtctatacagttatgttcgttgagtttggttacaggagtattcatatgtttgagaagtgcaacgaagataactcacaaagctcaatctgtaacgagccttgcagctaaatggaacgtttgcgcaacagttgactcgtttgatcatcttgatggcgaaactcctactggttccattattgaatctcaagtttccctacgcggcaatgcgatagagacgtctgatgatgaagaaggagaaggagacgatgatctcgataataccaagatacatcccatctatgccaatacaatttcttaccaaaaacgtcaagctctaggtaaaataacatttccatggctaatttgatatagaccacaaaaatcgatatttatggatttgttgttcttttttcgcagtgacgtatctagagaacaacaaagctgggatcactgtgtatggattccttgtagatagatcatggttgaatacgattttcgggattgagctcgctcttctactatggttgctcaataaaacaatcggtatattggcttaaaaccggtttctcttgtttccaaaaggaacttcttttggctattttttaacctttgtattgtttgtctttggttgtgtgacagtgaatataccatgaacaaacacttggttctttgtaatatatgaattggtttggcatgatgtttctctccaagatatgatgaagaacagtagaggagttctttttgatggcaacgtatatatgtctatctccccttacttgtttagttacaaatgttgagatacaacaaccatttttgtgttaattgattaaatatcaatatagtttctatgat

SEQ ID NO: 8716 - DNA, 540 bp, Arabidopsis thaliana landsberg
ggaacttgttccttactttttattctactattattggtagtgtttagctagagaactatatggattttgtttagagataagaaactgcaagtttgtggatttactttgatttctcactttatatatgaccattagtccattaacattgtttttttcttttttaacatcaaaagaacttttattagtttgaaaagtgatcctcatggaggatttgtacaaggcttctaggaacaaagaaatgttgtataaaattaacattggcaggaattaacttctttgccaaacaatcagccgccttgttgcaatgccttggtatccatgtgaaggtagcatttgtgaatcttttttgccttgtttggacttccttcgtcaggttatggactccaaaattctgtatttctccgttgataagatgtggaatttgcttgatatctccttcaaaggtaatatttctgtagccttgtatccaggtgtgttacatgaccataaggagagcatgtgtgtccgccttaatgacactattacagggtttgcctctac

SEQ ID NO: 8717 - DNA, 3310 bp, Arabidopsis thaliana landsberg
  unsure (1)..(3310): unsure at all n locations
aaccgttcgacggcccatgagaacgctagcacatgcgttctcgcccccgacgggacacttccacctagacggataagagaactggatcgtctccggcgaaggaggcgacggttttatctccgtgtctgaggctgttgatctagaatcggtggctgttcacgagattggacatcttctagggttaggccattcctcggtagaaggttcgatcatgtatccaaccatcaggacgggtaggcgtaaagttgatttaacgaccgatgacgtggaaggagtccaatatttgtacggtgcgaatcctaacttcaatggttctagatctccaccaccgttcactcaacaacgagacactggcgattctggtgctcctggtagaagcgacggttctagatcggttttgactaatctacttcagtattatttttggattctatttggattatttttgtatttagtgtagatgattggattagttcattaatttatcacagattattaagacacggtttggattatttttcctagattggttcttcattcatgcatagtttctctttttgaacataatagtatacttttttttttgttactaattaattttgagatgaaatttatgagttcaaagtataaagttcaaactaactttttaagagtaaagttcaaattattttatttaaactcaaattcaataacaattttaaatggaaatcactattgatggggaccattataactagaaataatgattacaatttgaccctggtaaagggaatttaacataactttggaagcatcgggtttgatctctcaactcaaaacacacataactttataataagccaaaactgattataagggaaatataataattacaaaaaggtaagttaggaacacaaagatatgttaattaattacaaacacatcatcacactatcacagtaacgacacatgggtcaatcagttcccccaccctacactaccctaaactttaattttcttttaattatcttttacctttctatataattctccattaaactccccagatcttccctacctcgggatacgaaaactcatcttataaagcaaagcatatccacgattattcccgacaacaacaaaacaaacaaaacataaaactctctctagcttggtcaagaacaatggggttgcttccgtgttcttgtcctctgccttgcaatgaaacaatatcagaatctgaaacgaaatcgacgcatcaccaatcagaaatctcaacgtcatcatcgcttttgtctcagccaagtctcccattggttccttcgctgtcttttcagcatcagagctccagcgtcgatcaccattgcttagccacgctcaaagataaatcctcgtacgtatcttctctcgctgtctcagataaattactctacactggctcttccaacagtgagatacgtgtatggcctcgtgaacctccgttctcaccggaatattccactcggcgatgaccgtaacgtacttgccaacggaaaccgaggggttaaatcgttggtgattcttggcgacaagctaataagtgctcatcaagatcacaagattcgtgtatggaagatcatcgacgagagcaatcgcagaggtcagaagtacaagtgcgtagctactcttccgacgatgaccgaccgcttcaagactctctttagtagcaaaagctacgtggaagtccgacggcacaagaagtgcacgtgggttcaccatgtggacgccgtgtcatcactagccttgtcgcaagatggctctctgctttactctgcttcgtgggaccgcagtttcaagatatggagagcatctgattgcaaatgcttggactctatcgaaaaggctcgcgatgatgctattaacgccatcgtagtgtccaaatacggttttgtgtacacgggttcgccagataagaagatcaaagtgtggaacaagaagcacaagaatcactctctggtcgctacactgactaaacatctctcggcagtgaacgcgttggctattagtgaagacgggaaggttctttactccggtgcgtgtgatagatcgattcttgtgtgggagagattgagtaatggagatgatgaggagttacatatgtctgtagtgggagctttcaggggacacaggaaggcgattatgtgttcagcagttgcgtctgatttggtgttgagtgggtcagcggataagagcttgagagtttggaggagaggattcatgcagaaagagggttattcttgtttggcggttctgcaagtacataccaagcctgttaagtctttggctgtttcagtttatgattccgattctgattctgattattcttgtatggtttatagtgggagtcttgatctttctcttaaagtttggaacttaagggtttcatctatctaagtgcttattttacaatctataacgtgattatgactaatctctctttattagtctatatacttatgaatgtgatatatcataatggagctacctaggttttagtcaaaaacctacaacactcggttatcggagtacactttaacattacgatttataaagtttttctccttcgtatattagaccattcatataattcaaatccatatatatgagatttctcagttttgatcatcattggctatgttattaacaatgacctacatgtgtacacattgttttaatgtttagttttatttttctttgtggaatatagagttaaagtaaaattaaaatgacgatggagaattataaaactctacaacgtggaagttgatcatccatgtggtgtggtggttttatgatttatgtttggttgaaccgttgaagttattaatatggaatttgtgtgtgaggtcagatgaccccaaaaaaaagattgataaaagaattgtgaaactttttaaaataacgaatcacgtagttttgtcttccactatgactgaatttatatgttataatagtgataaatggatatcgcataatacacgtgaagtatggggaaagaaaaactttcacactatagtactactatacaatctttgtgtgcagataactgaattctaaattgaaatataaaaatactctatgcaattaccaaaatatatgtccccttcttattgctngataaaatgcgaatggaggtttaacactttaggcgattcagttattgggcttctaattgtaaggcccatactttagagacccatgaataatatatagactttagtacgatgatacatacccatcatacaagtcaacagtcctaagcatatgacgtttngttgtgacttatgaccgt

SEQ ID NO: 8718 - DNA, 591 bp, Arabidopsis thaliana landsberg
  unsure (1)..(591): unsure at all n locations
tggcacaatctacagaaatagaacagagaaaacaacttagcaacgttttcaagattcagaacaagactatgccctaactcttgtatgattgattcttcatatgttttaccatctttgggtttgaaaaagagttctcatccatcacattggcagatgtaagtattttcttcttcgatccataaaattttgcgatcagtcctgtcactgctacctttagatttactgattgttctccaaagtttacagcctgtgtattcatatttggtcagaacattcatttggttctagacatttgttttgtgtgtatgggagataagcaaaccttgatctgtatgtaatctttgccattggtttggaaagagatggcagatgcttcaacagaagaagtgtctccattaagtgtagaattgagaagagttgctccgcttgactcggtgaagaactgttggacccaatagctaggagttccatatagatgagacgagttaaaaactattgcatccgggatccacctgaaaaacaagagtaaccagatcttgcttctgactaatgcattcaagacaccgatnaaacgattaaactaaagtgaga

SEQ ID NO: 8719 - DNA, 1844 bp, Arabidopsis thaliana landsberg
  unsure (1)..(1844): unsure at all n locations
gccccgatatcgagtaccgtcagaaaatgttcgttcttctttcctttccctaatttctagacctatcttagctcctgttgatgttatccggtttgatctagggctctctagtataatatttacttgattttgctattggaggttcgatttcgtttttgattgaactagccttcaatgccttggggttattgtgattcatgataaggagatctttttagggtttatgttcgttgtcaattgaaatttccggtgtatctgtattgctgatttagttgttgttcatattaggtcgataatttctgctggttttattttggtttttatgtgcaatttctagatttggcttccatctaacattgattttgtgtgtgtgttgggtttagtcaatgctggaaccaacaaggcggcatcaagcggcacatctctgaacacaaaaatgcttgatgatgacactgagaaccttactcgtaagtcttatctttaatcatttggtttattaatggtgaattgatttccctagtgtctagaatatggtagtgtcaggctctgtatctaggctaatgtgttcatttcttgtttcaaagtgttcaacgtattggaaaactgttcttatatgagtagagtctgtctatctttctgcctgtgagtctttgatggttatagtgagaggaactttttattgattgatgtgtattggatgctgaagcttcatgttttgaattatgcaattgtgaattcagatgaacgtgtgcctactgagctaaagaaagccattatgcaagccaggacagacaagaagctaacccagtcccaacttgctcaagtatattatccttctctctatatgtcccttattattaccctattttgtaactcggttcatgacaaagtgtttgtttctttttgtgtagatcatcaatgagaagccacaagtgattcaagagtatgagtctggcaaagctatacccaaccagcaaatcctttctaagctggagagagcgcttggagctaagcttcgtggaaagaagtgagccaagttctactgatgtagcaagtaacaagaatcaatgctttcgtctaatgccataactttgccaagaagaatattttctgattgtaagaaagcaaaaccgtttgaatgtttgtttcgttgatggaatctctatctcataaactcatatcaatataataacttgggtcttttcatcacatagttgaactgcttattgttgatttatcatgaccttagagaaaaatacagaaatacaatttagaattcaggtacaggttcttcttcaacgggagcaagaacccattcaccatcttcgttcttgatcagtcctttgttcttctctacccaccaagatcctggcaccaaacactcagctttcaagaactcgcatgacttgttcactaatgcaatacttctcttaaccatcagtttaaactctcctttcttcccattccatccagctacaacatgtaacatcgcctgcacacatacatggaaaaaatatgtaaaagtttctactctgtatcgtttgagtcaaatttgaaagattcttctcacagattcttacctgaagattatgccaatcccctggattccttgaatcgcttaggaacggtgacttctttgtatcgatcacaaagtttattcctatgtccacataccctaaaagtccccctgggtatcgagttaagagatcaatcgtgttccttacatggaggatctttaagttcttgtgactcattacttcgtctctgaactccttgtttcctacctgtggacaaccaaagactatagcagtgaccggaacatcatcacntggaaccgtctcagc

SEQ ID NO: 8720 - DNA, 548 bp, Arabidopsis thaliana landsberg
  unsure (1)..(548): unsure at all n locations
acgcaaaaaggataaaactttaacacaattagagaaatggagctataagagaacaataataacctctctggtatcaatgctgtgtttctcttgaagaaccctatcgagaacagaaggatccgagaagataacgaacccaaaacccctaggtcgacctgtgagcttgtctctcatcacaatagcctgagaaacctcttcatagttggagaaatgttctctcagcttatcttcatcagtttcccatgaaataccaccgacaaaaagctttccttgatccgaatccatgaatttatattccactatcttacttctgacccagaatcacaaatccacctcaatctacgaaaccgtgaaaaccgactgcagaaacttccagaaattacgaaaaggctttagcttttccaatggctgtagccgatttgagaggaggaagaggaagaagacagcgaacgaatatttctattggtttggtattgatattcgcgaaggtacgaatctgtcagcagataaataaatcaacggnctagatcctttctaatattattaac

SEQ ID NO: 8721 - DNA, 1782 bp, Arabidopsis thaliana landsberg
gctactgctggaaccaatcaaagaaactcccctgccatatcgaaaagtggaactgcagcagcacaagggaagctgaagccgacaatgttggcaccacatcaacaacaagaagcagacaacacggatgtggttgacccgtggacgctcctcgaagatgggacaagttcaggtctatcaagcagcaacgcttcaaatagcagcgacatggccaaccttcgagccacctgttggctgaaaggtgcagtcagggtcagacggactgatctaacttacgttggttcagtagacgacgacagctgaattactctactgtttcatagttttttgatgatcatgagagctctggaaaagaaaggagcaaaaagcttggatcttcgggtgccttagactgtactatcatttattgaggggctcatgaagaagcaagtcgtaatgaaagatctccaatgagtctctgttgtggcttcttcagatctttgtattttaattactaaccctttttgcttttttggtcatatcccccggacccgtactggttcggaaccctgttgtatatataggggattcgaaattaattgtctcagtttcttgttccattattatttatccactaaattcactgttatcattcccctgaatttttatattgatgaacactttagtctctctttttgctcttagctatgtatatcttttcaaggatcttacatttgattttactttacaagagagggaaacagaaacatagaactcttgtcaaaagtctagtacgtacaactttattcactacctctcatggttttgtctacatagagaacatcatcaatccaagcaactatgttaaaagctaaaccttcaagtactcttgagtagctctccaacacagcttttccaacatcctgcaaaccaaaaagcacaacactttttaagtaattactatagtgtactatcaaattcaatgagacactctattcttcagtttttaccttattgtactgaatcttgcatatatctaatgatgtctgagacaattctggataacgctgtttcaaacagaagaggagagtctcagctctctcagccataacatagttcttgtctgttctctctgtagttgacataagatctttcaccatgttccatgagttcttggagttactaagacaagatttgcgtctccatgtgtacatcgaagcttctactctatctgctaactgaacagcttcatgttcggaagatatgttcagacaatctaagagttgctctgggaaaaaccgaccagaaccactcatgtaacggtaaattgaatctccaacactgcttttaccacactgcatgtagagattgtacatccataattagactcaaaacttcaaaattcctagtaggtatgaatgaatgaaggtaacaaaaaaaaaaacctttggaagagttgtcatgtaagagtctggaatctccatttcactgagaatgctactgttgatagccattgcagctttatgaatctgattggtcctttctctcttgttcttgagttgttttcgggctttatctgacaaaccttctgatggtactagaggaactggtaaccaccatgtctcttcgttcctttgtactataactttcctgaatgatccagtcgaagaacgagctgatttcatcgataaacttccttcttctgcataccaaaactctgtgttctgaaaactatccaaagcttcctgtaacaaacaaggatcaaaaacagatgtaaccatgtatcattcataatcagaccgagaa

SEQ ID NO: 8722 - DNA, 465 bp, Arabidopsis thaliana landsberg
  unsure (1)..(465): unsure at all n locations
tttacttcaattgcactcttactaggtagaagaaattaaaagtaattatactcatcattcttctcttctcattgttttgnctacataaagaacatcatcaatccaagcaactatgttaaaagctaaaccttcaagaactcttgaataactctctaacacagcttttccaacatcctgcaaaccacaaaccataaattgttataatattcaataaaacatgattcaggtcactgtttgtttcttaattaccttgttgcaatgaatcttgcaaatatctaacgatgtctgagacaattctgggtaccgttgtttcaaacagaagagcaaagactctgctctctcagccaaaacatagttcttgtcacttctctctgtaattgacattaaatcttttaccatattccatgaagacttggaattgttaagacaagctttgcgtcttcatgtgtacattgaagcttttac

SEQ ID NO: 8723 - DNA, 1444 bp, Arabidopsis thaliana landsberg
aatgcaaccacatagactatagttttatttatttattttcactataaaataactaaatattatgaacttattgaagaaaaagtatactatagttgtgaatctgtgatatactagttagaacaagaatctttacaaaaaaaaaacacatgggatgttaggagaaggagattcggattccaatgatccaacggtcagagaaaaatcagaagaaattttcacaaccgtaggatctgttcccttaaccaccttgtaatgccggtctttattaattttgagaaaaaaataaaaacagcaccaaacttatgtctctcatgtgaccgaccaccgcatcctcagttgacctgtctctgcccccactttgtctccccacacaaactgaataacaagaagaagaagactttagatatcaaatgactccacgtgtcgatattgtattggttttcattggttgtatcgtgtggaccaacgaagcaacatataaaaagcacgacgcggtgccattactacaataagagaagtgtaggagaagaaagttcccatttcataattgtatcaaattgtgagaggaaaaaaagaagttcaagaaatggagaaggaaggactcgggcttgagataacggagctgagattgggtcttccggggagagatgtggcagagaagatgattaagaagagagctttcacggagatgaacatgacgtcgtcgggtagtaatagtgatcaatgtgaaagcggcgtcgtttcatcaggtggtgacgcggagaaggttaatgattcgccggcggcgaaaacccaggtggtggggtggccgccggtttgttcttaccggaagaaaaacagctgtaaggaagcttcgaccacgaaagtggggttagggtatgtgaaagtgagcatggatggtgtgccttatttgaggaagatggatcttggttcgagccaccgctatgatgatctagccttttctcttgataagctcttcggtttccgtggcatcggttagtaacaattatgttctcttcccataaaagtagagtggtaattagattaagaactaattatatatagtatacaagacgtccgattaagaatttagagtgttttagacgtaatggagtagtattttagtgctgttctttctttttatgtctacaaccaaaccaacaccccaatttatgatacaatgacaatcactaatagaaatatagttacaattttggttagcagttgaactgaatgtgttagcaatgttatagattttaatttaaagtgttatgaaaggacaaatatgtcgagatttttattagtcatctaagaatttttttttacctgttctaagagacttaagactagtcctaatttctgatggtccaactggttatttttctccaaactgaatttgaaaaatctgaaaattttctctcatagaaaatttgaggttgcagtt

SEQ ID NO: 8724 - DNA, 3024 bp, Arabidopsis thaliana landsberg
gcgaaggttgatggacatgcacatggtttttgcgagcatcttactacactttctgagcgatctgcggttccctgtatacatctgatttttaatcaggaaaaatacaattgtaattaacttatcttttaatcttgaaacggtgtatttttgtttttaaacgaaaatctcttaatgatttattattaactacagtcaaagacattggcaattggaccgatgaataattagcctctcttccatatttaattgtcgtgttttcttcatattgcaattgttaacgtatttatcacgccacgtgattgggcgtttgggcctaatggacctatggatctaacgatggagatactaactagattatcactaaaatctcttttgaagttccaatatgtatcgaagacatggttttccacaatccgtagcaaagactccatcaattcgttggtctctatgtcatctacacgatcatcgcgatttcttatatctctttcaaaaacggtgaattgaccaacaagaaacctaaaaagagtttgttcttctttacatcttcacaagaggaagaagaataaaagcctttaataagtgatctcagttttaaactttatccatgtttttttgttaactcatgaattgaaagagaacaaccaaagtgaatgtagcctgataaaacaggatgaaactattgaaagattcaaactttgtttacagaatcatccttcttggccacttcactactttccaacggtggtaaactctgcacaaaagtaaaaagcaatcagattacaaatctctcatgggcaattcatcgaacaccttatgtgcattacaataaagagagatcacagagccagagaacgaaatgaatggttttaaaccgatcacgcttatgggcattatcaagaacgaagaaagtgagcaaacctaatacatttgagaaccctaacatatgtacagaaagagaaggtgaagcttacgagatctggtttgtagatgttgtggacaacggaggctccggcgagaagggaagcaacgacgacgagtgttgacattgccagagacggagttcccgtcggcaactttcctttatacggtttcttcatctttggctctgctttttgactgagcgcgcgatatgaagagaaatttgaaaagcttttcgaaattttgaaccatcatcaacaagtttgcttttatagcaagtcggctttttatgatttgaacgcgcagtctcgcgcgtgagtaacacgtcacctccctgcctgaatctcattatctaaggccaaagttttgaattatataataaggtcaagctactctaaagaattatggaaatatcaaaacacttttttgaggatcgtttataagcttcaagaccatcacttgacaatcatgagagttcaatacctcaaacctcatcagatatgtcacatcattcggtactggtaatgatatccttgcaaaacatgaattcagttgacatatcatatacatattactagtaagctataagaatctcactcaacacacaaatgaatttattcttagaacttcatacgacaaccagtcattatgacaatcatcaaccaacttgaagaagaattgcttgtaagggagagggaaaggtcacaagaggtaggcccaacaaaactcagagcccacaactatattttcatatcaatgggccatacattgtacatacatcaatgcgtaccaaccataatataaaacattcaacaccgaagttattgagttttcatctgacactccaaagttcaaaccgaataatcaaaacacaccaaagcaaaatccctcaaccggttaaacccaaaaaactaaccagccagtttgaaaccatttaccactaataactataccaataatgccaatattacccgtaacttttgaactcgagtccttgctgcacattgcttaaaatcacaacgaatttcgccaatcaaatataaaatatctccaacaatttttaccgacttcccttgaagatgtttctcgtatgagatccttgtgcattgcacagccttgcagggcataagaggttgaaacctacgccgttttcgtaatgggcctaataataggccttaaaaagcccagttacctctttctattcacggaattgatcttatcgagcctccactcatctctaagcctggcaatgaaattgtcggctttcgtatcaacgtccgggcttgggcagaatcccggcataccgccgccgctgacggcagctttagtctcaactccgccatcagattgtgtgagttctagaccccaaccgatatcgaacacttcccgttcaggggagctacatctagagctctgattactccgtatcttcgcgaaatcaccactcacgacatattttagcggcggaactctaaacggaggcggtggtggaggtggaggcgtaatttggattaacggagatccttggccgttgttctcttcattgaaattcttcggtttcgtcggacgcggaggtcttccggatttcactctccgtggtggtgtctgaggatcaaattgggtatatctcggcggtggaggtggaggcggcccgtaacggaatgaatctttttgttgctcttaactcctttcttgaacaatccgtagaatactgattgtgacgatcgcaatggaggcggaggtggtggtggaggaggaggcggagacggtaggtgggattaacgattggtattgcggtggttccgttacatcttccaccatcggagaagattcgattctctcttttctcttcgatttctgaagcttcttcttcttcttcccttgattatacagagaagcgaaaaccattttaatctctttcgccgcattgctctttcttctttgaagagttccttgttttcttggtggcgtacgagctataagcggctgaggaggtggtgggggcggtggaggcggtggtgacggcggaggctgaaacgttcgtttaaacttagtctcactgcgtttggagtttcttgtaatctctgtttctacagaacgatgagc

SEQ ID NO: 8725 - DNA, 1511 bp, Arabidopsis thaliana landsberg
  unsure (1)..(1511): unsure at all n locations
gattcgttgatgtttatatagtttggagttaatggatcctgatcttcatcagattattcgatcaaaccaatctttgaatgatgatcattgtcaggtacggtttttactctgctatatttgatactatggttgatttaatcacaagtgattcactttttcttcttttgcagtacttcttgtatcagattctacgaggactcaaatatattcattcagcaaatgttttacatcgtgaccttaagccgagtaatttgcttttgaattcgaattgcgatcttaagattactgactttggtttggcaaggactacatcagaaacagagtatatgacagagtatgttgtaacacgatggtacagagcaccagagctgcttcttaatagttctgagtatacatctgctattgatgtatggtctgttggttgcatatttgctgagattatgacaagggaaccgcttttcccggggaaggattacgttcatcagcttaaacttatcactgaggtatgatgttctgttttagaaagatctgtacaaatgttggaaacttttatttgtgtgttgcaatgtgtttatgagttgtttcatgtggttgagtagttgataggatcacctgatggagcgagtctagagtttctcagaagcgcgaacgcgagaaaatatgttaaggagctacctaagttcccaagacaaaacttttcagctaggtttcctagtatgaattctacagctatcgatctactagagaaaatgctcgtgtttgatccagtaaaacgtatcacgggtatgatgagaaaaattgtacatagcgagattggcatatgggtgatgaatccttgatcatactctttgttttgcagttgaggaagcactgtgtcatccttacttgtcagctcttcacgaccttaacgacgagcctgtttgttccaaccatttcagtttccattttgaggatccgtcttccactgaagaagagataaaggagcttgtgtggctcgaatctgtgaagttcaatcctctgccgagcatttaaaacattatttaagaaggggaaagcaagttttatactctgacattgagcaaaacaaattagtagtgtttaagctctgtttctccttcatctcatgttgatcgttgtttaagctatttcactagttaaaaaagctgtcttgcaactcaagaaattgttctataaggatccttgtaacccaagacatatctttagtagttatgtccattcttattatcaggatgtcttagatagtgttctgtttcttctacatatcatgttgttatcttgtaactcaagaaattaaattaaaaagctatctttgtttagacttgtatcatgtcacttggattgtactcgtagaaaatgggaaaaactcgatgtgtttattcatctccagcagtttcttcaagcactacgtcgagctcttgcaaattttggtaatgaacactagttcgatccttcactctcgnaactcgacnaaaagtctatcaacttcgtct

SEQ ID NO: 8726 - DNA, 1178 bp, Arabidopsis thaliana landsberg
aaattttggtgatatcctatcccaaagaaaaatctaagtaatgcttatatcatttttttcaagttgtgttttttcccaagtcaagacaaatagcaatcagattaaaaccaaaaataatagaataaataaattgtaagtttctttaggtcaaaacagattgttaagtttaattgatataataattttcaaagataaaattaatcacaagttgtgggggatggattatccgaagtacaatcaccatgtctatctgaattgtttgaattatccaaatccacattatccggattattatccatattatcgaaaacatagttttccaattttttttttttttttttgataaaatgtgaattatattaccaaaaggaaagaggttatttacaaagctgggggcaaggagcttctatggccaaaaaaaaataaaaagccttagataactattacagagaaactgaaactaattttccaatgttaacaagataaatacatatatgtctgtaaagtataatgtattaattatcaattgattttgaattagaagtctaagaattttataagtgtctctcatctaattttcaaattcaaaagtatactactatatctattccataaatattaatatatatttacattttgatcgatattcaagtttgtaataatgtggatttaccactacttgtttacaacaaaagatgacacaagtagggtccttcgtgatttagaacaaaaggtacaagttcgtacgcgaaaaaggtacttctacaagattctgtgcttttcacgaatgctctcatagtctcactaatgcacacgaacgctttcgcaatattctccgtacttgtcggtacttcacgaatacattcccttacaaaatgaaaaaaaagttgtcataacttttttaaaaaaatcgtgtcataacttcaatatgatcacaaattatattaaaaaagagtacaatttcacttcataatccaaaggctagtttgttatccaagtcgttctaccaatccccaaaatgtttaaaagttggagtttgcatagagaatatcagaagaattatataatctaagcgtaaatatatgaagaatataattttatgggtgaataatctgaatgtaaaaggagttgaccaggcgttgagtgggtgacctaccggcttaagggaatcacacgct

SEQ ID NO: 8727 - DNA, 1003 bp, Arabidopsis thaliana landsberg
tcttggtgacatatttggtgggataatgaaatgtgatgtgattgctagtggaatcgtgaacgctgcaaaagaggtgagtgagaaacaaccttgttaccataatatttcatatattcatgattgaaaataaatccgagtgtttgtgtggaatggcgaggacaggtcgcattgaaagtgccagtggtggttcgtctagaaggaacgaatgttgagcagggaaagagaatcctcaaggaaagtggaatgaaactcataacagctgatgatttggatgatgcagctgagaaagcggttaaagctttagctcactaatctctctatatataccaaaagccggtttgttaattgttttgtggttgacgcccaatttacactttcttgcggatatcatttcctcaaacagatcaataatgaactggtctcctttttttgtgtgatccatccaaagagattcaaatcagaattctcaatatctttttgtatttaaccaactcatatggttgatactagggtttcaagtttatctcatacgtactgttcctatcatgaataaaaatcgtttttgtgggaagccacactatagctgtcactgaaacaacaaaattaatccctctctctacaaaaggctttcacaaaacagagctttcctctgtttccaatttaacggtcaaaacgataaacttattttttgatagaatgtgaattatattaccaaaaggaaagaagattatttacaaaaacttttgatcaggattgcagctccattgttgtagtgatgcagctctattgctgagggctatgatgaagaggaaaatcacactaacactactcagctcttgtccaagaagtttttattcatatatagggtttctagtaaagtgaaagatgctgatgatttgttctgtaagaatgctcttttatatttatgatcgacgtcaatgatgatctatgttcaagtgatttggatgatagcacacaaaaatatttgtctaaactctccttg

SEQ ID NO: 8728 - DNA, 967 bp, Arabidopsis thaliana landsberg
  unsure (1)..(967): unsure at all n locations
caggaagacaatctgttatcctatcattttcgcattcttgttgatatgataagaggagctaccattggcttaaattgagttcacattgtcctataaattaaatagatttcccccctgattaagatgtattcatattttttttttatttttttttgataaaatgtgaattatattaccaaaaggaacatgtttatttacaaaagcttggggcaaggagcttctaagaccaaatttttaaaaaaagccttagataactattacaaagaaacttgtgattacatgagtttgctaagcatgggagaccattgagagagccgacgtgtgcagcctaagcggaaacgccttgctaggagaatgtctttgatgtattcacaattgagtacttataagctgatataacagacttggcagtaattcagttttactacatgtacactatcatttcctagtttccgggattgaactcattacaattacaaaaagacgagacacatcgatattagtcctaatttacaaaaaaggcttcgaacatttccactcaatactgattcacaagtaaacaacctctttatttggttcagattaaaagttctaagagcaatgtccttatttaaagatgattgggcatcacacaacgttttgggacttacatcaaccattgctgcctgatggaagaaagcttaagccaagtactgtttcatccaggaggtgaagcgagaccaagcaagctccannnnnnnnnnnnnnnnnnnnnnnnnncccatgcttttccttctgctcactccttctggactcctgttcaagaacgcgtgtccattacctggatagatgtgaacttcatgtgctactccagacgctttcagcttctcttcgagattctttgctgcctgcaaaggtttgtaataattcatgatgggatctcatgtcaatttcagaaaagttgagatgtagtgtagtgtatatcaca

SEQ ID NO: 8729 - DNA, 1674 bp, Arabidopsis thaliana landsberg
  unsure (1)..(1674): unsure at all n locations
taatttaagcaatatatatcactacaaaaaaacggcctttaacgtcattttatttagatggtttccttggtatttatatgacctagagatactgacatccgtatagaatagagacataataacataggatgtaaacctgattgcgtgacctaacaataagaagaaaactttaaatacaattactgaccttggcatccgacgtatggnnnnnnnnnnnnnnnnnnnnnnnnatgcacaacttgcatatcttaaattcacattataatcacatatacaccttgttgttggatcaataaattccttcttattgtactctgttaaattctggcatcccaaagagtctataaacgaaagatccgtagtgtgaataaaccatccaagctcaacgtgagactatcgtagagcatggatctgttgtggactgtatctacccaacatatcatacggttcgtctgttaagaaagcaactttgcaccctttagttgttgtgtaacttgtgttactatcttctattttgacaccaacagtcaacacgttgaaccccataaggcatgcttgccttgcaggctgcagcatccaatagcattgcaacttgttgaactgaatagaacacaagcgtggagtatccgattcgtcagcactgccttgttatagcaattgattcttgcaaagtaataatctgaagctataaggttttttgcgccacaacttgacttgcatcccaccacacttggctcgacattcgttaaggatgccgtattgttgcaaccagccgctataagtgtttgtgctatttttcttatgtatctcttctctgtttatagtctcagatttctggtatgcaggttgtggccagagattctgttttatgaagctggtccattgatggcctaaagagtgaatagataagttaagcagtgaaggtccctagtttctgcaacttcaaagagctagaggaatgtgttgagacattttgagatatacacaaacaaaaattaataactaagaagttcattaaataaacacataaaacagagtagtcatacaatagtcagatatgcatgatggacaaagagatattcctaaatatagatagagcgtttggtggaaacaacttcacattcagttctacgcttaacacaaatagtcctagagtagtagacatggcatgatagctaaatagatatagatagagtgtttggtggaaacaacttcacattctcttctacgcttaaaacattttcctagagttcacaacttcacattcgatctccacattcaaagtatcttcatccaagtaagcctcctgaagatcagctaaagacaaggattgaggaatacccctcgctttggtcgctgccatgatccattgttgaactacaagaacaaggaatcaatgtcgtcaaaagagttgggacatttgcttattgaaaatgtcatcagtatcatccatcaaggcaagacataagcattgtgaaaatagtaatatcaaaagtttttgacttacgccagactgttttgtgtttggatccacgcgggtctaaagcccttagttgtgctcgcacggaaatcatctcaccaggcgataagacttcactgtcagctaaatgcaagtacttgcagaactcgtcatctgcctcagagtctccctttggatacacagttagagtcctg

SEQ ID NO: 8730 - DNA, 1962 bp, Arabidopsis thaliana landsberg
gtctaatttaatcaatttcggtggttgcatgcagattcaagctttgtgccaccactgatatatgcagttcttgggagttcaagacatcttgcagttggtcctgtctcaatagcatcacttgtgatgggctcaatgctaagtgaaagtgtttcaccaacacaagattcaattctatatctcaaattggctttcacttcaactttctttgctggtgtcttccaagcctcccttggccttcttaggtactaatcagaaaactcaaatcaatcttaggaatctgcaatcgtcatgtgaaagaatttgtaaactctcttattgtagtttaagtattcttattagtgtagaatatattcaatgtttgcttaagcctcttttgttgatcttatcactgaacactaaagggtaattagtcatgatgaatagagagattaatatataaaaagaaccaagattctaaatatagttttgatttgatggtgacatgtactaatatctacacctcccaagatgcttcctagttagtgctttcactgttttattttttttcatggtcagcaactcataatttatgtattaataaatataattaaatttttaatttcaggctgggatttatgattgactttttgtcaaaggcaactttgattggtttcactgctggtgctgcagttatcgtgtcacttcaacaacttaagggtcttcttggaattgttcatttcactggcaaaatgcaaattgttcctgtcatgtcttctgttttcaaccatagatctgaagtaagtcaacatcattaattaactataacaaaaaaaccataaagattcttctctaataatgtttactactacaatttcagtggtcttgggaaactattgtcatggggattggcttcttgagcattctcttaaccacaagacacattgtaagtgtacttagaaaaacttccaagcatttacaaaaagcgattaaccgcaatccaatatttaacatttcgtgttgttttttggcgaatgtgtagagcatgaggaagccaaaactgttctggatatcagctgcgtcacctttggcatcagttattatatcaactctgcttgtataccttattagatccaagactcatgccatctctttcgtaagtacatttttaaccagtctgacttatgttattgttaaaactgagactcatagagattgaatctttaatgcagattggacatctaccaaagggtttgaatccaccttcattaaacatgttgtacttcagtggtgctcatcttgctcttgccatcaaaaccggtatcatcaccgggattctttctcttacagtaagctctccaaaatctcaagctcctttgtaaatatttcagtgttaataagtgactaaagttttggacttgactttgattttttcaggaagggattgctgtagggagaacttttgcatctctaaagaactatcaagttaatgggaacaaagaaatgatggctataggttttatgaacatggctggttcttgcacctcttgctatgttacaacaggttaaaaattctacttgaaacaaatctccttctccttgtggcttacggaacaatgttttgactccaatctattgttttcttcagggtctttctctcgatctgcggtaaactataatgctggagcgaaaacaccggtttctaacattgtgatggcctctgcagttcttgtgacccttttgtttttgatgccactcttttattacactcctaatgtgatcctagctgctatcatcttaaccgcggtgataggcctcattgattatcaagcggcttacaagctttggaaagttgacaaattcgatttcttcactcgcttgtgttccttctttgccgttctcttcgtttctgtacccctaggcctagcaatagcagtgagtatacaaatatacctcaatgttctggtttccaaattttcaggatgt

SEQ ID NO: 8731 - DNA, 3050 bp, Arabidopsis thaliana landsberg
tcattcagcttcatgctaagcttggaaacaggtcttatatagtttcactaattagtacatgcatacgtaaatcaaatcttaaacctaattttatgttgctaagtaatattataatatgcattaggtggtcgaagattgcgaacgatcttccgggaagaacggacaacgagataaagaacttctggaggacaaagattcagagacacatgaaagtgtcatcggaaaatatgatgaatcatcaacatcattgttcgggaaactcacagagctcggggatgacgacgcaaggcagctccggcaaagccatagacacggctgagagcttctctcaggcgaagacgacgacgtttaatgtggtggaacaacagtcaaacgagaattactggaacgttgaagatctgtggcccgtccacttgcttaatggtgaccaccatgtgatttaagatatatatatagacctcctatacatttatatgccccagctgggtttttttgtatggtacgttatttggtttttctattgctgaaatgtcgttgcatttaatttacatacgaaaagtgcattaaatcattaaatcttcaatacatatggaggtggtgtttgagtaacttctggtcgttaaagcatatatactactgtactcttttctttttttcaaattgttgttgtttttgatgtttggactgtttcaaagaaaccaaatatatagcagtttggttcagtttgaaaaccaattcagaaaacggaacaagctgcacacacacatacatacacagatacaaatacatataggggtatgaatttggattttgtacacacaaaagcactctctctctgtatagatcaaagaaggaagggacgttgttattgtttagtcatcagctggatcactgggagtttcatcggcattgcgtttgatcgtcataactggacactccgcatgtttcacacagaacgcactcacagtccccacaaagaccctgcaaatgcaaacccatgttataacaaaacccatcacgattcaaaacaacagcaatagtagtaacttagactctatagtttcaagttatgcctggctcaatgcttgtataacttagaatgacaattcctttgtttggctctgttcctgccccgtcttgaactaaatttatttaactcaaacttgtgtcaagatcaagaatcctacctatctgtaatcctttatagcagttaaagtctgattgctattcatcattcagtctaataactagttgatgatatataggggtaaagtaatgactaataagtcatgaatgtgtttgagtattatacgcacttttgaaaccggccaagtccacgacttcccacgaccagaaaatctggtcgaactcgcttcacttcttggcatatgacatccttgggatcacctgtcttaatccaggcctcgcaaccaacctacaagttttgcacagctaaatttatcataaaacatcacaaagttacagtagttgctatgagatacagagagagtgtgtttaccccaatctcatgacatttattaacgaaaaactcgagaaggtgaagaccttttgccttgttagattgtctcatgtctcggaaatcctcaggggaagcataaatgctatccacgtcatcaaaacctggtttccaagtcacaaacaaaacaggccttaataacaccacaagagagaaactaagcaaaacacattgttctgactcaaagcgagaaacagaacaaaacaaatatcacgaaagagtcatctcctcttctaaacatataaccgagaaaagtccaatacaagctaacacatcctctttaaatgtaacatcaaaatccgaacaaaagtttgtccagaagagataatctcaacgaccaaccgacactactagtaacaaaaaagcacagacgatccttctcggtcaaaactcagagacatatgcagaccgatctatatatacgacatcatcgtccaaaactaagatcatgatttcccacaaacagacatacgcacgaacatattcaaagataaataaatatttaaggagagagaagaaccgtcttcgtcgacgacttgtacgtggagcaagagaatcttgaaatcggaagtgttggaccttacgatcttctccagagtccattcgaatgctcttttgcagctaatcgaagggttaggatagtctttgatcgtcgaagcgttcaccgccaccatcacttttgttggctcgctccccatttttcgccaaatcttcgtatctctgctccaattctcggatgatgacgatgaagctcttaaggaaaacaatcttgctcagttgggggaagaagacaaagaacccttcgcccacgacgtgtctatgcgtcttttagcaaatgaatttcataagcatgctaaaatgcgcaggttttttctgttacaggacagctagctacgcctaccaagttctatcgtaaatgtcctaaactaccctttaatgcggttcatgtgaaagccctttaacaagggcccaaatgtatattagcccatttctataatataatgtactctcttatttcacaaatactttttgtttccttaatccttatgagttacatgttgcactaaaacctctataaattaatacttgtgtaatcttttttttttttttctatgcttacttgtggaatcttacttgctgcactaaagaatttcacaaaatctatttttagttttggtaatcatatacgcctaataattaaaagttcatctattatcattgatgaatgccagtgaaggagactctaccaaagccaagatgcccaatctgatacaactctaaccaaactctctctgcttccactctcgcacttattctcgtctcttcgtattcttttaacgacgcagtcttggcttcctctttggtcaaactcccgtctctttccaccacaaaccgatggtcatcgaactctccatctccatctccgccaccgcaacatccaccactcaccatctcggccgacctcctgtggtggtgatggtgatgaaaccgatcatcacggttgattttcttc

SEQ ID NO: 8732 - DNA, 883 bp, Arabidopsis thaliana landsberg
cggaaatgtacctcagaacgaaaggcgtggataaaatggatgagataggtccaaagatgtcggactcttgtgacattcgaagaattactctgcggacaatgtcgcccagatacatccctcctatcatcttctcaaagccctataaaacaatacccaccaaattgattacctgataaaaaataacttgaaaacatgataaaacgaaacaagagaaaggaaacttcgcaaaatattaccatgtcatttgaattcatactctctgcatccaactcaaggtcatatgaagttcttggcagacgagatgaccaaaagtttccccactccatattgaccacctaacacaaaataacaaagtatcataaagaagaaaaaatcaagtcttttaaattgaatcctgtggaatctaaactttgatggctggtttctaaggatgaactatgtaacgattcttaatagttattaccatgcttccagaagtcgtgcgtggattttgacacttgattatggcatcagttcgttcaaggtaacatgcattactacctgttccaaagacaacagcagcaattgtgtctgggtcatgaaaatgtccaaaggataaagccccaacagtatcattcacctgctcaaacaattgaaactaatatcagcaccacacatgatatcatgaggtttctaagagatagagagccatttctccgatacttaaactgttaaggcatcagaattttgtgacggctaggaaaatcatcaaaggaattgcaatgaaacagcagttccccaagaatatgattcttttgcagtagtaaaggacttacaagagctgcaacgcgaatatctagccctctcttgttcaacgctccttgtagacattcagcaatgtctt

SEQ ID NO: 8733 - DNA, 1807 bp, Arabidopsis thaliana landsberg
gtatcttctgaccatgcattctcttcatttttaaaactgttggccataagcccatccattgatctgcaagaatcttcgacactgtatgaattctgctctgtttcttgctcacacactgacttttccaacctctcatctgcaacaccacaggaactgctcacttgactagtttgaagcccttgattgttttcagattctgattcgatagtattaagcgcatcaacaaaacactccccttcgctttcagtctcttgttcactatccctcggttctcccacaatctcccgaccattttttatctctcttacctcatcaatcccagcacgttttcgtagtcctgattctgatttatcattttcattgtccttagaatggaaatcaactccacctatcccttccccatagcttggtttctcatctagagtatctacaacagagttcgcctccaccatttcagaagcttcatctgtctgcagaccaagagattccactatctctgctttctcatcccaactaacgcaagaagagccacgagcagcttgcccttgagaaggactaaactggaaattatcatgagcatcttcggtttcacattcagaaaggactgaagcaatagtgcaagagcctggtgtcaagctggatgaaacgaacacccctttcggtctttctccagtcttcagtgaagaagttgcagttgaaaggcattcattgtagcctgaaccacttctggactcaaaagagcgagaatgatgatcttgaaaatcatatcttttttccatgtcactggttgaggtggttttggtagaagaggtttgtccactgaagctaaatgaagcaaatgtcttcctggagtgaactatgtctgagttaattattctttaggtgcacggaaacttaaatatgccaacaatatctataatttacctggcattctggttagccaaggaggccaaacgtgacatatctcgactccttgacgaagtttttttcttctgtccatgccagaaaacagatatatatgtgtcaagtaaaagagaattctacagaaaatggtttaccaatttaatctgagaaccacaccttcattttacaatgctttttatctttttggaacttcttgtttccttgactcaggttgcttgatgctcttctgaaataagtaggatctgagtatcgcttcaagcaagatccaggaccatttatatcaaatctgagaaaataaagcaaagaatcagtataacatgatggattatagtacatagtacatacatatcagatataaatattttagcttgaggcatacttatcaagcaagtgtaaccgtggaggacccctgcattcttcatagggatccataataatgtgaggcaagtcgtcataaattaagtgattttgcgtaattgggatacgaggatgccactccagacctgaaccccattaaactccttcagttcacaagatataaagtaagaaaaatacaagcatgaccactttctcaccacccattacttccacggtttcaatacaataaataaaagtttgccaaggggaaccaaacaactaatactatcaattcaattttaagttaatctattttaaggttttgatacaatgatttagtttctcaatcattccagattctaaactagcctcgtcagagaaagttttagttttagggtaagtgaaaaagcatgtgaaggcctacaatgaactaaggatgtgacatagtttattaaaagaattaatgtgaaacctaacaagaatcagacaccttgggtcaagacaatatgaagaatggccagaggga

SEQ ID NO: 8734 - DNA, 1306 bp, Arabidopsis thaliana landsberg
aaaaaaaaaaaaatttattttttttaaaaaaaaaaattaaaatatttttttttttaaacccccccccccccggaggaaaccacaaaaacagtaccctcttctccctcagatcgccggtcacttcgcactctcattagcctttgatccttcaagatctcctcactataaagtcttttgcctcagaggaagaagcaccaactctttttcttctgcctctgactctgaactttaccacatagaggtttattcctctaatgaaggactttggagaagagttgttccagttccaacctctccttcaacctttatagagttcagctactcagtcttctggaatggcgcggttaactggtacggtttcagctctagagattgcctctctttcgatatcaatacacaggaaatcaagattcttccactccctgatcatgaacatgaagacgaaccgctacctgatcccaggacactgatgtttctggatgaatcccagggaaatctttactatattgaggtaaataatcagagctcttcaaatttacgggtttacgaaatggaaagcaacagctcaagctggtccgtgaagtataatgttgatttagagcctcttgcagccgctttccccgagatgatcagaaccgaatactataccgataggcggatttacgcgttctctgtcatcggttttgtaaaggaagagacagatgcagcatcatacattttgctccacattccaaaccaagctgtaaagtacaacttcatagacaagactttcaagaaactttgtgatttcaagtcattggtcaatgatgctcctgaggatcatttttacagattccaaagaactttccagttcatcaagtctcttgctaatgtctaaatagtagtttatctttctctgtaaaatccatccctatgtagaagcttttattcaaaagatgatacctcttctaaaatttcccaatctcttcaagtttcctcaagacttgtttgacgtttggcctaagagaaggcgaaggagagcaacaagacattgcaagctgaaaatacttgaggacacattcttcacttagattatcatcactttcgagaatctcaggacggtataaatcagacaacctatgatcaagatcagcattcctcataaaatcaggaagatagaactcatcatcgccagttgcattctcgtttatcggttctttaccagagactagctcaagcatgatcacaaaaaaactatacacatcactctctttgctcacgtccttcatctttattaactcaggagctttgtatacatcacctgcag

SEQ ID NO: 8735 - DNA, 1265 bp, Arabidopsis thaliana landsberg
ttcaattcataggaagagagagtgatcaccaaaaggaagaagactaggcttgttcaatcgggattaagccgatcaattcgggttcaaatcagacttaacggaaaaaagaataaaccgatttgaaaaagaaggagtataacaccatgacgttggtaataagaattataacactccgtgccgtttaaatctggaacttttttcagtgtgttttagttcggtagttgttgatgaatattttcccgggaaaatccacaagttttgctctggggatcaataccatccccagaaggataatatattcaaaacactgaatgtattgatggagaaaagtgcagcgtaaaaagtgtagaatctgtggttataacaaacaccgcaagattagttcatgatgactttgcttaaaactgcaaagttctccttcaagaacaagaaccatatatatatagagaaagaaagagagagagagcctcttggagatttcaggtatacaactcaagaatcatatctgcacagaccgagcaaggctataaagatacaactgcaaagacaatttacattcaaaaagatgatgttctatgattactagaggccttacaaagttcttcgagtctcttgttggctcttttctcagttattctccaataactctgttctaaaagtccttcctaagcaaaaccttgatccatcttcagttacttctgtagataatcagactaactacttctctgtgaacttccacaagctagaacttgttatatgtattgtatcatcctatgaagactctcttatccgccctacgcattgaatcaatcttgcaaaaaggtttctgattgtttgaatctttctcttcctatgtctcttccacaaattagtcaagtttgctaatgcatcatttcctgatctcttcaagcttcctcaatacttgcttgaagctcggcctaagagtaggcgatggagagcaacaagacattgcaagctgaaagtactcgaggacacactcttcggtcacaccatttccatccttcagacatctcctaataatctcaggacggtacaaatccgacaacctattacgatcaagtacagatcccgttggattcttgtttgtcggctctttaccagagactaactcaagcatgatcacaccgaaactatatacatcactctccttgcttacttccttcatcttgatcaactcaggcgctttgtaaccctctgcagctgaagctctagaacctcttgcccagcgcaagagtcaaaagcaa

SEQ ID NO: 8736 - DNA, 1342 bp, Arabidopsis thaliana landsberg
aaaatcaatgatgcatgtccaagaagatcattgacggtgatggtccgggacagtgtgcatgttttcttctcaggattttttttaatggtttaatcgatcaaagtaattttaaatttgattttgacattttatacgtactctctttttaaccacttttgaataaaaatcaagagaaaatacataattgttaaaccggtaacaaacataaatcaaaccaaacaagaccaaaatcagaactaattgtttttggcggtgttctcaaaactccagctccaaatgtcgtgacgctcgacgccacgacccatcgaaccggaaaagccggtatacatagtctcaagaaccacctccgagagatcaacttgtgtttcgatcaatggcctcttcggtttctttaaatgcgcaggtgcaagccaaacaatgactttactgttcttatactcaatccaagctttgtagttgtctccgctactaagcttcacttccttaaacaaccattgattcttccctctagttcttgtctgaatccaatacccagctttctcagaaacctttgagttaacagagttaatattaacaccaacatgattatcattaatatcaccaaaacgtttgtcttggaaaacatcgaattcgaccgcaaagagatggttattaggattgccattggttgtgaggttaactagaccgaggaagccgcgggttgagtcttggtcgtactcgtaggctacggttgggaccacgatgaaggcgataccatgaccagggttagggtttgaccgtcgaggagtgatggagaaagtgaaagatgttttgaaagagtaaacagaagaagatgtgttgttggaagatttgaatgggattggatctgtgtagagaccttgaccatgtgagaatggaatgttgtcacgggtcatggagagagctccggaccggctcatgccatcggttgctggtcctagctcggcgtacccgatgaagattagatttgttccgtcgaaacggttgaagttgaatttgacggcggaaatggttttagagcttaacaaagatatgaacagaacaaaaatacagagtttgtggatctgcattatgcgtttgttgtttacgtgtgtatgtttttgtttttggtgttatggaagtggaagtagtgctgtaatatatagtgtgacgaaagccagtgaacttcaactatgacttttcaaacatatatagaggtcaaatatgatagcgccaactgggcacacgaaaaagactattttttagtgataaaccattgatttctgaattcaagatggatggaaaaaaaaaactaaagaacaaaacaattattatgaatcgaaag

SEQ ID NO: 8737 - DNA, 2351 bp, Arabidopsis thaliana landsberg
ccttctcgaaatccaatgagcttgcaacccacctgcaaataaaagacaataagcaaatgaagattagcaaagatgaagaagtaaaaagttggatttgcaactgggacgaaaacagttacatatgaataaatgaagagcctgcaattactcactctctggctttttgaaactgctcatctagacccattatatagagtgtatctaaagaatctaccatagttgctccaaggccaccaaagctatcagtgccatcttttgtccgaggctgacaataaaaaaaggaaagaaacaagaatagcttcagaccaatattttttttgcagagttcaggaagaaaataatcttagttcttaacaaaatctttgtaggcctggtaacttcagataagctcataataaaaggctcaacaggatactggaagagcaggcactaaacgtcaaaataaaatttgattcatagagtccgtcgtaaactagatttcgtattcacaagggtgaaatgtattttggaaaataattgtatacctgaagctcatctttcccccatgcatacttttcataagagctccaagcatggatcattgcctcttttactttctgccttcgctgtttatcaactggatcttctggggcatccttcagagtcttcaaaggcttattgccaacaccaccattaagctcttctaactagcggaaaatatagttagttagctaaaacattagaaagactatctgagcctagagtgaggggaaaatattaatcttaccatctgctccaaccgtgaaacttcttcatttagcttaaaaacttcaacctgcaagacaaaaaaaagcaggacaagtgagagaatgatcacaagagaaattgttcacttccttgacatttttcttattttggttacatagcttcttataaacgaatacatgaattgagtccagaagatattaattacagctcttttctagtaaataaaacaccaactgtcttacttatagaccttgagctatgaaggcaatcaaaccattccaggcctaaaccatataacctacttcaccaaaattcgaattggcctaccaataagctatgatacaagaactatctcctactcctaggcagagtctaaccagatttcattagacaaaacatacctcatgttctcgggcaagattaatacgatcccagacaagcatagaaacagagacgaagacaatgaaaagcaaagccaaacgtctcggtcttctaagataatacgcaggattcaaatatttccatatcccataaccactaatcgatctacttctcgccatctctcttctcaccccactcaacaaaaacagagaccaattgagaaatcagtgtccatgaaacagagcaagacaaaagttaaaagcttttaaatttctgatccgaaaagagtaagaaaccgagagagaaataagtctctcaaagaacaaaagttatagatccgattttagtagttagaaggaggaagacgaagaaagaattaaaaaacgaaactttacccaaaaaccaaaagaaaagtatttatttatatctccggcacttttgcttatttattcttttgatgataaaataatcaatcgagtctctttagcccccactggttcgtctctttcttcgatttctctttctatctggtttccattttcgtctcgttggtgttctggtgggtttggtttgtctctgttcttctatttgtggcgttatccatcggttcaattgtcatcttcatcgtttccgtcgtgttatttggtgtttctcgtttgggtctttcgaacatctttcattcttctctttttggtgttgctccccacgaacaggtaacatcatcttaactcttatattggtttcgtgtgtcataatgaggaacctatatttcaatggttttggatgtcgctttgtttcaggatttgcttttgtttcttagggtttattttgtttgttgaaattataagtgagtgtgtggaattggtataatatggtttatgtaaggcttagagcgtggaaatattgaaactttggattgattctgattgatgcaaatatgttagaagtctgtgttaatctcttgaaaacaagcattgatccataaggtttcctgaatttatgtatagtgttagttagaacttatatgtaagttgctccaatgaccgaggaagtaaggttatatagtatgtgaatcatgttttgcttagagctgatttgatttgtctggtcatccatgaatcgtgcttatgaagattaggtgtttttgtttgaagtttctagttttaatgttaatttgttttactttcactgttatcattaggtagattgatgaaaagcaaccg

SEQ ID NO: 8738 - DNA, 1603 bp, Arabidopsis thaliana landsberg
tatgcaaaccattgaacatcatttgatctcttcgtttaggaatttagtctagcatgtgtattaattttatagtgtattatttttcagtgggaaaacgaaaaagactgaggtgaagaaacaaagagagccacgagtctcgtttatgactaaaagtgaagttgatcatcttgaagatggttatagatggagaaaatacggccaaaaggctgtaaaaaatagcccttatccaaggtaactaaactttccctttttattttttgaaattgctaggcttgtgaaaatttgtgtttagaaaaatgcgaccattatagtgtaactgataatagccaatggaaacgaaaataggagttactatagatgtacaacacaaaagtgcaacgtgaagaaacgagtggagagatcgttccaagatccaacggttgtgattacaacttacgagggtcaacacaaccacccgattccgactaatcttcgaggaagttctgccgcggctgctatgttctccgcagacctcatgactccaagaagctttgcacatgatatgtttaggacggcagcttatactaacggcggttctgtggcggcggctttggattatggatatggacaaagtggttatggtagtgtgaattcaaaccctagttctcaccaagtgtatcatcaagggggtgagtatgagctcttgagggagatttgtccttcaatgatcgttaagcaagagccttgatcgatcattgttataactacatatattatatatattgagagagagaggtagagaaaaaaaaaacttatatgtaacttaagatcttattttgtctctcttatttgcatgtacatattttttcatgaaagaatgagacagttgggcttgcttatatatttgatgatgtttaatgtgttaccgttggatacatattttcgcttccattttgtgaaattatattttcttcttttggttagttttttacattatgatattatgctgtgtaatttgtactatcatatgtagaagcgaaaaagacataactctagctaggagcctacgattgatctcccaaatgttgattataatatatacatatgcttttgggaaacttaagtattaaattgacaagttcaaatggtcaacttcttactgatttatatcttaataatcaaaaattacaaaaaaaagttacaagctcatatgtgatgaagaaattagaatcggaaatttaatgtaagggtgttgatataaaaggttcaagttgtagacgacgaatatctatgtgtgtgaacaagtaaagaaaaaacaaaacaagttgagatctaaccttgtgtcctaagagaatggacccgaataaaagatttgactgcttctgctttctatcttatccacacacacatggaaacatagactgtggaccaataatattacccctaccatcaaaactgaaaacaatgttttaattcaaaaaacgaaaaataaaaagaaaatactaaacaataataaaattatatatcaaatctcagatttataaagagtgaatgaattacaaaaaaaatttgaaggaacgagaaggatgcgaaaaagaaccttagaaaaagatctctttatata

SEQ ID NO: 8739 - DNA, 1411 bp, Arabidopsis thaliana landsberg
  unsure (1)..(1411): unsure at all n locations
gagagaaattcgtaagcctgtcattatgtctaactcacttgtcattggttattgttccgcctttgttcntgattagtgtgttaaaaaagttattttttcctgaaaacagacgatggtactcccaaaccttagccgagttgtgaagctggtaagataaacattaaagatgcattttactgatatatgtgacttttttttttaaatcgtaaagcacttgtctttgcctgagttgcggacattttcttcttatcccttggtcgtcccttgatgaaaaccgtcaaatgaggacttgcaagttattccacatcttgaacacccgtttttgcaacaagttaattgcgcagtaaattagtcacgtttttacatactttttgcaacatgtgcaggattgtaaatatggatttgaactttccattctccttgatatgactcttgcttggtttctcgatctgtgttttaaaatggcattccttgcgatgtcatgctcttcttgatactattaacttaataaaaaagtttcttgttgcctttgtatatttcagcctcttcccttgaagggcctaactgagggattcacgggaaggggaaaatcagaggagaatgagatatacaagcttttcactaatgttatgcgcctacatcctccgaaggtatgcctaatatctttgagaagctttcatcaaattaacaatgaacttattcctgtatgactttaaacaatgtctgaggagccgtagatgtattgttatacctaagtgagatacatagactagtctgattatgtatgtcgcttggacaatatctcttctcaaattctctttaagaggtacacatccatctgtggtccatgtatgcttttgcaaagcttctatgtcacgtgctatcctacttagcagaggagaagctacttatattagttgtttcttcgagtatacatgctaaaggtaggaggcatatacccatattgccaaaacagtactgattccttcctgtaaaatattgatgtaggaggaggataccctcagattattcaagaaacaactaggagaagataggagaattgtgatatcgcggagcaatataaatgagttgctaaaggtatgtagatctaaattatatgtcgaagagaaaaatttagttgaacgtgtaatgttttcactaatcgttgcatccttaatgtactctttcccaggcacttgaagaacatgagttattatgcacagatttatatcaagtgaacaccgatggggttatattgacaaagcaaagtgcgtaactcaggatgaaaacacttgtttttttttgtatttatagttgctgattgagaatgcaagcacttctttgctctgtactggcaattcctctctatcatgtacaatggcagtcgttccaatgcctagctagactgtag

SEQ ID NO: 8740 - DNA, 761 bp, Arabidopsis thaliana landsberg
caaaatgagtttgtagacaaagttcaggaaatgtttgataaattgtcaagtcctgttgtaatgatctgtggacgatacatgattgaaacaggctcaaaagagcagagagaaatttgtaagcctttctcacgtgtcattgttcattggctcttctttttgtttgctttcattttttgaccttttttgtttgtgtacagacgatgatactcccaaactttggccgtcttgcgaaactggtatgatagctaaacttaaaagtaacgttaattgatagtcttagtacttatctattgtggtaattttttaaaacttttggtctcgtatgcacaccaactcaatttattcaacatcttgaagatgcatatagtcctgactttgtatcagtcgcattttgatacttttggtaaaactagcttcatatgtgcaagactctgaatgtggatttgcatactttgcttcactttcttgacattatagtacatccatttattggtctgcatttgataaattccagccactacactccaaaatatttatcatagatgctgttgtgtcttacagccccttccgttgaagcgtctcactgagggactcacgggaaggaaaacatcagaggataatgagatatacaagctcttcactaatgttatgaacctactccctccttctgtatgcctattgactttaataactttcgttcatggttttggataaccgatgagaattgcattgatgtgttttttcatatttatgtgacattg

SEQ ID NO: 8741 - DNA, 568 bp, Arabidopsis thaliana landsberg
tgttctttgttatgttttgattatatagtgattactaggatcaattatgggatcgtcacataaaactttgtgtcattgtctcccatatcatttttcaatattctcataggattaggtacttttttctcatttgaatgaccattttaccccttttctctctcttttgtctccattttcactattgttacagataagatgcaacactccaagcaactccaagcaagccatgatcttcattttccttcaaagaaatcaatagtgcaatttgtcgttggtttgtatctggattcgaatttgattttgcaattagggttcttatgaaattaagatcaacttttaagtgtaatttccaaaataatcccaaattaattgttacgagagataagagtttgggtgagaaagaagaggccgtctctgatgataagatgttgtcatctttaagggattcaaataactccttggatcaagtttatccaagtaactccctatccaaagttctcaaaataatctagaatcttaattaacattcataattgattcgatatatgtctatgattgaagcatctgg

SEQ ID NO: 8742 - DNA, 2050 bp, Arabidopsis thaliana landsberg
tcttggtgaatggacattccaagaactcggcgagtctcttgacttgaacacgaggctcctcaattatctcttcgtacttcatgaaaagaacattctcctttgcttccaagctccctttccaatagctcaatacatgttcccaataaggtccatataagagaactcctctacaataagcatcaaacatgagctcaaaagtggcttgatccatcttggtgcgatgcaacatgtttctataatgccagccggagacaaacgtatctttgatacctctacacacatatacggttttgcaagcttttgtggtggcttcacgcaatgcttgtaagtgcatgtgtgtagaaaagatcataggagaagaatactttgcgagatccggaatttggctattagcgtataactcaacctcaagaaatgggacaaggtcatgagggttttgtaagagcaaaggatgtgtttgaggggttccgcggtacttttctctatgtacaacagcgaaaattagggatttgagccaagtggttccacctttgggcaaagaagcgaggattatatcagtatctcgtggcttgaagtgtttttggacgtcaagaacggcttggagtgtgtttggatagtaccaacaacctttgtagttgtagagaccataacccatgaaatctttgtctgaaggtagagaagtgatcaagttcttggtttcttgactaacgttgtcgtctttcatgtagtttggaaggtgatgagcttctttagaagcctccattgtgataatttgttcccacgatttgaaacacaaagagaggatagtgaaaaaggtgaacataaaagagtttttatttacttatttgatgctttgaacaatttgaccttacaagcagatggttatatttcatagacaaagtgtttagggatttgttttaatcatgcgtggatcttaagccacacatttcctatattacgataagaaatcttatcttgaaaaaaaaaaaatacttgatagattttgactctttggaattgtagtttagtcgtgtactagtgtctagtggctagtgcatgtgcggtgtcataaatttaaatctaaatgtgatagtgagcgacaaaattttgtttctttctaaaagataatagtatgattcaagaaaacacaaacataatttatttcattttattcataaacacaaacacaaacataacagcagaaaaatatataaaacaagaaataacataattgaagcaaaacaagaacatgagaacaagtttcaaagattgattcaagaagaaaatttaagaccagaacctttaaacttctcttcaatggttctatcaatttcctctgccaatgactcactcaaagtatctctccatcctccaatctctccttttctaaagaaagttttagtctctattccatttggcaatttcccttctttgttaacttccaaattacttaaactctcaaagctacacaacttcacaatctctctcacttcttcttcttcaataaagccacattccaagaactccgcgatccgcttcatctcaacttcggtctgcttctttagctcctcgtaagtaacaaacaagaccttgttcggattctcgcggcttgcataccagtactccaatatatgatcccaaaagggtccacctataaacttcccttcacaaaacgcttcaaccgctttttcgataggataatccgcggtttcttcaggagctagctttttcccaaaatgccataaggacacaaacatgtccttagggttcctacaacaatacacaatcttacaagacgagctcttaacggattcaggcagcgaaagatgtgatatatgcgtgttcatcagtcttggagaaggcaacctggagaaatcgaaatctggagattcgtagtaaactccttccaagaagggcacaagaaggtgtggattggtgaccaaaagaggatgattaccagaagaagaaactggaaacttgtgaaggttaaggagagcaaagacaagagcttttaaccaagtggtacctgatttaggattagtgacgagca

SEQ ID NO: 8743 - DNA, 886 bp, Arabidopsis thaliana landsberg
gcagaattagaagatttcatgttactttgataaataacgtgaaatattgataaaatatgtagatttctttcaataattcatgtgattctgttgaataacatggtatatattgctaaatatatgtaatatatagatctattagttttaatagcatgttttatttttaaaatacatgtgttttgaggtttagatttattcccttcggatgtaatattggtgagtgaaagagggatctagcatgagatccagcgagtaaataaataacaaggggtgagagtttcaacgaaaggaagagattcatgatagagatgtttgtctcactttattaaagaacattgaaatatagaattcctaaaccaagaccaaatgtttaaatttacgaaatctcataaaatctaaagctaagaaaatacagagtatttctattatatttacctttcttataagcggtaatgatgttaatgttatagggattaggcttcacgattgggttttaattttattaaatagatcaaatttaaattaattatagaagacattgttttcgcgtttattacaacaccactaaaaacgtttgatccacttttattagggcgaacgacctgtgtccccctcggaagtttcatatagcattagaactacacaaaatttcaacctcgatcttggtctacacaaataaaaagttctagtcctatttctccctaatttgaaagttcgaaacctcaaaacacataaacgtttgattaattgggttataacataaactgatattaaaccacttaaaccaatcctaaaccaaattaaaaatatgacccatctccttctaccccatttgacccgtctgcttctccgccatcacctcccgattacaaaaccaacatataca

SEQ ID NO: 8744 - DNA, 1176 bp, Arabidopsis thaliana landsberg
ggagcaaaaggcccagatgcgactatcatacacctaactcttaggaaatttagcattttttgtgtacataaatggtaaactcgtgaaacgggtagagctcaaaagtcacaaggaaagtaaaagagagaaaagaaagaagagaagaggtaattacatgtgggtttagaaaacaggtttacttaatctcttctcttttatcatcaaccaaccatatatggacaattacaagaacacatctatgtatgaacgttacgtagataatattataaaatgtttttctaaaaattaaaagattcacaattcccatgcctcacgacttgtatttttctttggccacctaatttgcatccatcatctctctgtctctatagagagtttctttcaaatcccctaaaacctagaaaaacaccaaagtctctctctctttttgttttactccaaaagccttttacctttgagatttttctatataattgtcagatccttcgttactactgatgctagctcctttagggctttttctcgtttactcatgtcaaattaccttcttgtcccttggtgtttagggctctgatcctatataataatacttcataggaaggagaaggagcccttcgtcgtggtttacttggtcccgatcggagatggagagagaatgtgggtcgaaggagttgttcagcaaagaggagctacaagaaataagtggagtccatgtgggagacgattacgtcgaggtgatgtgtggctgcaccagccaccgttacggagacgccgttgcgaggcttaagatattttcagatggagaacttcaaatcacctgccaatgcactcctgcttgtctcgaaggttcctcttcttctctctcacatctttctatatgcatgttccatgtgaatgtgtatggattcatgatagtgtcaagaatgcaatgtaactgttgtttggcctcggtgaactatgaggctgcttgtatttgctagatgtgatatgtttcatgcagtcttttagagtgtgggataaccttacattgtaatgtatctccattttatatcacaagttcgagtttctttcaaagtgatctgattgacagctttcattctatgatggtagacaagttgacgcctgctgccttcgagaagcattccgagagagaaacctctagaaagtggaggaaca

SEQ ID NO: 8745 - DNA, 1902 bp, Arabidopsis thaliana landsberg
gtgaccaaggataagcccacgccaaaaacatccacgtaaagaactcattgattaggtccaaagaaatttggagaaaataaaacaaatcctgacgtgaaaataaaaagaaatcatcactttttttttatctcttttattttcttctaaatacaaaaattgaataatcaattaatttttcatgtatgcaaacaatttcttaacaagtcttgtgagctttaaatgaaatatagaggcgagtggattagacttgatcctgatcttttattaagctgatccatattttacattgaaataaaggacacaccgtttaacacgaaaatgaagagacaaataaagaagaggaaaagcattgattctgaaataccaatatagtatcattcgtgaaagaagattttgtaatattccacaaacttagaaattaggggaaaagaaaacaaaaaaaaaagataggaaaaagagctttaacttttggaattggaagaagcacaaacacacacacaaaaaacacaaaaaagtctctgttttaccttttaaccccttcaagaatcctcctttaacttcagtgccctcttacttttctcttatcggaatatctctcttcctctgtttcttcgccattctctcagcttttctccttcttcttcgtctttgtcaggtaaagagatagaatgagcatatcccacatacctctctcctcttctcatctttttagtttctcgaaagtttgcatgcgcagactttgttataggttataaactttagttttaagcctattttcgtatgtttatggttgttgtaatagttgagaattcagagtatgtcaagtgaaacttaaaaagaattctatatgtatgtgtgtatgtgttaaagagtgaatggagctgtggacagaagctagagccttaaaggcaagtctaagaggagaatctactatatctctcaaacatcatcaagtgattgtgtcggaagatttaagccgaacttcttccttgccggaagatttctccgttgagtgtttcctcgatttctcagaaggtcaaaaagaagaagaagaagaagttgtctctgtttcttcttcacaagagcaagaagaacaagaacatgattgtgtctttagttcacaaccttgcatctttgatcaacttccttctttgccggtaaatttctaaacttctttataccttttctttctcttcttataatcgaaagattttaagttatatttttcttgatttctttttttttgggatatttttaggatgaagatgtggaagagcttgaatgggtatctcgtgttgtggatgattgttcatcaccagaagtttcacttctcttaacacaaacacataaaaccaaaccaagcttctcaagaattccggttaaaccaagaaccaaacggtctcggaacagtttaaccggtagtcgtgtttggccactcgtttcaaccaatcatcaacatgcagcaacagagcagttgaggaagaagaaacaagaaactgtccttgtgtttcaacgaagatgcagccattgtggcacaaacaacacaccacagtggagaaccggtccggtcggtccaaaaaccttatgtaatgcatgtggagtccggtttaagtctggtaggctctgcccggaatacagaccggcggatagtccgacgttctcgaatgagattcactcaaatcttcataggaaggttctggaattaagaaagagtaaagagttgggtgaagaaacaggtgaagctagtactaaatcagacccagtcaaatttggcagcaagtggtagataagacttaggtaaaacctactttttgtaacataatctgtagaagttgtaatttaacaacttgcttcttaacattttgaaacgtgtttcaggaactagtcttaagtaaacaatgg

SEQ ID NO: 8746 - DNA, 1807 bp, Arabidopsis thaliana landsberg
caggtcgactctagaggatccccctctgcacttgaacatgtttcaagtagttagttgtgagctaagatagcagcatatcatcttaagagattcatcatcagatattcacttacttcgtcgctcccttacaacacagaacaaaatgacagttagtaacattacggctgcaatcaaactgataagaatcagaaggactctcctcttccctgataagccatttctgttccaccgcgctgaaacaagcaagaaactcagtatttgaagtacttcgatactaaacattgacatgtttctttattctctttgttttaatgaaacagagtggttgttttatgaagagcaagaacgtagaaaatagggattctcatttatagatgtgtacctaactcttccttgtctacacgtatgtagaaatcttgtcccgagttcaagtatgtccttgcatccaacataccaccatgccatttcaagcatcctattgctcctcttttactctcgtggtaagcacttgcgtaacgacacaagagcagttcttcaagcacctctgtttgcactccttcaatgttatgttcatatccacacttgcatctgatgtgtcgggaatcttcatgcgctttaacttcacaaacccgtctttctcactgcatattgaagctctctttttctttgtacacccgccagaagagtccctcaagaaccaatgccggggaaacttgggctcaaaaccaggtaggcatgtgcactcaaacgtttttgagctaggggaatcacagtaaccgttagggccacaatgagcgtagttatcgcactgctctttaggaactgaccagaaatcattccatctcttgtccctcgcaatccatgtaaaccggtgcatggttccagtctcgttcaccatggttcttgttatgaccgaagcatctgtcacaccgtaagtgaaggatacttcgtcctcattattcacaaatgagttattgaagatgtaccctattggcatttcaggcaccccgctccacctatgcccggtccatgaccccatacgccaccatggggttacacctttgtacagaatcaactgtggaaaccctctacgttccatccgcagtattaagtctccagaaccagggtcaccatgagacttccatgatgttagagagcgatccaaaccgtcttttcgtgtgaatcccaatctcataaacggaagaaacgtgtctgtagggtgatcaaagctctcccagaaacttctccctgtgactggatcaaacagaacaaggttgcctaaatcagagagtgtagcaactaaagttggttccaacatactatctgaaacatttgttgaccagataagctctgtttcattgtcagatgcatagacagagagattgcctctgttgctgaactttaccatcccagaggtgtcattaataggatggtctctgtttgcaacccaaacaatagtctgttgagagatttgagcataccaaatcccaacataccggagctctgaatccccaagactgaagaatccaaacgcgaatctcttccctgcagagagtataacctcaccatctctcaaggactgtcttctcataattgtatccacagagatacaaaattggaagaggaagaaaaagaagataacgaagacaaccttcatatttgtgtttgtttcagagcaaggatttagtgaaaatgtataaatgctgtgtaagtattgaaaaccaagtggatcagtcattaactggagtcacgctccattccggatatatctcaaagttggactttcaaaagatgtaagactgatcat

SEQ ID NO: 8747 - DNA, 2390 bp, Arabidopsis thaliana landsberg
acgcttgatccagttgttctgcatttccgtaagtttgttctaaactcagacatcgagttgctgctttgtggccattctcgcatagtttctgaacttcttctacacagggaacaatgaagctggacgtatggtcttgaatcaaaccttcaccattgaaccgatgcttacaataggaagcagaaacccgataatgtgggatgataactggaccgtggtaacagaagatgcaagcctctcggcgcaattcgagcataccattcttataaccaaagatggtgctgagattctaaccaagtgttaaaaaaatgattctgaaaaattgatcttcttggaatgaaacccaaagccttaaggtatgtaagaatcatattcttattcaaatattgttttgctcacaagcagatgcgaacagttacttactagtcacacaaacagatacaaacaagttttacattatttttaggacaagtaaaaaatcatatcttgagtttaggagatcttgattctctgagcttcctttcttctgacagaacttttgcaaacctgtaataattaggcagtattttactgattaaatccactattattgtatgcttaagtaagaatattttctgctttagatacaagtattattaaaccttttgagagcttcttcattagtcacattttcggaaataggttgataatggccgctttcgagattgacacgagagactcttttctttaataaagcttcaccaacttcaacaagaccttccatgttcttttctgttgatatgtccactgaacctaagtcacccttcaacgaatcatcctgtaataggaaaaaaacatttaaaatgtcagtaaattattttatatttttggtcaataaaattgacccttcactgacaataatactttatttgttacttgtgcttattgtttcgtacaagaaaagtaccatatatagaccaatctttacaagaaatcttttttagcatttgtttataagataagacatgagttcttatgacctaaaatcggaatgttgaacaattcaaagtaaaaaaacaataaagttcggatcgagtttcgataaccatcaagtttctatcattagcgtgggatataagtaattagttaaccaaaaccaaaagagttatagtctgcaattacagttaccaattaatatgaaatcgaaatgtgacagatcaaaccctaatcaaggaagaaactcacatcgatacgtaaataattcttctcggaacgaagagcttgaaagacgacagagctttggtaatcaaccatgtcatgaatagcttcactgtaacaatcaagaattggagttgatccactttcaaagacccaacacatcaatccccatttcgatgccattttcgcattgtacttctcttgattccttatggaacctgtacctatcgatatcaccagaaacctcgtaaaatctaatgggcttatatctcccattacaggattcttctttattatctgttttgtcacttccgcaatggcacataacgtctgaaaaaaagaaacgtcaataattacggacaagttagggttttgagatttaggtttttgagttttgagttaaccgggttattggcagcgatgcaccatcaatgaggttgaattcatgtttaattccttcactgtcttcattggtgaatcgatgagccgggaaaaaagttggtgccgcagatgtacttatacatatgtctgatagttttgcgttcatagcttgattattcaccgcctatgtatttatgagattggatcaatgtatataccttatgatacagttgcacgaatattcacgtagacagatagattttggtgttacctggtaagaagagaagataactggttggagtttcttgatgtcgaagcaaggtatgacaacgtttgtcaaagattgagttaattttgtgtcgcccaagaaaccttcactaagtcatgacaggtatttaccgttgaacttgggtcctcctacaagtctcactatggtttcaccccaaccacagaatatccctctgcacattttataattctctgaaataagactctgaatcagattaaacggaaacagttaagaacagtaccgtggctgtggaaagattttgggtgagtgtttgagataaaaagggacgatttctttggcctcaaacaaagggcggttgctgttgcggctatggccaccgctttggtcttgtgcggtcaacatcgccactatcaaacctccggtgcttgttcgtgagatgacatcgaaataatccacaagccttgcctcctcaccatccaattcctgtttagtagacatttacaaatataacaatcaaattaaactaatatacaatctacgtggaaataagatattcagtttcaaa

SEQ ID NO: 8748 - DNA, 1736 bp, Arabidopsis thaliana landsberg
gtttattaagagatgaacgagaataataacgtacagaacataaaaccgacatagtgtatgattaatagaaaaggaagaaataaaacgaggttggcaacaattttctcttaaatctgctaggcaatgacttcaagtccagatattcttgccaacaatgtcttgtgctatttataagctaagagctgacatagagttccttttgtctctcttgtagttattcgattttactcctccaaatttattttattgtgcagaaccgcattggaccgagctagcatgcttgatgggctgttgttctgatggatcgttttttcatatttgctgcttgtttgacttaatcaatctttgtttgggtcgaattagtcatagagagcaaaacccgtatcccacactttatctaactctccaatctccatattctgtgatattgacctcctattcaaggcggttcaatgattcaaaaaaatttgaatgcctgcgtaataacaacaaaattgttcgaaccctatatatgttgggatataaaccatgttatacattggaagactagaaactaattgtgtaatttgtaagtaaagttcaacttaaattagtatgagccttacatatactagttacaaatatataatttcaacaaaacttttagagagtgacacatgaaataattaataagattacaacatcgacatgtgtcattatttaatcttaaatttgaaacttaatcaagtaatgaaaattataaaatcaagtaatgcataaaccggaatgtaataagcattcaaaagattctaacatttctacaaaacataaattgcgtgcatatatagtacattaatgttacaacttacaagtaatttattctctaaatatagaatgatataaaccataagagcaacacaattcaccgtcgaaatcggttatgggacatgagaaccattagtctctctttggctattctctcgcgaccttaaatggatccaccaatttctcttactcaaatttagaaattttcagcatctatataagccaaatcctctcattaaaaaaaatcattcaaaaacccaaaaataataatagaattttaaaaaaacaaaacaatggctagatttcctatagcaatatgtctaatgttgatactagcagcatcaagtaccatatatgaagcgcaaggtgtattcttattaaggcattacatgaataaatttcctaaaaattcccaagactttgagccttttgcttacaaaggtatgcttagttttgtggacaaccttgagaatatggctccggaaaaaggagagtacaaggatttcttcacaaagctgaaagctttcatgtccttcataaacacggcaaaagggtcgtcttcagagttccagtctcaaatgaaacaacaagctgagggccttttcaaggctatctctgcattgggtgtcaaaggaggatcatcggtaaatttcatattttattattgttcacatgagtattagaagattactctcagctttttgatattgttatcttatatggcaacatcttacgattttaaactatttgtgaatcacttactgcttaaaaattatattgttttgtgttactaactgaacccaattgtttgagcattacattttttgtatgtttaattattcttggttacgtcatagcctgatacgagcaaattgatcgagagtatgatgtcaatgggaaaaacatttgctgaatttaagaggagcggtgca

SEQ ID NO: 8749 - DNA, 986 bp, Arabidopsis thaliana landsberg
actcatgagcagaagttgctgcttgtcttacgattacgttaccgatgatgccactgatctcctcggcgatcgggatttggattctatttctcagctttggagcctgatggtttctcgtccggtggattcaagcttatctcacaagaacgctttggagcgttgtgttgagcacgctaagctatggttagctaattcggagcagcctattgaatcaaactgcaatacttcatgtaaaataaaatttactaaacctgttgtctcttacatctcttttgtttagtttctctgtgttgattacttatatttgggatgcatatgctgcattgagagagaagttgaagaagattatggcgtttgactatttcaccactactccggaaatgaaagctccggttgatgtggcggctgcagctggtaactatacttcttaccaggtgcctgtggacgtggaggcttcagggcattaccagcaaaaggtatccactttagattaggttttgttgattgcctgaagtctctgactttcatcaaattggtagtgaatttcacggactagttgttctgattcattacatactatatagttcagggctttgtggtatgcaaagctcttacttaatctgaaggaggaaattaacaatcacatttctttagttgtggtgagattgagcttaattttcaaggattcagagtttattattgtttctcctataaagtagaagatgtctgaagttgaattatgcagcattagagtgagatgtggtatgagatcattagtgagttaagttgtttggataggatggagaagtacattcttaatttttgatatggcctgttgcttatttgatttttcgactgttctcttggtatttggagaactctatcctggttagaataatcttctcgcggtgcgtctacgatatgagctgtcaatatatttttgattatacatgtgatcgatgttaacaaactgtgacaatatgtgt

SEQ ID NO: 8750 - DNA, 646 bp, Arabidopsis thaliana landsberg
ctgaaactgaagaagcaaataattttgttcaatcatttgcttgagcaccagtaccatctcatgaagtatcctcctggacctccaaaagttcctctggcaccgatacaaaacggaatgcatcccatggcacctggtaataagtctgaaaccctatatcacctaaaaacttgtatacttatcacaagtaaaataagtttgatattgaacttcacttttatttaacactgttgtttcgcagtgcagttaacatgccgatgggatacccagtactacaacatcctcaaatgcatgttccaggccatccccatcatcttgatgcaatgggagtatcgagctgccatgttgttaatggagtccctgcccctgctaatttccatcctttgagaatgaatacagcgaatgagtaagaactaactcgcagtagaatgattattatcatcagttgatggcatgtcctgagaaaaatctccatttttcttagtatggtgatcgatacaactgcgaacgatgcaactcctcaagtgattccaccaaacagtggtgcgatgcctgagatggtagcgagtccagcttctgtggcgtcaagtggacactttccatttgctgcttcagacatgtcgggtatggtaatggacacttcagtacc

SEQ ID NO: 8751 - DNA, 424 bp, Arabidopsis thaliana landsberg
  unsure (1)..(424): unsure at all n locations
actatgaaactttataaatctaattgtacataaatattttgttcaatatatacttgattaggttcaaccatgagagccgtcaaccatggaagctgctaatctccgaagaagtctattttcactacataacataccgaaatcgaagttttactgtgtatgattggcgcccagatcttgtgaagataatgttttctcgaaccgaatggccagtgttttcagcatatttggaggaattatagaactacaaagaagaattcacaagtttctctttatctttcatctcccatagaagattataattgatttgatgatatttgagaccatgaaaacctcccaacaccctgcatttgaaggaaannnnnnnnnnnnnnnnnnnnnnnnnagtgcctaaccactagtagccactcacggaaaataagaactc

SEQ ID NO: 8752 - DNA, 1825 bp, Arabidopsis thaliana landsberg
aacccatctttttcaccctccccacaaaagacttgccatcgtacatagctatgttccaatatacaagggtttcttcctcgatagatatgttcttgatccgccttgtgagtgtccatttgtgattctcgacaagtgtgtaaacggagattgtttctatcgtccccgaaattagggtcaggcgattgattttaacgctttccgcgaaaagtagcttcgtatccggttcccgatgaaatatggaaggaatcaagcatgcttgctctgtctcgggattaaaagatatgatgctgccatcgtttctcagccagtgaagagtgttgtccaagtaaacaggtttcatccgcgtagtgagatcactttttgagctagtggtgatactcgtttccgataatctccaagagtctccttcgttgatctcgaatccgtatacggtttccatctcgagtatgcccacgatcttgaatctcttggttgttagatttcgatttaccgcaaatccaacggacatcgctcgttccgacaagcaacattacctccaggataactaattccgctaagacctttaagtccaccattaactatcattggtataagctttgatccagaatgatccaggattcgaaacctttttgttaagggatttgcaacaaagagacaaccaatgtacaacaggagaagaccagagcatgagccgaaaatgtaacaatccgcactaccatcaaacagttctactccatttcccggtgacatataatcgcatgaagagaccaaaggatggcaacatacataagtagcgccatagctacgtaccaaggttaaacaaactaggtctgacccatgaaggatattccggtccaaatcttggatcacttaaatatgatttgatagaattgttagtgcatcgcatcatagccatagatttgggttctaatctgaagagaatctcgtcgagaaggtctaaaggtaaatcattcatgatggaagatgaatcaaattgagagtttcttggcaaattattcatgattctattttgcttgcgtatgtgaatatttttgtgttattttcaacatatatatatatatatatagacaacatattattaccaaaaaaaagtaacaatcaattctaatcaaggataatctcagtatctcaccattaattataagaaaaattcaattacaacattaatataaatttagttaaatttttgaatgattttgcaagataatttgaaaatcaaatattaatatatattttataggtttgtcattttgcaaaataatctgttagttattaatttcattagttgaacaaagaaaatttactaatataaaaaaatgacaaaatctaatattaatgataaatatttcttaatatctaaataatttcttcatttagtttctaatttttaaataactaacaatgtatttaggctaaagatagtttttaaaataaataaaagtgtatttatgccaaagctgtacctaagatactgtcaaaaatctatcaaaatttataactgggatttgggaacatgacacgtcattggttgttaaagttagtttgcaagatacactgttagtattttggtgtagttaagattaaaaatgtaactcttgcttttaccaaaaaaaaaatgtaactcttaaaattttaatgattctttttataaacaaaatcgtgttcaagcgatgctattgctatatgcatcatgcatgcatgcctaattgtcatatttaaaaaaagtttgtaataatagtgaaactgaaaaataaaagttggacaaggattgatatggtgaaatagcgcctctataatccaaacc

SEQ ID NO: 8753 - DNA, 1744 bp, Arabidopsis thaliana landsberg
tgatgatcaagacttatcactaccgttgcaacaaacacgtgaaggttgaatcctctaattttgtacaaactttgacttttcgaatctaacaaaaaaagaaaaagttgactcttaacaacaaaaattgaatagtaaaaaagactatttatgaacataggaaaagtctaaaccgtgacacattagtcagtcacctaccatacaaattacatcactttaaataccaaattttttattcatttttgttctcttatttactttagtcctctcgaatcccataaagtccacaactctctccttgtagagagagagattttatggcggtggagctcatgactcggaattacatctccggcgtcggagctgatagcttcgccgttcaagaagcagctgcttcaggactcaaaagtatcgaaaatttcatcggtttaatgtctcgtgatagctttaactctgatcagccatcttcttcttccgcctccgcctccgcctccgccgccgcagatcttgaatcagctcgtaacacaacggcggacgcggctgtttcaaagtttaaaagagtcatatctctcttagatcgaactcgaaccggacacgcccggtttagacgtgctccggttcatgttatttctccggttcttttacaagaagaaccaaaaacgacgccgtttcagtctcctcttcctcctccgccgcaaatgatccgaaaaggttcgttttcttcatcgatgaaaacgattgatttctcatctctctcctctgtaacaacggaatcagacaaccagaagaagattcatcatcatcaacgtccctctgaaacggcgccgtttgcgtctcaaactcaaagcctctccacgacggtctcgtctttctcaaaatcaacaaagagaaaatgtaactctgagaatcttctcaccggaaaatgcgcttccgcttcttcctccggtcgttgtcattgctcgaagaaaaggtaaatttttattagatttggtatttagattcgacccaactataaaagttcatagatttggtatctaaaaattgtttcttttgtttgctctgttttttcagaaagataaaacagaggagaataattagggttccggcgataagtgcaaaaatgtccgatgtaccaccggacgattattcatggaggaaatacggacaaaaaccaattaaaggatctccacatccaaggtaaactataaaaagtacaattttcaattacagtatcttaataaaaatcgaaactttatggtgaaattgattgtgctctgtttcttgatattgtgaaaacagaggatattataagtgtagtagcgtaagaggttgtccagcacgtaaacatgttgagagagcagctgatgattcgtccatgttgattgttacttatgaaggagatcataatcattctctctccgccgctgatctcgccggagccgccgttgctgatcttattttggaatcgtcttgaaaagaacaaatctttatttaaggcttttataatataaatttagatccttacttagtgaagtactcaaactatgaatgaaatcaatgtaatcaaaatcaaaaagcttttgctaaatttcgatttgttagttttttggattgttaaattataaattgtgatatattcatcatgtttacttgttacttgcaatttgaagggtttatttttcatttttagttatttgatgtcatttaataaagaagagaaaagtttgggggtggagttgaaaagtaa

SEQ ID NO: 8754 - DNA, 1514 bp, Arabidopsis thaliana landsberg
gctataggactctatggttactgctactcaggacatgctgttttccccaatatttatacttttatggccaaaccatctcaataccctgctgttctcttgacatggtaagcttatgtcgctttaaacaagttcttatcttctacaacgcttcgactttcgcttatgcaaacttcaagaaaatattcaaccattttgatagcagaaagattgataattttgtgcagttttggtatttgtactctgatgtatgccggcgtcgctgttatgggttatacgatgtttggagaatcaacacagtcacagtttactctcaacttgcctcaagatttaattgcaactaagattgctgtgtggactacggtaagtggaccaaatatgttttctttccactacgtattggttcttgcatgttggttggaagtaaaaccgttttgttttaaccgtttcacaggtggtcaatccatttaccaaatatgctttgaccatatctccagtagcaatgagtcttgaggagttgataccatcaaggcatatcaggtcacattggtacgccatcggcattagaaccctattggtcttctctactctgcttgttggtctcgctattcccttctttggtaagttcctctttactattttgatgcaaagctccttttcttgaaaatcatacttttgctagttgtgagaacactcaaaaatcttgcaggtcttgtcatgtcattgattggatcgttgttgactatgctcgtcgtaagctgtcttttccttctatttttggtatatctactacaaatgaggatcttaagtttggatatataagttcatcttttgttttgtgcagactctaatacttcctccagcttgtttcttgagcattgtaaggagaaaagttaccccgacccaggttagcctctcacaaaaacattgtttctatgtgttataagacgattcattaacaaagttttggttggtttttgtagatgatgttgtgtgtcttaatcatcatagtaggagcaatatcttcagtcattggctcatattcagctctttccaagatcgttgagaaattgaccaactgaaaatatttctctgtttttttcttacaaactcttatacccattttgtctttcaggggaatactttttttctttttttctttttctgttttgacttttgttttcgtatagcaaaattcattcttgcattcaaagcttttgtaatatctgagtgatgatctgcatcttaaaactggtttgaaagctgattaataaagattggtacaacattttgccttagccttcaaaatccaaatccaaatctttatctacaaccccttcgttcctaaacccgaaactattccttcgactcttcagaatcaactctgaattcttcatcaactggatgtatttcttccttacccccaacacaggatgtgtttaaacactagctttatctctataaggctctctgagaatagctgtacaacgcttattcttcatagacaagtagaaaat

SEQ ID NO: 8755 - DNA, 870 bp, Arabidopsis thaliana landsberg
gtaattgtttctattttaaaactaaaatattcatccaacaagaaacttgagttacttgacgcatccatcaggagttaaataggtgatgtttgcatattgaaacaccacatattaagaaagaaatggctggaaaaagtgatcttcctgtgatcgcgagagacgacaacctaagtgaagaaacaaaaactctgatctcttcacttcctacataccaagattctcatgagaagctctgcaagtaccaaggatgttggtattaccacaacactctccaagcagtcatcaactaccaaagaaacttccagccgcaagacaccgacattattctcgcgtctttccccaaatccggtacaacttggctcaaggcactctcagtcgcaatcgtggagagatctaaacagccttttgatgatgatcccctcacacatcctttgctatccgataatcctcatagcatagtaccgttctttgagttcgatatgtatctcaaaacctcaacaccggacttaaccaagttctcaacatcatccccgaggctgttttcgactcacatgcctttacacaccttgaaagagggcctcaagggttctccatgcaaggttgtgtatatgtgcaggaacataaaggatgttttgatatcggattggcacttcaggtccaagtatagcaacaatgaagtatctagaagcactcttgagtcaatgttcgagtcattctgtggcggagttagcttctatggtccgttttgggaccatgctctaagctattggagaggcagcttggaaaaccccaagcatgtccttttcatgagatacgaggaaatgaaaacagagccgtgtgtccaggtcaagaggcttgccgagtttttgg

SEQ ID NO: 8756 - DNA, 1932 bp, Arabidopsis thaliana landsberg
acagtaattttatgtataacttttttcgtacctatcttcacaccgcataaattgccaaagtcaaccttttgatatttcattcctcacaaaaccatattaatttatacacctcaatattgtttaatagtattatcatgttggctttcgctgaatttatcaaagtgcaacatgttttatcttacaaaaaaataaaaagaaattcacgttgtgtgatcttgagagttgacttttaaatatatcacaacttatataaatacgcagcaacattccaatctctcaagaaaatctacagttcctccaaataataataccctccctctaaggtttaaaactatacctcattaacacattaagaagctagtcattacttcatttctatattttaaataatgtttattgataacaattgcaggcaactaattttcagcaatcatgtccgggactattaatcccccggacggaggagggtccggtgcaagaaacccaccagtcgttcgtcagagagtgctagctcctccgaaagcgggtttactaaaggacatcaagtccgtggttgaagaaactttcttccatgatgctccgcttagggatttcaagggccaaaccccagctaaaaaagcgttgctcgggatccaggctgtcttcccgatcatcgggtgggccagagaatacactcttcgcaaatttagaggtgatctcatcgccggtctcaccattgctagtctttgtatccctcaggtttactattcaagactcctacgtactttttggcgcatatctttccttttatagccaacccatatctatattccatttttatcttttatggatgacaggatatcggatatgcaaaactcgcgaatgtcgatccgaaatacggactttgtgagtcttaaaacatttaaactaaagttttttttttcaattacgagatttgtggtagatccatagttgtgtgcaaagatttgaatgcatggctttttggtgtagattcgagtttcgtgccaccgctgatttacgcgggcatggggagttctagggatattgcgataggaccagtcgctgtggtgtctcttcttgtgggaactttgtgccaggccgtgatcgacccaaagaaaaacccggaggattatctccgacttgtcttcactgccactttctttgctggcattttccaagccggcctcggatttctacggttgggattcttgatagactttctgtcgcatgcggccgtggttgggttcatgggaggagcagccatcacaatcgctctccaacagcttaagggctttcttggcatcaaaacatttaccaagaaaactgatattgtttctgtcatgcactccgtattcaaaaacgctgagcatggggtacgttttcactactctaaatcatcaagaagttccaagcctaggctcaatacttaaatatctcatattcgttttcgttttattcatgatttctccagtggaattggcaaactatagtcattggcgccagtttcttgacctttcttctcgtcaccaaattcattgtaacacttttttttcttcatctccaatatatatgtgtacgtgcatctttgttatctccatttactaatataaaaattttcattacaggggaagagaaacaggaaactattttgggttccggcaattgcgcctcttatttcagtcattatctctaccttctttgtcttcatttttcgtgctgataaacaaggagtccaaattgtaagctcacacattcatgtcataaacatacgttttaaacctgattgatgaataatattttgatagattatactatagttaccaacaatatttttatgatataaactatgaaggtgaaacatatagatcaaggaatcaatccgatttccgttcataagattttcttctccggaaaatatttcaccgaaggaat

SEQ ID NO: 8757 - DNA, 700 bp, Arabidopsis thaliana landsberg
taggttgtgcattggcattgtctcaagaatttattttgattgatgtatcatttgagtcaaatggtttgacatatataattttttattttatagttttcccgaatttcaactgatttcttttatggtttaagacattgtacatcacaatttgtacatttttattgtgctttacatcatatgctacgtacataaatgatcaggcatcaaactttttttttagttgtctcctacgagttgtctctacatggaaacattcaggccttgtcttattttttaatacagaagaatggaaaaaacacaacaaattatctcatttagctttcatgtaatccatcaattaatggagattatacggggctaatacaaatttaggcacattttgggtcaaaaacaaaaaaattgtattgtcatcaacattacttagttttattccatgcatgatggaactttggttgaggatttcgatccctcacaaggtaaattccatcatttctaacaacccaacgacgcagagcaccacatcggtcaatgttgcctgctctatatgctatgaattctttataatatcgcatgtataagccgtgtttcaaaagacaagtccatcttgttcttcttcctagcttgtctcccaaacggatttgttttaattttcttaaattataaaattagcttcgttttaaattggtacctttttgaatga

SEQ ID NO: 8758 - DNA, 2362 bp, Arabidopsis thaliana landsberg
aaaaaatcttgaaaagtttgtttgtataggtgttattagtactagatttgactaactaaaaatagttactatcaataaacaaggaaaagtagtgaaattttaattgatactagattttactaacaactttataacaatgactaagaaagtaacaatatatcacatttggcatgtcaaactaccaaaacatagttcacacgaggtcaacacgtttgaatctgttcccaactacgttgcgagtaacacatagggagatatttctcagaatcatgcttcccgaaaaatattttgcaccgaggtgatcggttggtccgaatcttgaattgcataaacgatgatttgcaaagtttgtgaattctgagcgagctcttctgaagtacatcaaatttaacggttgcagaaataactttgcttaatcaacataagaaagcaagcatgtataaacggaaaattcatggttcgtattgagttgttaaaagttacaagactcagattcgaatatgtcgtaaagtacaaatcattcaaaataatttagaagaaaaagtacaaaaagttcaaatatcccccatgaaagaacagcctccaatttcctaaggatctctcacttcaaaagggaaatacacattatacctgtttaactgtatccacacacattcgaagcttccatgaaaaacctaaagattcataaaaaggagtgaggttgaagatagatggtaaagacttcaggcaatcttgaagatctcattgatagatagcttgatatttaagacttaagagattacctcctcatattttagctttctttgtttggtttctcttaaaccttgaactcgtggacatggaaccatttcgtggatgaccatttgtttcctttcaccactggacatccacctgaaaatcaatgcataggatattgaagtttagaaactgatatttgtattagcttctaaagaaagcaacctctttagtcttattaccgtgcaagctcgaagggtctagagatgcatcaggcctcatgttccagaaaagtaaagcatctcgcttctttggtagaacagatagtccttctttaccacattttgagagctcgttccaccatgggacagcactaatgtttcctcttgctgcagggaacacagtctcgccaccatcatcgacatcagagctaaagaatcgtgtgaaaaaaaaagaaagattaaacacagaaatgctctgagaaaaaggaataatgagttttgtgagttacttacaggtacataagcacagtagctattcgttgtcctccattcttggtgctgaactcatctaagaaatagtcatagtgaggctcatacttctgcccaacttggtagtgaagaacttgaagaccttcaccattttctacaaacaaaagcgtcatccacaaactcaataagggatttccaaaggaacacaactcaagatatcaagagtaaatgcaactgatgacctcaagatgtgtcaacatttcctgctgtgcatctaagtattggataacaaagcaaagagcacttaccaacaggaatgaaggtgaaatctgaaatccttttctcaatcacctcgacaacttcgtcatgtcctcttctaagaaaagttcctgagctagttctcactctacacaggattgatacaacatcgattataaaacctccagagttaagctagaaggacacaagtaaatagtcactacaaacctgctatctttgctcccaccggttttctcatctaccacggttgacttaaccatactcggtttagcaaggctgatcaagtgctcacattcttcattagtctaaaagaaacagaaatctcaagatcacatctcaaacattccaatttaataactcatttctaacacaatatctccaaaatcactttagtgcagaacaaacaaagtcaaccctatccttaaaccattttcgctgaaacattcttcaatgaaagatctaaattctagagaagaacaaagtcaactcaatcgatcaaatttctaaacaaaacaagctcaaatctcttatcttgtctaacaagaaatactaatcttaagtcctaaatcaaagagaaacacgaaattaccaagaaattgtgataaacaacagcacgaggctcccaagaaataacttcaacccaacgttcaccattcccttcttcatctccagaactcgtctcactaacaaaacaatttccaaaaaaaaaacaaatcaataaaaaaaaatcaaaactttcaaatcaaaaacaaaaacccagatcgaaaaaattgccctaacctctttcgtacaatgttggtcaaatcattcgtcttggaagagtttctattagcattaggtagtgacaaaatcccgag

SEQ ID NO: 8759 - DNA, 2254 bp, Arabidopsis thaliana landsberg
tgccagggtgtacgaacttgaggcacgtgacgacatcagtggctcaacggtcttattcataatcagcagtttactattggcacgtgacaaagaaccgaccccacccaccaatcattttgctcccttgtctccttcctcaatccttacccccaaaaacaagtctagctttgattaaaacaaattttcaaaatcgcattagtgattttgtaatctttatggaattaattattagttgaatgatgttatttcttatgtagtagaaatcaaacacactttggcgcaaaaaaacataagacttgctaaagcgagtcccacatgcatcaaatcccggatgcgttaattacgtttgactgatagataatctctagtggaccactcgagattgtaacaacattttaattcaacttcttggtccaaacaaaagacattaaagaagctacaaagaccaataaatactgctgaaatttttaataattgcttcttgttttttgttttttgtttttgactaacaatttaaatcaggaagactaaaaataagaaaaacggttaggccggtgaaggctgagaggttgggtcggcggaggaaggaacgtcaggaccaacacgacagccttcaagcatgaaaacaacatcggacattgttggacggtctagaggatctgttgcagtacaaagaagtccgactttgattcctaataagaactcttcccattctgatgattccgggtcaagttcgagtagtcctggttctagtagctctgtaacttgacctctctgaagctgtttctttacccatttcactatatcctcgtcttgtgtgaacattactggtctttttccagttaggatttcgagtaggacaatgccgaagctgtagatgtcagattctcttgtgatttccccggacaatgtggcttctggagagacatatcctagtgtcccaatggtgtttgctgtgacggctgatcttgatggggatcgaattgtgagacggtcaagcccgaaatcagatatatgggcttcaaagtcagcgtcgaagagtacattctgtggcttgatatcaccatgaacctatttggaataagagatgttaaaaagacttaaaagtgatgtataatctagaatgtgattaaaactatacagttcttaccatgttggattgatggaggaatccgagtccgcgcgcgatcccgagagctatgaggtggcgcattggccagtttaggacatggccatcttggtgggaagcttcttggagcagggtagataagttcccattgggcatgtagtcatataccaaaagccttaaatctggtggacctgcgtagtaacctctaaggactgtgatgtttcggtgcttgactttaccaagaacttcggcttcctttttgaacaagttctcatttaagagtgatccattgggtaagcggcggatagagagaacaattccgtcattgtaattggctttaaatagcaatccatatcgggttctgctaagaacgttttcttcatcgaactgtcgtgttgcttcaattgtttcagctagagtgatcttgttattgaacatcactagctttggttctccgttttctgtgcttgatctgcttgtgctgctacgaactctacttcctgcgcttgttctaccaggactgcgtttcttctctcccgttgtagactgttgtttcagcttcttcctccatttcaagagtgtgtaaacgtagaagcagcagaagagtgacaagaggaatgcaccaattgcagccataactatcatcagaatcattttccttttcttcttcttcccctccgctgtgctgctttcacatcttctgttcaatggcttcccgcagagctctgtgttgcctgaaaattctgatgtgttgttgattcttgagcctaaagaagctggaatctctcctttaaggttgttgcttgagacgttgaagtataccaggttactagaaataagggcgaggctagccggaatctccccggttaagttattaacagaaagatccatctttgtcaagtttgataaaccagaaaaagatccaggtatgactcctgaaagatgattgtggtcaagtgacaatgagttgagagacgagctctgagagatttctggtgggatttcgcctgacaagttgttctgacccaagtcaagcaccttcaaacgcggaagacgagaaagatcagctggaatatgacccattagccggttagatcttaactcaagaacttcaagagatgaaca

SEQ ID NO: 8760 - DNA, 795 bp, Arabidopsis thaliana landsberg
taatatgttgtggtatgactttctttgcttgaaagactttggtctaatgctgttgaaccttcatgcgagagtttttatggtggcttgggaagcttgtcaaaggaccacccctcatcatgctcgcttaacgtcttcaagtcatacacctcacttcatgtttgctattgtttgcctaacctcaactttcattctgcatcaattctagcaaataaatccaagcaccagagcaccatcaccactacccaaacctttgtcaaagctctacttcatgtagctctcctcgtgccggcgagaatcatgtctttgaccccttcattaacgccacttcgtcttttgacagagacaatttgtttttcctttgaatcgctattgaaagagtcgtcgataaactttgatctcacaagtaccataagcttctttgcttttggctcaaaactctcaaggaccctttgtcgattagccctatctatctttttatcatttttctggtaacttttggagtatgccccttattgttgtgctttaaactttggaactttttccctttatctttgtatttggcttctacattatggaatgaaaacaaacattgtccaaaaataaaataaaaaaaacaatgaggaaaaaatcaaacaaaaataggagaatcatagtcatatttttggatttaaattcaaatctttttccatggtacataatctgcagcatttacagcaaaaatgaaacaaaatctggtagttttaaatttgaagatatgtttgcaccctataataatctcacataagttcttaaaga

SEQ ID NO: 8761 - DNA, 696 bp, Arabidopsis thaliana landsberg
acatattttatgtgttgcttccctcatattaaatcttgcgacgagacaacacaaagaagtaaaactatctataagcatcaataaaaaattgttcttgacgtatgtaaccatttttttttcaatattcgagaacttatgtgagattattatagggtgaaaacatatcttcaaatttaaaaactaacagattttgtttaatttttgctgtaaatgatgcagattatgtaccatgaaaaaatgatttgaatttaaattaaaaaatatgactatgattctcctatctttgttttgtttgatttttttttcctaatggtttaacttattatatcactagatgaggttcacataaatacgtgtgggttaaaaataaatgaaagatctattaacattatttgaattctaagaagtagtccacacatttttaataatatttaaactgtttttttttttttaaaactagattttagttttacacgttacatttttttcaatttgacggttttatcaataaaccggattctaattatatgtattccatattaacaaaaaatagctacaccaaaaagaatagatgcattttatcaaatctctttattagttatattctatcaaaagattctaaaattaacaaaacataatccagtagtaaaaataaaacccagtactttgtttccttaagatacactacttttttat

SEQ ID NO: 8762 - DNA, 679 bp, Arabidopsis thaliana landsberg
  unsure (1)..(679): unsure at all n locations
accagggattacatggatatggggttgaagaagctacggtaaccattgctccttagagacggggtcataatgccgtttctcctcgacctattcaacaagccttgataaaggaagctatcatataaggtgtttttcaagctttgaaaatagagagtattacccctaggtaattctaatggtcatgttctcagataagttttataccagcatagcaagattgtttgattatgttccaatcgacgtccattaacaatcagttccatgagtcgacacaaaaattcgctaagcaagatcagaaaagttttatgcaaaacatgggcttttgcagagagaacagtggaatacactttttggagttgagctttgaagatatgataattgggcctaagcccagaaggtagaaaggaatgtccaatctagtgacatcgacataaattaggttagtttgtcaccgaaggcgaattctggtgggaaaaggcatttgtgcagattgagggagagccaaaatcgggagatctgagcaacacaaagaaaatcgtctcaagttcaaagaaagagatactgttgtaaaaaaaatggcttcctaggtttaaaattcacgagaaaagtagtaggcatagctttcctaaagagatttctgtgaacctncatccaactctagcatttgatcaataaccat

SEQ ID NO: 8763 - DNA, 564 bp, Arabidopsis thaliana landsberg
aagcaccaaattaccataccaatgtatggaatattcgcagcccttatagttgcgtatctggccatgatgagacataatacaattaaaaatcatccaaataactacttcaaatcaaatctatatacaacaagaatttccttacacgtatacgggcatatagctagggggttcaatgtctaagaggatttgtaatgatactctcaaggcaatgaaatagtataatccacgactataaagacaaatcacttctttgactctcttttcacctttcattttttttgtgattagttaattaagacgaggagcacaatactacaaagaagactcaaactataaatgttatatgtctagaatgtatattggtttttttttatactaaatcaaaggtgataaagagagatttgatcaaatctgtatccaatcaaaatttgataaatttttaccaatttaacacattttctaacttaaactctataaatctatacataattaagtatataattactatccaactcactatttaacaaaattgttaaaatataaatcaatgattaatatcaaata

SEQ ID NO: 8764 - DNA, 2091 bp, Arabidopsis thaliana landsberg
  unsure (1)..(2091): unsure at all n locations
ttcaaaaggagtgttattgtgtttctcaatgtcactagttaaagtagccgtgtcaagtaggaagtatctatatagagactacatcctgttttcaccttttactccttaaactaggattagtactgtagagaaagaaaaaaaactaggtactgatttcctccctatatattaaccagttacctatatatttcaattttcttagttactcactcatgaattattatttacagcattgttacactatatacttacttatatataaatataaacaaaaaagagagagtaaatacccttaatatcactcgaatacatatccatatacatgnnnnnnnnnnnnnnnnntcgttacaagttatgcccaaaatgacaagtcttctaggataataatttttaattttaaaaaaacttagataatttatatttctgacgtgacattccggtcggatcagagactaccgtaacctctttttgtttcggtttttccttatctcaagaagatgaagacccatcactgtaaagagatctacaacttcaaattcaaagacatagaggacgtcgtgtctctgctcctcccgttgttaaagtacttattgttgtggatccaaaccttaagaacttttctctctattccaacttcactacaaaactctctcacccacttctcatcccagccgttaatcttccaccccgctctctccgcgaaacctctcatcttcaccttctgctccgccgtgaatttcgtcctcttatgtttcttaatcatcgcagtcttcctaacatccctttccaccgtaaatttgttcttgacttcttgatccgagggtccaaagaaaccggagctaagagagagaagcaagttcggaacaggggcgagtggctgcagctgtaacggagacggtggtgaccggtgctgactgaagctgtcagaaggactacgacggtggaagttgcgatggcagccacaagcatcgcacctaagggacggagggtccgtgaggatggtggttgactttggtgtgaactcaccgcagccgtcaagagcgtggcctccgagactgaccgcatggtttttaaggcactcgttgtacaagacaaccatatctcgggcgcaggcgattgtttgttctctgccggtgtcttggttgtttgttgttggtgacaaaaattgtctgtttggttttgataacgagctcatgtctgattcttattttactcactagtgcgtttatactctgtttctggaaatattgtcaatgacataaagggagagattttgtccaataggtttatataaataacattgttgattgcaatttggattagtaaataatcctattatttagcattagtttggaaactttttaaaacgacaagaagaatgagatgcgtgttttcagtcatgattaatcaaatctgaaaacgcttaagaattatataaaaaccttacgtttctttttttttgggggggaggataaaaaccttacgtttctgcaagaaaagagatctcgaatttcatgcatgatccatggttaggtttctctatgcatggtggcacgtggggccaaataactttcaatctttgtcaaccgagttaacctggtctactaaatcgagttgactcagaaattctctcgtgatctacgcttttctcctattgttgtggatggttgtctcgcatctagctcccatcccatacgttgtctccaatgagagaaaatatataaataaaatttttagatttaaacaatacacttccacgtacatattattttgtaaacaaattatcgcttcaggtttttgttctatagtttttctaaagaacttgtggagatagtttttctatctttaattaccttgcatgtcaacaaaaacgagtaatttcagaatcagatgacgccatgtctatggttgcttcctgcctacaatggttgcggccaacttgggaatatcatggttcgccgtcaatggcacgcttgatgggaagcgatgacgatgtagacgttgttggtcctcaccccttcccacaccaagaaagtctctggtaaactaatcttcattattcttcgccgttaaacaataggagtttagcat

SEQ ID NO: 8765 - DNA, 547 bp, Arabidopsis thaliana landsberg
tctgtgaacaaaacatattattagagattatttctacatattataaggataacagttagtctattagaattaatacacctgacctccctcccccttaatttgcttcttcctcaaatgttccataacaataaccaaatttaaatactaatatgtatatatatttgaagataaatcctaaaaaacagataatatatactaccacatttgaataaaataaaaataaaaatcatgaagctaatagtgatgatgtgtgagaactgatatgttgttaagtattcaaaatttgtttctacgtactatttttataaatttgaaactttttaatctagttaattcatatgtgattgaaaacaatatttatttaataaacttaaaacaaatttaggttgttctttaatcaaagaaaccgatgtatggttttccggctattttaagaacaaacttagcttgttttccttcttgatgtttacattgctaaacaagtattaggtgatgtgatttgcacataatgttctttcatatgcatatgttttgcttaagttttact

SEQ ID NO: 8766 - DNA, 1140 bp, Arabidopsis thaliana landsberg
agagaccgcggggctaaacatcttcttgacctcaaccgtaagaccttcatacctagcatgagatctatgggtgaatcagaagcagcaccatcctcgaaatttcaacactctaagggtaaatccggagaaggatcatcgtcagagtctacatttccgttgatactgtcggccaaaaggcttcgcctccaagggataaagttcaggttaaggagtgatgctgaatcaatattagatataaaattaaagaagaacaagcttcagataccactgttaagattggatggtttcatcagctcaatcttcctcaactgtgttgcctttgaacagttttacacagagagtaccaacgacataacaagctacgtggttttcatgggatgtcttctaaacgatcaggaagatgctactttcttgaacaacgacaagcggatcatagagaactactttggcaacgagaatgaggtatcacagtttttcaaaactatatgtaaagatgttgtatttgacacacgtagaagttacttacggaatgtgtttgagggagttaacgagtacacctccaaaacgtacaatggagtatgggctggctttaggcacacgcactttgagtcaccatggactgctctgtcatcctttgctgttgttttcgttattcttcttaccatgacgcaagccgcttatgcgattcgttcctactatcacgatacagagagagatggaaactcagcttctccataggggcttccttcgggaaaatcacgtgaactacgtgttctgttttatccgctacaaatgtcattcgcgctttaattagacccgcacatacgtgcaggatttcatatttttaaaaatatggtgtattaaatttatattcaatttagttttttctaaagtagtatttaatttatttatttttttggtttgtagtgaatgagatatatcataatagtatagatattagaaaattaattgttatatgatgtgtttaacataaacaatggtgcaaaaaaaattcagtttgattggttataaaatttgaatagatctaatgttttatttacaccatcttacagttgtaaagttaggcctattatagaaatttgttattctagatattgatttaagattgcacattttttt

SEQ ID NO: 8767 - DNA, 538 bp, Arabidopsis thaliana landsberg
cattttttggtgtactcgttcacgcccttaaacacattgtttaggtaacttgtatctacttcaaacacaacatctttactgatagttttgaagaactcggatacctcattattgctaccaaaatgattctctatgatgagcttgtcgtttctcaagaaagttacatcttcctcgttatttagaaggcatcccatgaagactatgtagcttgttatttcgttggaagtgtcagtgtaaaactgttcaaaggcaacacagttgaggaagaatgagctgatgaattcatcaaatcttaactgtggtatctgaagcttgttcttctttaatcttacatttagtatggaatcttcttcactccttcttagcctgaactttatcccttggaggcgaagtcttttggccgacaatatcaacggcaccgctttagaatctacggatggtacgtttccagatttaccctcttggagttgaactacaacatgtggggatgatgctttttcagattcactcatgttaggtaaagaaggtctcacggatg

SEQ ID NO: 8768 - DNA, 718 bp, Arabidopsis thaliana landsberg
cctggcgatctaaacaggatggcttttagcttcttcaacctctcaatgtgttaaaccagaaagatattgggtcaaacacagaaactggaacgcaaaacatcttcttgacctcattcgtatgagcttcttacctatggatggatacgaagatttccaactcactaagggtaaatctagaaagaaatcatcctccggtcttacattgctattgtcggctacaagactttctctccaaggaatagatttcagtttaaggagtggtgcagattcgatgttagatataaggttaaagaagaacaggcttcaaataccagtgttaagattggatgggttcattatctcaatcttgctcaattgcgtcgcctttgaacaattttacgcaaagagtacaaaccacataacaagctatgtggttttcatgggatgccttctaaacggcaaggaagatgccacattcttgagccgtcgccggatcatagagaactactttggcagcgagaaggaggtatcacagttcttcaaaactatatgtaaagatgttgtgtttgacatacatgcaagttatttacggaatgtgtttgtggaaattaacgagaacacctcaaaatggtactcattatgtcgaagttttttactgtcaccaagaaattttgtggcattgcgctttcgtccaatttatcgattctaaataccattcttctaccttagcaacagcagc

SEQ ID NO: 8769 - DNA, 2159 bp, Arabidopsis thaliana landsberg
ctgtaagttcattgtaaaggttacaccgttcaatttcccttttcggaaaagattaacacattaaagtgaagtgcaattttaagagataaagtagcaatcaatagcacacagtcaaagtcacagacagtgaagagccatgtagtaagagtttctggttacctcttttgaatttctgatgagagagattgtaaatccagttcagtctttctcaacttatggaatttctctttagcctctggctcctccacatgaagttggtccaagagaagtagctttttagtttccagagtcagccttacatcgtccctgaaggaagacatgatatacttagttatcatgcgatacataactcttccatcatgtcctgatgttgtccatgaaactgaatgcatggatgctttcaacttgaaataaatataatattgttcataccattgctttttaagatccatgatattacaccttttgaccactagttgttgattaagctgttcgagatatgacccacccggctttttgtcatccaataacctctccgcagccatctgcaacaactccagctcgctttcaagactgcatagctgtgaagatccagattccagttcctccaagagtacatcatgttgattctgtaactcaacagtctcataatttgtctacaaaccataaaaaaatgataaaaggtttatacgccttcaacatttataaaactggtttaaaatcactattcctatgtaaatgttcaaacatatgctctgatgctcatgtacagagaaaagagataaggtcacaataagtagaagaaatagtacctcaaacgggtcttcataagaattttcttcacatctagatgaatctctcaaagaaagatcagaacgtacatcagtaacaggatcatctgtcttttgggaggagaagtcaacattggctgaggtattttttgcgagagagtcagatgaatgagatttttcactagtcattgtgagatcttttaagacagcttcaaccttctgtatatgcatatcgaaagtctcatccttgtcttcattcaccatcatgtcatctgaaatatctctgaaagtctccatctttggcctgctagctatatcaccagccgacaaagtttttcttccttcactaatctccgaaagcctctcaaccagaaacctaaccaacctataagaatcatcttcagatggatgcagaaactgccgcaagcaacacatacaatctgtttcagcatgattttcacacaaataagaaaagccacacaagccagaacgtaaagtaaacttcagaacattctaacgaagaccaaaggactatcacagctctcaggaactataaaagcttgttccttgagaactattaaacactaaagttatttcctttaacccaaaacaattcgctctatcaaccaatggaaattcgattctggttgcgatccaaagagggattatatgaaatggtaccttataataactcatatcgttgatgtagcctagattcttcacagaatgagcgatatcggtgcagatcctaaacctttcggggagagaatcagggagctcatcggaaaacgacgccgatgggtcaatgagattgagcagctgagcacaaatcgatactaacgcctccggagtaaattcgctaacggaagtgaaatctccgggaatcgaaaccccagattcaatcaacgtcgtcatcagtatatctcgcgattcctcctccatcttttcttctcaaaactttctgcttctcttcaaagaccaacaatggaagggagaagaaaacaactgtttcgtcacctacactcaacacgacgtcgttttgtgatgaataattaacgtttaattattcataatggcatttaaggcttactattactcaacaggacgatgttttactgttgtaattctgacctcttccatcattctctcactctcttgtatctctgttcactttctttctcgctcttttgctttgagaaacaagaacacgttttaagaattttaatgactacactggatcatcttacacaacacaacactctcataaatatactactacttttctacttgcaacacacttacacattttcacttaggcctaatcatgactcttacacaagacaagacaagtagccaccctacacaatg

SEQ ID NO: 8770 - DNA, 1348 bp, Arabidopsis thaliana landsberg
ctacttcctgtgagcatagggtgcgctccgtatgagccagggttaaggtgtaaagacagacagggagaagtgccactcaagcatttcagtgatgtgttacacgtggccccactgctccacttgtcctgtttgtcgatgaagttgagccaagaccgagacttgagcctgagccaagggaaggaccagtcggtactgcaccgcagttgttggtggaaaccaggctgaacttgactgtagaagccgcatcctcttcttcctcagataacaaaacagttgtatccccggcttcgcgattaaattcgtttaggaaaatcttgacgagggaaagatcttcgaacaggatcaaccattcttgtcctgaccaagatcgtgtggcagatcttgagagacattgagtcgacatatagatacatattatgcatataaatcatatacacatatcgataatctttaatttatacaatatcctcctttcttttttactatatcatgctctgtttttggttttagatagttttgtgtaacggaacactaaatatatgttagtcaaaagatacatctggtgcagttcatgccattcaagttaactattcacagtggtagacagtacatatcagggctccataaaagatgcagaaccattttagttacataaaactgagggagaagagagatcataaaagggttaccttcaatcaccaatcggaagctaaacctgttggataatcagtgtcattgtcacaatgtggcctaaaatgacgaagggtgacaaccagctgctaaacatccgccttgctcggctcaatctgagaattctggtgcagttgctccctgcattgaagtggcatctgcgatacttccattgctcactcccttactgcacaccagatttcaacagcatgagtgtaactattactatactcaatgaaacgaagccttttggagtatgagaacattttcaaaaaaatggctttagtggtttttgaaacttcttctatgttctgcagtaactgcatcatattgataatatgaacaatataatcaccaagatcaaaatcaattgtcgaggagaagtgaagtaacttcatccttctaagccagaagctaatgaaaaaaacaaaaaaaagatttcatttcactcaaaagttcaaaacccatcaaactagaaatcattttctaaaagaacctatgatggatcaaaattgctccaaacagactatgaatgagacacacacacaaacgctaattggcaatacaaatgtggattactcaataaccttgaaggaaacttgcatgttccttgacctgaaaacgaaaaattgccgaaaaagcatcaaactttcaacat

SEQ ID NO: 8771 - DNA, 570 bp, Arabidopsis thaliana landsberg
tgtactgacattttgtaggaacttcaatctgttcgtggccaacttgcagccgaacaatcaaggtgtttcaaactggaggtactaaaccgtagccacatctcttttgtaccataacctacagaatttggaatctcgtgaaacccgtgatttaatgactacatatactcatattccaggatgaataggaatcttgattagaacattcatccattgtaaccactggatctatcacatatcttctctgtcatttattgataagcttcatcacgtcataagaacaaaaacaaagcaaatctaattgggtcactttctccgaatctgcaggttgatgttgcagagctaagacaaaagcttcaagcattggaaacactacagaaggaactcgaactcctgcaacgtcaaaaggctgcctcagaacaagctgcaatgaacgctaaacgacagggctcgggtggcgtatggggctggctcgctggaagccctcaggaaaaagatgatgattcgccttgatcatttttggtccggtaatgccattttctccggtcgatatttgctttcagtaaagaaata

SEQ ID NO: 8772 - DNA, 835 bp, Arabidopsis thaliana landsberg
ggaaattgtcatggataatgttaactccagattaaaggtgtcttcccgtcagtttaaacgctgtgaatatcaaattagactagataatcacaatgcatctcttatttttctcctttgtattctggatattaaatcctcaggttgaaggaaaagccgaccgcattatcacaacccttaaatccgaaaaagaagaagtggaggcatcactcaacaaggaaaagatacaaactctccaactaaaggaagagttagcagagatagacacacgaaatacagagttatacaaggtaaccgtactatttaccttcatgaatctgtcttgcctttgatctcgcttttaccagaacgaatagccaacagaacacaatcatgtagttggttttctgaaaattggttcttgttcagtcttgaaatttagtattttggaaaaattcaataaaccgtggaaatgactaataagcaagacaaatgagttgagaatttcttggagattcttttgttgtatcaacatttttggtattccatctataggaacttcaatctgtgcggaaccaacttgcagcggaacaatcaaggtgtttcaaactagaggtaggtatttacaccttttactaagaaagtcattttgtttcacttttatagtaagtctggttgatatttgaatctcgatggtgaaacattcctctccgatgttgaccaaatcctaacaaaactcggtctaagtgcccgcaggttgaagttgcagagctaagacaaaagcttcagacaatggaaacacttcaaaaggaactcgaactcctccaacgtcaaagagccgttgcgtctgaacaagccg

SEQ ID NO: 8773 - DNA, 1307 bp, Arabidopsis thaliana landsberg
cacctgcctcctatacttattcaacacaacaaaaccaaacaaaccaaagaccaccacctgcctcctatacttatccaacacagcaaaccaacaaaccaaagaccaccaccagctttctacaacagaagaactgcctctaatgctcggcagggacaagcatcattcaacccacatgtcaatacacacactgtgccggttactcatcagaggagaccataccagaacccccatgtcagctcgaacagtggctacaacctgggagtgagggacttggaacacttctcgcatatgatgataagccacagaagagaaggagacacatacaggcagagtgaggtcactcaagggccatacatgaaccatcagacctaccattccaacttcaatagtagctacaaccatggggcaagggacttgtacatggtaaacaacagaagagaaggagacaatcacagaccaaattatcgataacacaccgtacctcgtgagtaatatctttcatcatcatacaaacttggtacttgtctcttttgcaagtaaacttacttcaacacaatttccaggttctcaggccataggaaagcgtcctgatcatcggctcttaacccttgtctgtgattcgtaagaaagttttctaggctcatgattctcttgatcatccgtttctcattttttttttttttttttttttttttttttacgggtgtgattttttgccttcactctcatcttgagggtccgagaccgtcctcaaaagttattaccttgtaatcaaggatggtgttcttggcttaattattactctatatggcaagtatcgtttgttggctttattctttattactaaatgttgcaatacttgatatgaagaatacgtagatacattaaaaaaaagacaaattactgaaggaagtatcattctcgtttgaaacatggcaagaaccatcgggatctagagcggggaaaggaagaggaaacagatcggtgcggttgttcaacggtgttggaatcgaggtcgaatatgaagatttcgttttcgtcatattgatctttaaaataaggagtaggattggagaagtagatggaattggccttgatcccttgcatgtccttggcgagcactgtgatacccaaatccaaagaattgtctcgtctcccagagaaacagttttctcccacttgttgttgttcccttccatcttgtagatttcaaagctccatatcttggacagactcggacgatggcacttaacaattaagacatctccggctagagtgactaccatatcatccttgaagtgattcaa

SEQ ID NO: 8774 - DNA, 1430 bp, Arabidopsis thaliana landsberg
agattcttgttccgctccctatcggagtcgctgtgttcttggttcacttagcaaccatccccattactttaactggaatcaacccagcaagaagtcttggagctgcaatcatcttcaacaaggacaacgcttgggatgaccacgtgagtgtttcacttctcaccaaatttacaattcagagtaaggtttcaattatcggataactaatctagctgtatcttcttctctcagtgggtcttttgggttggaccattcattggtgctgcacttgctgctctctaccacgttatagtcatcagagccatcccattcaagtccagaagctaaagctgattgagttctatttaaaatctggcttttgttcttagtttgctttcttttgtgaatctactacctgtgtgtaacgtgtgtatctgttgtcctcttctttgcctaatggagacttatgtaaaacaaagacatgccccagaaacatctgatatctttcttctccattttatcagaggatttctataattggcccattctgggtttatctcaagcaggcaacttatcttgaatcaaagtggaccagacatatttaatgcatttatgttataatctgctacaaaagaatagtgccattacaagtgaatcattcatgccaaatgttatctgacaaaattggctcaaattcaaagaaacgactccaataaataaaactaggaattgacaactggtaagattaaatggcaatttcaaaacctggaaaatgatttgtaagaaacaattgttaaacatagagctattcgattattctaaggattatcatacaatgatacaaataaaatgtggccatcgcgaacagatttccaaacaatgtgacattctttaagcttagaatgaaacctttagaataagatttattaaatcaaattgagagatgcttacaaaataatgaaatcaaattttactgtctgaattaccaaggcatatgagtaaaaaaaaaggaacagaacaaacgcactttgcaaaattacctctattgaattatgcagccaaccaaccgacgacaactgggcgtgccttgctgagttggccaaagaacggcgtatttaacacgcgcccaaaaggcgagtgccactctctaatagacagtaaatgatagatgcgattgattcacctaccctacctaacttgaaacgccgttaccaaccccgtcattgacgacgttagatttacactctcgtagatccgccgcgattgccgttaaatcccgttcgtggacgttaactaaaagaccgtacttcatgaataaagttaacgacatcttctgttccaccttatgccccgtcaccaccgtcaaccggtggcggagcaaaaccgccaatgcaattgatttcatttgtagatacgccagatccttacccagacagatcctagggccagcg

SEQ ID NO: 8775 - DNA, 2017 bp, Arabidopsis thaliana landsberg
cgattcattacgccaagcaccgtattacaccaaagctcactgatgaagtgagacagtgaactcaaatatataaatttttatgtatctgataatctcttccactaaatctcttttgttattaaatttgcaggcatcggaacgtattgcagaagcatatgcagatctcagaaatgcaggttccgatactaaggtaatttatttcataaaataacattggacactgtatctttttcgtcttgggaacttgtatttgacacaccatcgaaatctctgcagactggaggtacgcttccgataacagccagaactctagagacaataattcgtcttgctacggcacatgccaaaatgaagttgagtagcgaggtaacaatctaactcaaatcttctgtttccccacctggtcgtgaatatgttctattcagattctttctaaagtgataactttattttgaaaggttactaaagctgatgcagaggctgccttgaagcttatgaactttgcaatatatcatcaagaattaactgagatggatgatcgtgagcaagaagaacgtcaaagggaacaagctgaacaagaaagacctccaagtggacgtagaggcaaccaacgcaggaataatgaagatggagcagagaatgacactgcaaatgtcgacaggtaaactaatttgatctcctccatggaaacctatatcacagctttctcaacccttatacttttttctttctcttttgctggtccattcagtgaaacaccagatccaatggaagtagatgaaccttctgtagagcaattcagcggcacggtctctgcagcaaggattgaaacctttgagcgagtgtttgggcagcacatgaggacacacaggctcgatgacatttctattgcagatatagagactgttgtcaacaacaatggagttggcgcttctcgtttctctgcagatgagattattgctctcttagaggtaattcacaaattaagagacaagctttctcattcttttacgttttatacaatttcttcataactttactctattgtggattttatgcagaaactgcaagatgataacaaagtgatgatcagcgatggcaaagttcatatcatttgatcatatgaagaaatcaatattgattgcatcatcatcatcatattagaactaaaaaatagtgtagtagtgaactcttggaaaccaaaatatcattttgtaaaatctgtattcatacgttatgttatttgcatttactagtgaagtaaaactgatgatgaaatgcttaaaaaacgcatctgattacaaaattttggaatttatagcgaaaatcacaatccaaaaatgaaatactttcatcatctactgttattgtttatcctttaattttcttgagctgtttgtgccaaattttacacaatcgacatcaatattatagtgaatatgtttgttttaaccaaatggtaagaatagagttgtgccatatataagccaacttcaaaaccctaataatcactaccttggaactctctcgtcgagaagatccatgtttttccatttggtctctattactttttttttttttccaaaatatgtttgctttgtccatgacggatcttacaagtttctaaaattgtatatataatcaggttaaattccacaaaggcggattgaaatcagttttggtatacagagtaatacaacaaaatcttttttttttttttttgccaaataacaaaatcttttttggtaggttactgcacacgtttctctatcaaccctagtcaaaacaattgagttactgaataaacttacgtagttaggccatacatgtctctgattcagaccagagcttctcagaaatgttaaggccatgagcaagagaaacttgtctccactctaagaattctaaattcttaaattaatcataaagtgagacgtatgtgaagtaatgtaaggggataagacattagaggctatgaaacatttgcttatgaccttgtacaaacgatgattaagcg

SEQ ID NO: 8776 - DNA, 1800 bp, Arabidopsis thaliana landsberg
gtgcttttttggttctcaccctctgccctttccatgtatcttgtcttcgatcacctttctactgacaagaaccataaggttttctctctctctctctttctattccctctactatggcttttatatccttgcttaccttaactactatcttctctctcaggagcaaaagtttttgattggagtcatcctcatggtcccttgctattctattgaatcggtcagttacttttttcttaagcaaatcaggaggttttgatgatacgtattttgggttgaagattttaggaacctaaaaaaattgacttttttatcgccaaagtgtagaagaagcctgtatcatactcataataatacagtcatgttcagcgttgataatctcatcgaatatttacttgtattgtgctcgtcaacggatcgtcaactgaatgtgtttccctaagatatctgttcctaattgtgtttgtttgtaacagtttgcatcacttgttaaaccatccatcagtgttgactgtgggattcttcgagactgctatgaatcctttgccatgtactgttttggtagataccttgttgcctgcattggtatgaccattttcactcttttttatgtctaatattgattaggttccgcatcttgtagttctacctgtgaaacaaggataatcgcacaaacttactttctctttcccttgctctttgttctaaattgacttgtttaccaggtggggaagaaaggactatcgagtttatggaaagacaagggcgtaagagctttaagacgccactcttagatcacaaggatgaaaagggaatcatcaaacatccttttcctatgaatttattcttaaaaccgtggaggctcagtccctggttttatcaagttgttaagtttggtattgttcaatatgtatgtttctcacaaatgcctcctgtttctcttgctccaaaactcttttctttgaagtggaagttaactatttctctccttttgcagatgataataaagtctttaactgccctcacagctctgattcttgaagccttcggtgtgtactgtgaaggagagtttaaatggggatgtgggtacgttgagacaattttgacaagaacagtgctaacatacagattgaccttaagaaacgaaaatcagtttcatctatgatgaactgtgatcaagatagcagcatcttaccattgttttcttttttgtaggtacccttatttggcagttgttctaaattttagtcagtcatgggcattatactgtctggttcagttctatggtgcaacgaaagatgagcttgcacacatccaaccactggctaaatttctaacatttaagtcgattgtgtttctcacttggtggcaaggtgttgccattgctctcctctcttccctcggcttgttcaaaagttcaattgcacaaagcttgcagttgaagactagcgtgcaagatttcatcatttgcatagaggtaaatgtcttctgttgttaccaattcctgcaaaaggttaaacattatgtgtgatctttgtttacgagtgcaaaactttttcttcattgcttcctattaacaagcagtctatggagtcgtctgttttcctttctttaaataaattaaagctcttaacacttgtgctggtccagtgcagatgggtattgctttcgttgttcacctgtatgtattcccagcaaagccttatgggctaatgggagaccgctttactggatcccgttcagttctttgtgactatgcatctgttgactgtcctattggtcccgattccattaaggactgtg

SEQ ID NO: 8777 - DNA, 832 bp, Arabidopsis thaliana landsberg
agggcattaaattctagcaacatcagccggagacacgtcgacttcctctagcaatctcccaatctcttcatacaagtcatgtgactcgttctccaagtagttcttagctaaaaccttaaatgcttcaaacctacaataagacatctcaatgtggtagtccattcttcctctacgtatcaatgctggatcaagattatccacaaaatttgttgtaaaaataataatcttctcatcactacaagctgaccataacccatcaatggcgttcaataaccccgacaaagtaacattgctctcattattcccacttactcttttcaagttctcagcttccttcttctcctctttatcctcatcttcttccttctttttctttctatgttccgtaagctcaagggaacaatcaatatcttcaattacaacaatagacttcccttttgtgtccaacattaacttcttcaactccgcgttatctttcactgtggtcaactcaagatcatacacatcatactccaagaaattcgctattgcggatatcatcgtcgatttccctgtcccgggaggtccaaacaagagataaccgcgcttccatggctttgcaaccttccgataataatctttccctttactaaacttaagcaaatcctttttaatctcttctttcttatcaagatccatgcccaaagtctcgaatgatgcatgatgattaaaaggaacgttgctccatagtccttccctccatgaagaatattcactgctggaaattatagtgtaaagcttcctctctctgttctttaatgccatctctttcccttctctcaaaacatgatca

SEQ ID NO: 8778 - DNA, 1258 bp, Arabidopsis thaliana landsberg
cctcattagttgtattatgcaatcttgtgtccttcacaatctcatcatatacaaattccatatactcatataaaaaccatttcgcataactggtctctctgaatcttcattcacaacttgatcttggctccattctgattgagtagatgacctagcagtaccactactacttttgttcaataaattgtttcttgtatactcatcaaacaaatcagacaagatgttataaactgaatcttggagatgagtagcctccacactgcctttaccatatagccatcctttcaaaacataactcaacaaaattcattttctttctcgagtcaaacacacttgccactatcttttacttatttaattccactttttccccaaatgcattctaatacttacccaactttgctaacatagcttcggctttatcctttaaagcatcatcatatttcaatgcacctaagtttctagtaatggagactatctcattgtagagtttatgagatgcaacatagtttgaagctgaaataaccaatgtacacttatagaaaatctcaagaatctgaactaacctctcaatattctcccaatcttttgtcacagttggtccaatccttttatttccatcctatttctctgcaaagtaatcattatacagtttatcttcagcctccatcttctcaaatgccaatctgaaatttaaagtttgctctagcttgaataagtcgaatttcatctggtcttgacatctaaaggtagacttcccctttgcaacttccctgtttcaactctaaaatcaaatgattgaagttttggtgtcgaagatctcacatactggattccattgcgaatagcctccacactgctattaatctctgttaattcttcctttacaaccagattcaaaatgtgagcagcacacctcatatgcaagtactcacatttcatatgcaagtactcacatttcaatatcaataggagcacacctcttgtagttgttctccgggaatgaggcttatacatttgaactttggagcaaaaatgtctccaagcaaagcagtctacaaaagatagtggtagcttagctaaaactaccatctcattagttgcttctttccaaacagatttactgaccttacttatagtcatacacccactggaccaccatgagttaaaacggtttgagtattctgaacattagcagctttccatacctgatatgccttacaaatatttagaagatgcttcttcaaagtggaggttc

SEQ ID NO: 8779 - DNA, 1455 bp, Arabidopsis thaliana landsberg
tgtgatacttttcttgatgtattcttctaatatgtgtgcagagagagagagggggggtacctgaaaagtatgaggggtgaccatttgcgcaactcttgcttctaaaatctccctaacgatgtctggagaaatctcaaagcaattgctgcatgtgcaatgtctaggaaactgttggaagctcctatgaatattttttagacacacacaaccatgtgcattcaaaaactctagactttgaggaagctctggaagtgattcgaggtttttgcaatgacataatataaggctctccaaattgcggaactgcttgacgctttcaggaagtttaccaaaaatgtttccactgagatccaatgtcttgagtgaaaggagattgcatatctcttgaggtatatgtatgtcaaggaggtatgctttactgagaaacaaagataccatggcatacatacggaacactagggaagaatgcaactttgaacgatatggcgtggttacaaatggcataagcttaagataaaatttagacccactcttttccattggagtgacatgtcttgttctccacttctctaaaattaaggtgacgttgcatggaggagttccatgtaacatcactttgtcggtcccatcttcatgaagttgtgtaatgtcttgaagtgagaaacctaggatatacttcagctctaagcagccagatagatccaccctaactactgattcgaaagattccatttggagatgttgaaacctttcgcagtgattcaaatctagtgaaaccagtttagtgagatcctcaaatgatgatggcagtttctttatgggggtctcggctagatttaaatgtctaaggttccgtggaagatcggggatactcctgagctctgagcagccagataaaattaacatagtcagagagatcaaattacccattcccataggcaagtcttgaagcttcttgcagttctcggcatcgaaaacaacaagttgagtgagatgacagattgatgatggaacttctcttatagaggtcccagcaagatatagctctttcaggtttgttgggagatcttgaatattctggagctttgaacaccctgataacatgagtttaataagagaagccaaattaccctttcccatgggcaagttttgaagtcttttgcagttagacaaatccaaaacttcaagtgaggagaggtggctgattgatgatgtcacttctcttatcccagtaccagaaagatataattctttcaggttccttggaaagccctgaaattcttcgagctgtgtgcttttgatctcaacgcaaccagaaagattaataactctgagatgttgtagatgtcttgtagctggaaaactctgtatttttgtacaaccttggagatcgattacttcaatataattagattttatcagttcttcaatttcaactagatcttgcgagtgact

SEQ ID NO: 8780 - DNA, 1410 bp, Arabidopsis thaliana landsberg
ccctatgttgactcaagttcaaccaactgtaactgtctacaaattttttgtttacttaatgaaacattactttacatatttgtaatggcccttatttggtgattacataatgtaaggatttagagccaaaatagcagagagcatgtaatggagtgagaaatgaggtagagaatgaaacagacctggacaatcttggcgaggagaatctcggatacggaagtatttctcaaatgtaccagcccatgcatctctctttgtaaggaagtgagacttaaggttgaagagtttcttcaccgttgcaggtatagaagaatgctcaaactgtgaatgtggtgttggaccttcaggttcatgtatcactgaaacaaaatcgatcccaacaccagtcttatcaaaaccacaaagacagaattataaagattgaagagaagaaatgagaaccaaaaccaatgggatttaacatgaacaatgtgatctgcctaagaagtggaaattagtccaaaccaaatcatgcgcaattcccacaagattaataatttcaaatatcaagctgaatatgaaattttcaatattcaagatcaatataaactcagttatccaagcagagtctgaaaagtgtaaaagaagaaattaacaaatcacataccagtgcccttctcaatccaaggagagatcagaaaagtagggacccgaacacccaatcggtcaaacccaaagtaaaacgggtcaggtccaatgataccatcagggttaggcacacctttaaccggcgtaggaacatggtcataaaacccaccgtgctcatcataagtaatgagcaaagccatctcgttccactgtgggctactccgtaacgtctcataaacttccttaacaaaccgttgaccggccgccacgtcatgcgacggatgatcatcattagccggaaaaagatcgatatcgaaatatctctgttccacaacagagtaattcggaagcttcccaagcttagcgtcgagcttgaacttaagcgcatagctatggaatttaaccaaatgcttaagcctacgaagagacttaaagaagaacgtcgcaggaatgttttggtagtaaatcccaaaactgagtccgttctcatctaacgaatcaaagatcgtcttttgaggaaaccctttaacgagatctttcttcacgttgcttgagcatccatgagaagtagctgagtgaacgtagaaccgattcggttgagtcgaagttggtactgatgcgaaccatcgatcgaaaactccgaactcgttcgctaactcggtgtaaactggtaaaacttcgggtttgaatccgctcataacgttcttagccattccaggctccatactctctgattgctgtgccaattcggtcattttcgggttgtcggatgtatcgttagac

SEQ ID NO: 8781 - DNA, 659 bp, Arabidopsis thaliana landsberg
tagatcactatttggttaatccggttttaattttcttttatgttttttttttctctttacaatctttatggtttttagtatagatcattaatttcaatccatttatgagaatcgatttcctagtaacctttgattgtttcattctctccttaatcttttgcccaactattttcttttgaaggagtaaattttattttcgctcttcctttgttgggccttagatataggcatgggtgaattgtccattgaaaaatgaagatattgggatggtttatgtgaagaggaagaggaagtttcaatcaatctacacaaactggttttcgaagacagtgcttgggaattgatggattccattggtgatgaagttcatctgtctaggtagtggcggagcttatcggcggtggaggtcggcaatgttcttcctccttcaacttcgtgattaaacgttggtggacgcgtgttatcttttgaaattattttgttttgagttcggtcctcgtgtgaaggttttaaatgttatcaaaagttgtattacatgaagtgttgagcttcgaaaacttgttaaaaacccatttttactagactttttaatgaaatgaaagtttccgaccaaaaaaatagtaataaattggaggaattattatttatttattattttg

SEQ ID NO: 8782 - DNA, 2007 bp, Arabidopsis thaliana landsberg
tgctgagatgtctaccacagcatttgaattgtttgcatatccttggcttatagcttttttccttctgaagctttcaaccattgcggaaattgccattgctaagaatgacatgaataatcctaatcccattcttagcttaacgctaagtctaaaaggtctgcctcggatcttggaagctaatgggataaccgcacggtcatatagaatgacccatagggctagagctatgattgtgaacataccgaatgatccagctggaacttgaaagcttgaaccatggcggctcacacgcctgtccatggaagtcgcttgcagtaactgaaacgaactttggctagtgtttatggacatcattatacctgtggtccatatcggtatgactttgatcaatgccttaagctcctctactttgtctgttgtacatagcctccatggattcaaagcaaacccatctgacccaatctcctcctcacggttacttattaaacaagctttattcaaaaacctaaccaagagaaaattaaaatctatcatgtctcttgtataacaattaacaaagcttcgtttaagaacttaatcaagagagaatcaaaatataaacaggacaatatcacagggtttgttcaaaaaacctgatcaagatatattatccaagtaaagagagagcattatatttctcttgtaacaagaatttttcaaaacctatgatagtaaatatcaaaagtgagaaaaatgcattgatcatgtttcttgtatagcaagctttcttcaataaacctaatcaagagcgtatggtctttcttgcttgtaaagtaatcaaaactcaggagacttaagaagtacatgtatatatagtagttttacctcaacttttgacttggagctttgatttcagaatctttcatgtgataataacaatcaaaggagtcatgatgatctggtagacttagcttcctcttcttgtaagctgcaacaatcgcttgagctaaaccggtgaagagactcttggtcacaccacgtgtaacatagagaggagacgcaagaatgaatagcaaagcagcgatcaacatgaggaccgcaggtaccccaaacccgattttccacccgagatgctcctgaatgtatacaatacccgtgaacgcgatgagaaccgccacagctgaggaagcgtagtaccaaccaaagaaactctcgagaactctttcattttttgggttctctttgttgtctagttgatcagctccaaatgctaaggaacatggtctgatcccgcctgacccgatcgatataagggcaaatgcagaatacaaaagagccagctgagacgcagttgaagacccacagtggcttccggctgctgtgggatcgcaaggcgatggcttcacttgtggtaacattgcagttagccataaaagcaccattccctgtggtatgaatcaacaatgatcattaagtaatttactttggtctataaatcactatttaatttgagctgaaagctaacaaaacattacatatcgttacactaacaaacattacatgctacgtttatatatccttaattgtagaaaaacttccaagaagaaaaatccaatattcatatcggcaacaaactcgtgaacatgagcacacgttggtaggtcgaatgtaaagtcatatgtcactaaccctaccaaaattatactaaattttgtttgattgagatgaataattgtaccaacatgtcaaatcaatccatgtaacgaaattgaaacatttgatttgcattatcgacttcgcccaagaatcggacaagttgtaaaaagtatggacacggttcaaaaataattgcttaagcctatcacctatctctgtgtcgtctacatactatatagcctataaacaaaatcgagcttggccccataacgaaaataattcaaagacgtcatgcgatgtgaaatagaattgcgtccaatccggtttacatagatttcaatcgagaaaaatcgtaacaaaaatttgggttcg

SEQ ID NO: 8783 - DNA, 1967 bp, Arabidopsis thaliana landsberg
gaatattttagatataagaaaatgtgatttagttaatcttatgcttaaaactggttaatggatatttgaataattaacgatgtaaataaggaatgtttgtcgttttctaatagtcatttaggtaaaccttctcgttggtaaagcattacagttaccaaagcgtcacccagaaaataattaaaataaaaataaaaaagggtattttccctccttagtaatatttcacttccctctccgttttttctgattacagctctcagactccattttcaaaatttagggttcttaattttcttcttcgatccttcaagttcttcaactccgatttcgtttcgtctcttcctgcacttcgatattgacggattctgggattctctccgtcattctcaggtttagtttctccctcttcgcatcgttttttgttttcccgttgcttgcctcgttttgatcggaacttgtacatgcagtcacatttataatctgtgattgcgaatttcgaaatatatatttagtatctccggtgatttagtgtctggatcgtaagagtttgatttcctccgtgactccattgaaattgtgtttcccggaagacgaatcgtccgtacaatttcgtttctcttagtgaattagttctaagctattctattaattgcattcccattatcgtctaaaaatgttaatcttaggtttgatttcgattattgtgctttcactaatgcttggtttatgaatcttattttatttgcagccttataaattgagcacgcctctcagtccagactctttaatcctattggatttatttatgtgatgaaggatgtgtgcattgctcacagatctcaccattcctgtctctgaactggtaagcactaactagagttttgcttacactgagttttagagtgacggattagtattaggaactgacaggtttataacaatttgtgtgactgctttttttgtgtattgcagggactatgagttattggttccctgactttgctgctgcttcatagacttagctgacttgggtggtttgatttgtgaggcttatcgttgcaatggaatgcaataaagaagatgctattagggcgagtaaaatagctgaggaaaagatggaggctggtgattttgttggagctcataaattcgttaccaaggcgcaaagactcttccccaatctcgaaaacatagtgcagatgatgaccatatgtgatgtgcattcttctgcaattaagaaaatcaaagggcttgacgattggtatggtgtccttcaggttcagccatatgctgatgctgacacaatcaagaagcaatacagaaagcttgcgctgcttctccatccagacaaaaacaagtttgctggagcagaggctgctttcaagttggttggggaagcaaacagattgctttctgatcagatcaaacgttctcagtatgataacagatacagatcccattcaatgtttgctaacaggcatgtgaatgtatactcgggtcgccactgtgcagctacaaacaatgctgcggagaatattgctggtgttttcacattctggacacgttgcaggcactgtggccagtgttataaatacttgagagaatatatgaacacttctatgcactgttccagttgccagaaatcttttgtcgcctgcaaaatgaggtgtgatggagtgccacctagtagttcaaccgctggtagaaaagaattccaagatcaagtgatgtctaatacatctcggcaaaatgcttctacagcatcagaatcaggcagctcagcagctgatatgggtaagaatgggaaagtcggagggaaagtcaacaagaagaatcaagaaaaacagaaaaatggtgctgttaacaggggaactaagaaagaagaaggtgtacagagaatgacgctgaaggaagaaaaccccagactagtgagacaggtacgaatatttctgctgaaatgcctaaag

SEQ ID NO: 8784 - DNA, 837 bp, Arabidopsis thaliana landsberg
  unsure (1)..(837): unsure at all n locations
gatctgtgaatctcctctctgggtgccaatgtagaaaatggtcttggtttgtgttatcatgatgctctaatgtgacagctcttgataaatctgtcagaagaatcaagatacttagcccagagaggacgtagatgaggaaatgctatatccagccaaggcttagctcttccattgaaatgaacaacagcggcactttcagcatcggcatagctcgtggtctcttggtatccgagaccaagcatatgccagaacggatctatggtttggacatgaccgtggaaagcaatcaacccaggaggcaaagttcctagctgccacaaactcaggtctgattttaagttctgcaacacatacatgtaaatagttttgagttaagatgattactgcttgatagtgattgttgggtagttagtggtttccttttacctcgtcaagccaatgatagtaagtggagcttatgttagtcctcctccaagccgctaggtcgaaaacattcattccataagcccatgcacattcctctgggtcgaagtttttggcaattgtcggattcgagaagttgaggtaactcttgaacttctttgacatcacaaactngtcttctcctctacatgtttccactgctccatttactttcccattcatgtcaatgtcccaaagaggtgaaagatcagtttggatcacaatgtcatcatctagaaacacaaccttgtttaagcttggaaacaactgcagaaaaaaaagcaaagactgttataggtttcgggtctaatgctcgtgagtattcttcactagtcacagatcaaacttacctctggtagatgaatacggatgtga

SEQ ID NO: 8785 - DNA, 1522 bp, Arabidopsis thaliana landsberg
tagagacataaacacacaaaaagttcccatattcggcaacaagctatctccaactataaagttcgagatagtgaaccaaacaggttcagtttcattaatcacatgataattctgaaccaggtccggtatttttgaactccgcataatacaatgtcttcaaagcaaaatcacccatccattcaaaataaaaaaataaaaaaatgagaaagagtggacaaaaaaaggaaagtgtaatgaatgacctctaagtcctaatcagggttgatgtttacaagtttacttcgagatgtttgtataattgtatgtgtatttatacatgatctttggtttttcgtttcaaattgatatatattttttttggtaaccggacgtaaggtttgaattaatttgtgtgaaaatgacaaatacattgatgtacgtggatactcgtaattaaataagtcgtttaagttagtggcagaccaatagcccatatattataattcttcatccgtccgattcaaatcagctcaaaatttcaaacaagatctacggataaaatgacagggaatttttggagatatttttcgatcactgcgaaattaatcaatgaaattaaatcagatacgaataaaattaaatgatttacagagatgcataatcaggcagtctataatttccatttatttttataaagttataaatttaaacacacatactgacatacactatacattcatgatttttgttttctactcaaacaagaatattatatagatgacaaccgattaaattaataacataattctaaaataattctggtaaaataaaattttttgaattagttagctagaccagcggtgaatgtgacacctgttgccggaagccatctcctaccgtcaatgaacgatccaacggtgaacgataatgcagtccgtttgtccatgatatgataaccaggccatttaacccgacctgatgatcgccaacctggcccaatataattgtattctccataccacaaagtgtccaaagcaaaattaccaaaccactcaagccatcctctgggttggaccaactggctcatgtaagtgttcatgtaaaccgttcttgagtaaagtttccatggccggccaagataagtaggttgtgtagccagcacgtaactgttctggattacgaaccctgtattttgatttggactttttcttccttgcgcggttatcgttaccttctggagcggtagcgggacccgagtgtagattttacagttttgtaaaaccgcggcgccgtttccgaatatgaaatcaatcgtaccataaatttcacaatctctatagaactgacggagggaatgggcgtaaagagtgtcttgataaccttccacgctacatcgatagaaggcggattggtcagaatcaaccctcaatgcgacagcttgacggttttgcggaccagccgtgtttctgaatgttatgtcctttgcaatgaatcctcttccggaaacagctgatcaaaccaaaattaatggtcaatcatgtta

SEQ ID NO: 8786 - DNA, 1579 bp, Arabidopsis thaliana landsberg
atacataatttagaatatatctcaatactatcatactacagtcgaatcttttactttattaaatagagaaaaatatcacatactagtactacacttcactcttgtcacggtcgtttgacacattattgtaaagtcgccgtgccactcatagtaaaggacaattatggctcaagtgttttgtcgttataaagccatggtgcttcactcattagtgtacatctggattctcttcacctaccatcccttttgtggcttctggctttttcccttcgatattttattctttcttcatcattattctttatgaccttaattagcgctaatgtacaagtaaatcttgttcacaaaaattacataagttgtgcttcagtaacgtacacataaaacctccaatgtcaatggtttaaaaaaggcctatcgatgtcgatggtaaatggtaatatgctggtctttttttcactttttacctataaacattagtacatcacatgtgttaaaacaatctaccattcataagtatatggaacgataattaaataaataaaatatctgtattagttgttcgtgtaaatgccttatttaaggcatagctagcccaaatatacatacacatcaacaatacaccacatttacatatccaccaccacgactcgacttggactcgatcaccatatgggaacaaaacttccctcaacgttcttaatccttatatttccatggattaatacgtgtttctagttcactatatccttcaagattgaaattacttgtttttttttcatgctgttacttggtttagttcaatttgaaagaaaacaactcaaagtaacggtaaataagaaaagaaaaaagattcatagacccttggagccagggaggtcaatccactgaagctgagcttcgacctctccgcattccacatgtcgcaatctgagaacgagatcctggacgagcttgccgtcgacccaggtgacacgtgactcctcggctagacagttacgacgactaggcttaaccgcggtcacaatggttccactaggaagtccatcgagttgcatcctcaaagcctcaatatagggctttatctcgaactcagcatcgcccatcttgtcgtctttgctaaacatgtcgtgatcatacaccgtctacatataacattagatagttttatcaatataaacaacatcttatgataagaaaattaatgtatgttttagtatgtaaaaagtaccaagaggacggtaagattggagtctgtgacggagagagtcaaatcttcattccattctggattaacatctttgttaatgacacgagtcttcaatttctgtaagatttaatatgataatttgagaatgtttttgatgtaatgaaattgcatgtgaagttgtaaaatgatgaatggattaacctgtttgcccatcttgacgacgacgtaaggatcgctgctactgatgtcacggacggctaaattgacgccacgtttgatacggattctaaggaggcccaagagatcgtccattagtgagcttgtcctcgccggacacgccgttgtcatttcctttattaatgttcctga

SEQ ID NO: 8787 - DNA, 143 bp, Arabidopsis thaliana landsberg
  unsure (1)..(143): unsure at all n locations
aaaaatttcagccaactntactaatnggctccgtagattttaattttcattatcngtatcccattatnacgcacagcaaaanggaaagggaacttgagggaatacaagagaaagccaagccgcatgacngaagaaagagcaag

SEQ ID NO: 8788 - DNA, 1867 bp, Arabidopsis thaliana landsberg
  unsure (1)..(1867): unsure at all n locations
agtaattctaaaattctcgtggcctatttttatttgttgaggaactcatgaatggtttaacttacgaggaaatattcttggccacgaaatagaaagtctaaaaccatcagtgttcagctttttcatcaactggatatcctcctgttgatttagataggcatacgaaacattagttataaaattaagtaattaacatgacttcgtagagcccatgaatctaacgattcactatgaaaattctaatcgataaaacttaataaaataaataactataaaaactgaaccttatgatgcactttatcctaagtgttatatagttaccaacttttacaagattaacttagttctttttttatttaactaatcatcttgtgttgttccaaattattctttatacagttttgataaaatgttttcccgaaattaattattgaactacttcaatcatcttttagttgttcgaactacacgtgagaaactgatactatcaatgatcaaacgtttaaaaagagaatctagaagctaataccttgtagcgatggtagaaatcgacggcctcgtcagcattgtgattcttaactctatctgcagtttaaatatagtacaaaatgttatttattatcaccagatatctggttcgctacacagttacttattataatactggtcgttaacaactctttataatacctcttggaatcaaattcataataacacacgagtgatgaatgcatgttttaaaaaaaccgacaactaattaataagtggacatatatatgcttcgtggtcgaaataaatagaaaagaaaagagacagacgtggaaatttcttggtgtagatgtcccacaggcttggacctctgcaaccttcatttactgcaccttccacctattttaaccatataaatacataaatcattttcattgttccatttcccaacatattcttagcttcacccaatgttttgtaagtgttttaatatcaccatttatatggatattttatctattttgtatacatatacatgtacctgaaaggctgcggttgcggtaccaaacataaagccctccggaaaacttgcacggctaagagtttcggtcttcgggcaaacaggtccttcttcagcccttgtcggagagccgacaagacttagtagtaaaagtaaccccaagagaggaatcttcattgttgattttttttataagctcacgagtgtgtttttggtcaaaaagttcaaaacaaagtggaagactatgttgatttgaaaggagaaatatcgttatatatttatagatatatacatgcatatatgcatgtacgtgacaccgatcaggtgatgaatttcaaagcccaaattgtatttggaggccgccaagtgtatttacactattacatgcagattgatcagttcttgaaggccaagtgtctttttgtcactctcactattgcatgcacattgtcaattttctgttatagtctcctcgttttaaggcgtgatattcgcatgtgtttgtaatattcgcatgtgttacacattatgtgtacgtcaaataaatctcacatctggatgttaagattgagtgtacgattctgtagaagcacaagtggatattgagaccaagtgtttgatatttgaagggtcataagcggattagaattttaataagtggaacaattatcatatagagtaacgtgtgatctttagatccacaagtttgggtttgagtcagtcgctatctaaataagtctccatgtctatataaaaacgcacttgcatgcatcagtcatcaccacaccaactctctcatctctttttgtcancagaaaaaaaaaccagaagtacgtacgtagcctctctttcttatgg

SEQ ID NO: 8789 - DNA, 1384 bp, Arabidopsis thaliana landsberg
tataataattaataaaaaatttaatatgataatttagatatcaaatctaatttgttgattttaattggttacttttttgggaattaataatgtattttgtttttctaattaaattaaattaattaaaatttagatatcaaatcttatatgttgattttgattggttattatttttgaaaattaataatgtatttcgtttttaattaaatttaattaattaaattagtatttgactttttaatcctcaaagagataaattaatttactctttaaaattttatttctaatgacatacctatgtaattacttacaaaaattaaagttatatttaaaatgtacttcccaaataatatagtaggatgaatctaataacccaaaatttataaaaatttaaattataatcaacagtttgatcatcttgttcatacaaaatttcgtataagacattaattaacaaagcaaaaaatcatatatcaaaatagacacatattaacaaaggattaataatttaatagttgtgaaaagcctttccagtttcttccacggcctagctcctccgtctttacgctctctcatcaaactcgagaaaaaaaaagtggcgcctctgcaatttcaattttcaaatcctaataattttctctcgcttcccggagaacggaaccctaatttctcgacgcagacatgattttgagaactccgcagccgaagaggctcaggtccgacgccggagaaagccccttccccaccggcgctactggttccggcaatcagctaatcatctacgaagattctcctcttcctgctcctgctccgctacaaacttctcatgatcattcggcggatcaacatctttgcacctatcaatgccgccaaatggtcactacttatacctatctatctatatcccctcacgaagattagcgaatctgaggtttgttcttgttgttgttaggttaaagctgatgttctagatgccttgagcacagcagagaaacaagttgaggaatctaaaaccaaattacagactcttaatgccaacttcaccgaagcaggtgagagatcgtttgtgaattcgaaattacaaaggtcttgattccgaatgtctctgctttaactgttgttaacgaatttgattttgatattctacaacagatgctgaaagaaagcattttcgagataaattcttatactcagagcaagagcttgctgctgctaaagcgcgtgagaaaatgcttcaggagcagcttcttatggagatcaacaattctcaagagcggtataccaaagaactacaatcttgccatgaactggaggttgatctaactattaaattgacttgaatttctcgttttacttggtgcatttgtgccagtatcattaactg

SEQ ID NO: 8790 - DNA, 1465 bp, Arabidopsis thaliana landsberg
ctgccacatcaagacgaccagattgagcacaagcagataaaattctttaaaccgttaccgcatccggttcatacggttgtccttgcatattaaagaaagcatcaatagcatcatcagaatacccattctgtgcataaccagcaatcaaagtgttccaaatcaccaaatcacgagcaaaaactcgataaaaaatagctctagcttcatgcacatcacctatcctaaaatacccagacatcatcaatgaccatacaaaggcgttcttctccggtatatcctcgaaaaacttccttgcatcctccatttttcgattattaacgtaaactccaagcatcacagaccaagccttcacattctttaactcgaaaggcattctctcaaacaattctctagctttctcaatctctattctcttcccataccctttaatcatctcgatccaagtcaccgtatttctacaaaccgatatctcttcaaacaatccactagccaaaactgcatcaccattgctcatatacccaccaatcatagcgttccaagtagccacgtttctctcaggcatttcgtcaaacaccttacgtgcagaaactacacatccacatttcccatacatactgatcagagagcttcccaccataacatcagaacaaacaccgaacttgattgattcagaatgcaacagcttcccaagaacaacacgtggaacaacgcaagcacatgcccttaaaatcaaaggaacccatcccggaaaatacactcctctgcggcggattcctccgtacaaaaccagagcttgtattggtgatcctctagatatatgattctttataagattcgacacatgaaactcacctaacgataaatgttcctccaaattcatcaatcactgtgaccaaaaaaaaaacactcttcgctagtcttgtaataatattgacttataaaaaagtacactttcaaggaaatgagagtttgcttcgttgatcaaagtacaaaggtctctttgagaatcaaaattcttgtttttttcttcttttcaaatttggttatttgagtgtcctaaagacaaaccctaaaagaacgaggaaacagctaatgtagcatgcacggaactgaacagaaatgttttgtttctgtcttgaactgatcttctagttgcggtaaaatggatcaatccaatcatcaggtaagaagagcttcattcttgtttaactcatttaaatccactcttactctcaaaccagagtttaccaaagcattgaccattgcagggatgtcagatttcagtgatgcagctacgtcctgtttttttaaggagacatggtttaggttacgagcttttttggttttaggtaaacataaagaggagtgagttctaccttcttatcttgttcattttggtgcttgataatgtcaacagaccactcgtttaccaacttcttgaattcagcctcaagtgctgacttct

SEQ ID NO: 8791 - DNA, 1523 bp, Arabidopsis thaliana landsberg
ggtgtctagcaaaatgagccgaccacaagatccactttgaggtttcttcccatttggaaatcccttgcggatgttatcatcaaagggatcagatttatcgccatggctactttctctattgaacggctttgagctacgtttggaagagagactgaagaaacttatgcctaagaacaaagatgacatcctcactttatcctggatgaagctagctatggagtcactctgcgagactcataagaacattaacactctcattactgatctccagcttcctgtctctgattgggaagagaaatgggttgatgtttacctcaacattagcgttaggttactagatctctgtaatgcctttagctctgagctcacacgtctcaaccagggagatctcttcctcaagtgtgttctgcacaatttacaatcggattctggggagaagtatctccaggctcgatcttcgcttgatagctggaggcaacatgttaatacaaacaaccctagaattgaaaactgccgtgcggttctagacagtcttgttaaatctctgagtctgcctaaagtcaagaactcgcctaaaggaaaggttctgatgcgagctttttatggtgtgaaggttcaaacagtttatatctgcagtgtatttaccgcagcctggtctgattccaccaaggatcttttcgatttacctgtctctgaaaaaccattatgggcaaaggtctttactgatatgcagagtgttgtaaatgctgagatcagagacatgttgtcttccggtagaaccacgattctcaaagagctggagagcgttgatgctagtgtcgagaagctatacccgatgatccaagatggtgttgatcctgtcgaagttgaattcttcaaagataatgttatggaattggggacacaagctgagaaattgtctcaagggttggatcagttactggaggaagttgatagtttctttaaactgactttgagagggcgcgatgtgttgctctgtaatcttaggtcaagtgactcaatctctggcaatgcagttggagaagatgtagactaaaatagtgaggtaaacaaacaagtttaacccttacaaaaggcagctttaggttctataaatagtgttttctcttttttctttgttttgagtccatctgtcgagcttgtctcttccgtttaggtgtgttggtcttgtatgtgtgactgtatgaaatcaattctgcaataaaatataaatatagaatacatctgtttggcttgaaaaaatcactgctctctttgtagtgatccaatctttctaaacctgtttcaatcaaaggaacaaatcagaggctttgatctatagttaagtgcaattagtagtaacaaatgaaaaatgcaatattgagctaatatcgagtgactgtgcttcttgttaccatacacgtatgtaatctttcatgatctttagattcacgggtcccttgagagatcttttacagttgaaaaaagcttctctcttcacatggatttagtgtcttcaagag

SEQ ID NO: 8792 - DNA, 1290 bp, Arabidopsis thaliana landsberg
aatttttacttttcaaaacttaatagttaataatagtatataatgtttcatttcattattataataataagttatttgggaagaaatttggacattttatgtactaccatttctgctctttcatatagagaataaaatgataatttattgattattttttatgatatattttttgtaaaatttaaaactaatagatttattttaatacatatcaaaatctccattatttctcatattttcaattagtttataaaaggataatgaatcgattcattgtactatagttacaaacttgacctaaccatggttaactctggtatatatgaatgactcacgttttaacggctctttactcatctagttgtcctctgttttgccctttcactcccctagactcctactttctctgatacaattttttgtttgtttcttgtgtaatttaaagattctctataaccttaatagcattcataaaccggattggatccattgtgagagaatgaatcactccacttctgatcagagcctctacatcgagagtgatgatggagatgacgagagaaaacacttgtccgacgatgaagacgacgatggaactctttctgatacttctgacgcttacaatcaaaaccaacatcatctgtctaaagctagcccatactcaacggcatggcctaagagttataggtatcatgattctcaaatttctaacgttaatgttaatgcttctttgtcatttgtgtttacttaattactcatgttaatgtttcaggcaatcgattgatatgtttggaagtgtaccatcaccaaatttgggttttcttgctaattcttctatgtcgagaagaggaagctcattcatgtcttcgacactgacaagaagacatactccagaatcattaccttgtgttacaaagcctctcctagaagatgaagaagcaccaaaacataaacttagcactcattctttgcttccgtcgaaaccatcgtcatccatggtggggtctcatgatatgggaatctccaatgatagctcctttggacaggctgttcttaatggtgagtttcatcacaactacttggtaatctctatgatggcactgtcaaactattttttcggtgtgatcacttgaagttagactaattaaataagagatctaatacatatgtaacaccaaaactattcttacattttgtccagcaaaaaaataaaacactttagtcctttctaaacaaaagtttttaactgagagacaatagtatcaaacttgtgataacagaaaataactg

SEQ ID NO: 8793 - DNA, 973 bp, Arabidopsis thaliana landsberg
cttcaattggtgatgaagattctattttgcccttgcctgagagtaatgatcgcaagtggagcgacacaaatgtatatgctcggaaaaaggtattgttaaggtctagttgttttgttgcatggccatgttgagactattagttaggatgaaatgttgtaacaaacatcagaggaaacattccttttcttatgtagaggcgattaaactgacaacttttcgatttcaggtactgcaattttgggtccaacttccaaacggtaactgggagctgggaaagataatgtcaacttcaggagaagagtctgttatcgtggtaactgagggaaaagtaagtgattttgttaaattccctgggtgaatgtaaactattattgtaagtgtttgatcggaaactatctcttcacttgattcaacaggttttaaaagtcaaatcagagactttagtacctgcaaatcctgatattcttgatggagtagacgatctcatgcaactaagttatttaaatgagccagcagtgttgtacaaccttgagtataggtacaaccaggacatgatatatgtaagccgtttgtgctaatacagtttattttttctgacatgttgacaatctcttctctgaactatatatagtaaaatgttataccctttactatttgcttttctgaattttcctttatggtgctagacaaaagcagggccggttctggtggctgtgaatcccttcaaggaggttcctttgtacggtaatcgcaacattgaagcatacaggaagagatcaaatgagagccctcatgtctatgctattgcagatacagcaatacgtgaaatgatacgaggttggatcatgtttttttttttttaatatgttcatcttcttaatgtattacattctatgttttcagtcttatcttttcctgtttccattacagatgaagttaaccaatcaatcattatcaggttagtcaaagtttc

SEQ ID NO: 8794 - DNA, 1186 bp, Arabidopsis thaliana landsberg
tcaacaattaactaaagaatgaaacatgaacccaccgcgtatcatttcgcgaattgctgtatctgcaattgcatacacatgaggactctcatttgatttcttcctgtatgcttcaatgtatcgatttccgtataaaggaacctccttaaaaggattcacagccaccaaaactggccctgcttttgtctagcaccataaaggaaaaaggttagccaagcaagagtagatgctggaacatatatagtaacagattcaggggaaagactattatcctgatgagcaaaaaaaaatatcacaacaaaagacttacatatatcatgtcttggttgtacctatagttgaggttgtacaacactgatggctcatttaagtaactaagctgcataagatcgtccactccatcaagaatatcaggatttgcaggtactagagtctctgatatgacttttataacctgtttcaagtttgaaagtagtttcagatcaaatacttcaaaaattaacctggctaccttagaaatacaaaaagttacttacttttccttcgggcaaagatataacagactcctcccctgaagttgacaatatcttcccaagctcccagttaccatttggaagttgaatccaagattgcagtatctaaagttaaaaactgtcaaaatttcatcccatattcttataactttagaagcaataagtttattctcaaattagcaagaaatccaccacataaccctcaagcctcgagaatcacaaaatgtaaatctaaggaataccttctttcgagcatatgcactagtgtcactccacctgcgttcatcattatgaggcaagggcattgtatcagctccagaatctacatcatccgttaaagactgctcttcaacaaaaacaccgtgcccgctatatggtgaatcctcactatccccagcagcagtatcagttcgactaacaccattccttaagccaccttttcttggaacattcgaattggtcaagcgaacgcttgcaccagaagaattttcaaggcggtcagagactggtgaaccatcaaatctatagtctgctggcaaagatttaagtgactgcatgaatggagtaaccttctcccacattttcctgcaagaaagaacgaaacatataagctcaaatgggaaatgttgaagaaaaaataaaacaatctagtc

SEQ ID NO: 8795 - DNA, 1766 bp, Arabidopsis thaliana landsberg
ttcataatgtgcaagatcgagctccaaactttctaaaggacactgctatgagacatcaaagtccataagatttatttctccccatgggaattctatattgatatggaagttgcagtcaaaactttgaaattggaggcatagaaaatcattcctgttgttttagttcacataactaatacatcacagatagatagaatggcggtagaaacaaaaaagtagaagaacaaagtacctcagcagattttggatcaggattaatgctgacatcaggaattccacgtacagtagaaggctggaggttctccctataagctctccaactagtagcaagatcaattggagaaactctgtcagcgttgatgaagactcggaattcaacaatcacatcaccttccagcctaaacagagctaatctagcatctccttgcaacgaaccaccagtaagaagcctattttcaccctcctccactatgcagggcgtatttctgttctttggcttcaacaaaaacttgaaatccaaagtctctacacaccaaaaaaagggcgatgcagaagcttagattgtaattcacagaaatcactctgcgattataacattggatttcgacgaaatatgctaaacaagttctccaaactgagtaataccgtgatcaggaggaacaacgaagcttagctccgacattaacgcagattcacgttgcatcggaagctgttaaagaagaattgattgacaacaagacgacggagaaacgcaatcaaaattcccgatgaatgaatcggaaggaaagacgaagaagataaaacaaaaatcaaacagatgctcacagctttggaaggatcccaggaaccgatgagaggaagagagccatagacatgaggagtgagctctccttcaaccttagagttttccattttgagtgaaacgtagagctgaccacctccgccattggaaccatcgtcatcttcctcagtattcttcgatgcacctgaccccatcgaaacccaccgtctcaattcctttttcccgtacttttctgttttgaatgaattaataagaagaagagattgcgacacagaaaaaatcaaacggataagagatttgagagaaagagagaagcgaagtcgctagctccgcagcttttttttgtctgggaaattccggttattctctgtggtgcattgggataaccggataagagcaaatacgtggtgattggttaacttggtttagcttcattttgggctgggcttgttttttattattgggcctatgtcaccgactggtgagaagctctgagagtttatttggtcgatcttaaaatagagccttgtcaatagttcactctccttcagcgttcagatcctgagagttttattgagcgccattaatttcttctctcttttgggttttaagcgccatgaatttcgaaaacctcaaatcacaaaaccgatggtgatgataaaaaattcgactgccgaagagaaactggaatcagagtcgtttgtcactcgtattaatccgaggtttgctctttcgcttctctgtttttgtttttcgttttcgcctgaagttttccgtcggattgagacttggtgttaaaattgattgtgttattggatatttgatagttgttaatctatgactccagaggtgttttagtattactatcttcaaatttcaataccaatttcaatttctagatttgaatgtgggccttttggttctgtgttagctggctaattgctttggaaaaatggggatgaac

SEQ ID NO: 8796 - DNA, 383 bp, Arabidopsis thaliana landsberg
gcatagaaaatcattccttttgttttagttcacataactaacacattacagatagatagaatggcggtagaaacaaaaaagtagaagaacaaagtacctcaacagattttggatcaggattaatgctgacatcaggaattccacgtacagtagaaggctggaggttctccctataagctctccaactagtagcaagatcaattggagaaactatgtcggcgttgatgaagacacaaaattcttaaatcacatcaccttccaacctaaacagagctaatctagcatctccttgcaacaaaccaccagtaagaagcctattttcaccctcctccactatgcagggagtatttatgttctttggcttcaacaaaaacttgaaatcc

SEQ ID NO: 8797 - DNA, 1539 bp, Arabidopsis thaliana landsberg
ttactaacggcccaataagtaacggcccatttatatttgcacgtagatatttaaaacaatctcatccgtccattaccaaccgtagattttactcgtctcagagggaataaataatatcctacgtggttatagcttcagactccagtggcatttcccgccaaaatcatcactaagactctagcctacattgaaaactggaatcgtctcttcttcctttaattcgaaaatccctaattctctctccgtaccgttcgtctcctctcctcccaaacagttgctatggacaatgctaatctcgcctccggctccggctcaggttcttatttcttctctagagagatagagtctgattctttctatagattttatcccaatttttaggatttactctgatctctgtcccttttgttattttaacttgacaatgatgtgtctgtgaatctacctctctgtgtctttactatatcttaacactattgcatcatggtgattttagatatgaaaaagaaacaaaagctggatgattctgtcgatgatgaggctcaggaggaggagaaacgtcgttatagatctatggctaaggttgctattggttatgggattaatccttctgacgagaactctgtcattcctgaaatgattcatactgtgtgcccggatttttcgctcgatacttctaaactcaagagcgcaattctggagatgcacgaagaaggtaaagaaaaggtcaagaaaatgctgaaggatggagaagggaaattaacactctgttatgaatggttttggacaagtgatgacattgatgaacctattttgaacgaggattttatcggtattagtgcctattttgctgatgaaaactggaagatgaagaaatggatcttggggtatcatcctcgtgcgtctttgtgtttgaaagacatttatgttgattctatcaagaatgttattctggattatgagatggagagcaaggtctcgactcttctaatgcctaactatggtgatcttggtgttaaagcgtttgatgattttagaaaatggattgaagagaaagggaaaaatctgatcggttctcgtgtgtttctcatctattgctgctctgacattttccggttaatggttgatgatatgtttaaggacataaacatatggctgatgggtcgtgttcggttgttggttggttggggaagaatggtacctaccaattgggatgtcacgttgtataatctgcaaaaagctgttgatatggaagctacgaatgtatttgaagaggaagaggattatcaggattatgaacaaccatctgatgaagaatggatcaagatcaaaactttttgcaaactcgcggcttgcatttataaagttgcaaaggagctttttgatggagagtatccaacatctaatgtctactttcaccttctcgctgagctaaaggtcatgctaaacaaggagctcaagaacggtgataatgattactttctcagcaaagcaaaagagatagtgaacaggtttgataagtactggaatgatatgttc

SEQ ID NO: 8798 - DNA, 1420 bp, Arabidopsis thaliana landsberg
ttctatttgttcattctcgacacgctctcttatgaagtgataccgcctatggatgtgtttgccctcgccatgaaatacagggttcttcgtgagagatatcgctgatttattgtcaatccgtataacaactcttttgcttggcaacccggtgacttcactgagcaaatcttggagccaaattgcttatcttgccgtttcaatgcctgccatgaattcagcctcacatgatgacattgccacaatatcttgcttttgtgagaaccaagagattggactttaatagcaaaaaaagatatgaccagatgtgcttcttccatcgtccggactccagatcaacgttatgactattgtcgctatagcctactaactttggtatcttagacaccgagtgtttaaataccaaaccaaggttagtggttccttaaagataccttaagcagtgcctcatagccgctccatgtgattctcttggactttgcatataacgactcattactcccacagagtaagataggtccggcctactatgtagaagatagcgcagacaaccaacctttttcctgaatcccgtagcatcaatttctttctcattctcggattttgctagttgtactacggactccctcgatgtatgaatcagactgcaactcaccattgcagtctcttctaatatcttcatcttataacgactttgattcaaccttatttcttcttttcgttgaaacacttcaattccgagataataagttaatttcccaaggctgctcatgttgaaatttgaagtcatctctcctttgaactcatcaataatggttgtatttgttcctgtaacaaataagtcatccacgtaaactgctacaagaagaaactcaccacttatagtttttcgataaaccgacggttcctttgaacatttttcaaactgtagctcttgaaggatctggttcagcttgttatttcacggccttggtgcttttcttaagcaatacaaagctttatggagcttgtaaacttttccttcttctcccttttctacaaaatcttctggtcgcgtgacataaacagtttcctttaactctccatgtaagaaagctgttttaacatcaagttgtatctcccaatcatttgaagcctcaaggtcgacaagaattattttctcaatacaagctactggaacaaagacttcatagaaatcagtcccataacgttgcacgtaacccttagcaacaagtcgagctttgtatttattgatacttacatcagaatttcgtttgagtttgaatacccattttaaaccaatcggctttattccaaatggaagatctacaagactccgagtctcgttcttctttatcgaatagatttcgtcttaaaatgaaaacatccaatccctagagtccattgcttcaccaaaatttct

SEQ ID NO: 8799 - DNA, 1374 bp, Arabidopsis thaliana landsberg
tggctgaggacactccttgaatgtttcacccactaagcgtttatatggttgagtaggcttgaaaattgttgcatgaggcaaccttgattttacccaatagtcctcggtaggcgagccacatagcttgaaaatcttgtgcaactgttccacctgtaacaccataagcattaccagagtcaccttacgaaaccaaactagtctaacataaatcagagcaaacactaaaagagaaaacaaaaactgtaaatctacctcggttctaccaggcataataggcttgcctgcatatagttcagcaagaatgcaacctgcactccacaaatcaactgctgctccatagcgagttgctccgagcaaaagctcaggtggacggtaccaaagagttaccacacgactggtcaaaggctgagtttgacgaggatcaaagaaactagctaatccaaagtcagcaatctttaaaactccactattatctattagcaggtttgagccttttatatcccgatggagtacaccacgactgtgacaatggtctagtccatgtaatagttgctgcaggtagcacttaacctgtatgaaaagaaagcccagcctcagaaaattgtactgaaagtggtgcctaggtcatgaagatgttgaatagaaacaaaaaaaagttacctgtgattcagaaaattttatcgcgggatgcgaggctagcccagctaaatcgtgttccatgtactcgaaaacaagatataagctgcaagacattcttgacgtaactaagccttctagctttatgatattaggatgatcaagccggcgtaatatctggatttctctagccataaaacgcacactttctggctccaagttatcaaacctaactttcttcaaagccacaattttcttctgatccaggtcgcgagccctatatacattactataagtgccctgaccaatctgcataaaacaattaaaaccgctgcatcagggatcattcttcacagctataagttcaaaaccttttcaggtcatgttatatagttttaaaaaccatcaactgaaaaacaaaatccactttcaataacataaaagcatcatttactgcaacccatatctttggagcttaggatatgtttctaaatacggaaacatgccactatatgtcatgcaatcaaaagagtctatttaacagtattttcaaaatgaatgtatatatacaaagaaaagaagattactttgtccaacttctcaaaagaatccgcacgccgaggaacccatcccctgatagcttctccagctacagaagccagccatggaggccaacctgcagctacatactctccttcagttgctttagctatggtaatctcattgcaagaggtgaag

SEQ ID NO: 8800 - DNA, 3143 bp, Arabidopsis thaliana landsberg
gagggagtccaaccggtggaaatcgaaaggtgggagggttgagaaggaatgtgtgcttggggaagactttatcgggcaatacaagatttgggactcgaccacacttgtccaggaactccgagaggacgtcttcgttggccgtgaaggaggcacggcggctggatgctaccggggacggaggaggggctcggaagtcgggagaggaaactccatgtttgtttggggtcttactcgtaataatacttgtatatatgtagagcaaggatcgatcattggccaaagaaaaagtttttgttaaataaagcaagagcataatgatgagatgcaattctcttgtttgcttttattcattgcaacttttccttttccaaaaaccagagaggatgacactattcatcatattatggatggacccaagttgggccttaagcggccttttgtttacccaattgacgtggatcctcacaggatgggcatcgagtgtgacacaagtccaagttggaagagtccttttctgtcacataaataaaaaaataaatgtcaagtagagagggcaagtggtgaatctctctcataccaattccaaaccaactaaatctacttagtaccagtacattgatggtagttgcattttcgcttgaaattgtctgtccttttgctagtttgagtcacaattttcaattgaaaagaaataagagagagaggtcagagtcaacgaaaagttataatttagattttgtgggctaaaattgacaaaagcgtaccaatacagggaccggtgagcaatggcaaattggtaaataaagggagaagccaaggagtggagacgcaatttgggaagagatagaaaaggaagaagacacgtcaacaatggaggttctgaagaagaagactctctcccagcagatttagagcgtgtgagggagataggaagagagaaagtgagcgagagacgatcacggccgcgctgaaatccacgaccacggccgctctgaagaagaagactctctccgtctcctcccttctcctccttcgtctaagagacaaggcatccccagacgccatgatctctctcactccctcgttgtttctggtattatttacatcattccttctccatccatcgtccatgtctcatctttttttatatacgaaaaagtctcattgctttggtttctcagaacaagacggttgttcctggatgttccacacgcctctctctgcgccagcctagaactataattactcctcctgcttccttgagagtcttttcctctctcggatctaaccaggatcccaccggcagcgttttgattgagaccactgccacttcatcctcctctctcgagacctccgccgccgacattgttcccaaatccaccgtatgtggtggagttcaggatgtctacggcgaggatgccgccaccgaggacatgcctatcactccttggtctctctctgtcgccagtgggtatacgttgttgcgtgatccacatcacaacaaaggccttgcctttagccacagagagcgtgacgctcactatctacgcggcctcctcccccccactgttatctcacaagatcttcaggtttcccgtcttgtcaggtttcacttaccctttctatatatatatgcaactggagatttggacttttgatccttttactgcacgctttgtctacaggttaaaaaaattatgcacactcttcgtcagtatcaagttcccttgcagaagtatatggctatgatggatctccaggtaaactaactcattaggaagtctcgctatctcaactacaccaagtgccttcctttgttacccaacttctttcacaatgcttttgtatttcaggagaccaacgagaggctgttttacaaacttctcattgatcacgtcgagaagttgctacccgttatctacactccaacggttggggaagcctgccagaagtatggtagcattttcctgcgtccacaggggctttttatcagcttgaaagaaaagtgagcctttttatacggaaatcaactaccactttcactattcttgttctcatcttttaagtgaggatacaattttcaataatagaggtaagattcatgaagtgctgaggaactggcctgagaagaacatccaggtcattgttgtcactgatggggagcgcattttagggttaggagatcttggatgtcaggcaagttgtttgattcttttctgctttcatgagagtggtgagtcagggtttatcctcttactaatttgcacattacatgccatcattaatgtcttcagggaatgggaatacctgttgggaaactttctctctacattttccttggaggagcccggccatctgccgtaagtatagttttatgctaatcagctttattgcattcaaccatatccactcatctttttctctctgtatattggttgccagtgtctgcccgtaacaatcgatgttgggacaaacaacgaaaagctattgaacgatgagttctacatagggctccgccaaaggagagctacaggagaggtaattggcacctttcacctttcagttagacggtcctgtgaaaattatggtgaaactgaacccttaatcctcttctttctacaggaatactccgaacttatgcatgaattcatgacagcagtcaagcagaactatggggagaaagtcgttattcaggttagcttgagacatagataagtgggataagtgtactccaccaacatgaatctgctgtcttgtaaccagatatgtttcttttgatgatttgcagtttgaagactttgccaaccataatgcttttgatctgttagctaagtatggtacaacacatcttgttttcaatgacgatattcaggtataactatatcctgtttaagttgtgagacaggaggtgatttcggcttggattacatatttaccaacttgtgaaactgtaatttcatatatagggcacagcatcagttgtgcttgctggacttatcgctgctcttagatttgtggggggatccttgtcagaccacagattcctcttcctcggggctggagaggtaaaggttgggatttcactgaacattccgtcattatgtttatctattccttgatggggatgggacaatctgcaggat

SEQ ID NO: 8801 - DNA, 1230 bp, Arabidopsis thaliana landsberg
atccgacttcttaaaaccggataaaaaggatccgcgtgtttttagagtgaaactacaaatttgaacagttaataacaattcatttcaatggccaggattagacgcaagaacccgactttttaaaaccggatagaaaggatccaagtgttttgaaacggatttttcatgaaataaaatttttaacccaatgacaaacttgttatttcttccaacttcatgcgtatctcattaaacgtacttcttaaataatagtatagatgcacttaaataaacaaaaatcttctaaaattcaaataattatatttatactcaaaaattcctattaataaacgttctaaactaaaattaatctagtagttaaccgttaagatttaaatatctaaattacaaaggagacatgaaaaatcaattttttatccttacatgttctaaagtaaagactaagagtaattatttactaaaacttactgcagagattattgttatttatcttaatttattatttattttattgaaatacactcgaatcccgaaaattagctaacgagttttttttttttttttgaagcaacagaatttcaaaggtttaaactagaagatataacaatgtaacgaatggataaaaccaaatctttataaatctaccgaaaactctccaaaaaaaaaaaatcatcttgagagaacacacttcacatttcatatataaaccttcccacgacgttacaagctcctaaagaaaacctaattgaaaaacaagagaaccactagccaaaccaaaaacaaaatgaagccatcctttgttcttctatctattgcactattactctcatcatcactatcggatgcagccgactttggatcaccgtcacagccaccgtcgatggctccaacaccgcaaccatcaaactccaccgactgttccagcgtcatatacagcatggttgattgtctctccttcttaaccgtcggatcaacggatccaagcccgaccaaaacatgttgtgttggggtcaaaaccgttcttaactatagccctaagtgtctttgctctgcgttagagagtagtcgtgaaatgggattcgtacttgatgatacaaaagctcttgccatgcctaaaatttgcaacgtccctattgatcctaattgtggtatatatctttctcttttggtcacattattatttattaaattatttaatgtggattaatattaattcattgttttgttatt

SEQ ID NO: 8802 - DNA, 1497 bp, Arabidopsis thaliana landsberg
aggtcatctaagaagttttttccttggcctttttgcaggttgttaatccatttaccaaatatcctttatcaagaaatattcagagacttttcatttatctctgtaattttgtcataagcttattcataatataaactgaaaattgtgtggccttaatagaaagaaagcacatatgctttgacattatctccagttgcaatgagtcttgaggagttaataccatcaaactatgggaagtcacgtttctacgcaatcgccattagaagtgcattagccatctctactctgctcgttggtcttgcgattcccttcttcggtaaggacaaacgaaaaatatacatgtaaagaaaataagtgtcacttcttttgacactcagaattcttgcaggccttgtcatgtcactgattggatcattcttgacaatgctcattgtaagttacacgtttgtttcatccttttctggttatgtaaagcaaattctcatattgcagtttcatagtgaatttgcttagcctgacaaagtttctggacacagacgctgatactaccgccagcttgtttcttgagcatcttaaggaaaaaagtaacccctactcaggtatggcctgctcacttactgataaccaaaccgaatatcgaaattcctcaaactgaaatcgatataacaatctgtggtttgtttgcaggtgacaatctgtatcttaattatgacagtaggagcagtatgttcagtcattggcacatattcagcccttgcaaagatcattgagaagttgaacacctaaaactgatcaatcttgagattcttattttgtttctcttgagattttgtttctgtcttaaatcaatggaacatctcaacctatatggaacattccaaacacataattgtattaaacatcttctgcatttaaatgttaccaaacagtgaactacaagaaacaattataatactggaacataaggtgaagttctgttccataatggttaagtagcaaaagcaaagaagatcactccttattcagtagaaatctttcctccagctaaatcttcaggagttaggttaagagaatccatggatcctttcttgaattcttccccttgagaagcaaggaagtcctccacgcttcctggttctccaaaccaaccacgacggtctgcaatcaaatgtagattatcacacccttcacatcgtaccaccacaacgccgttttcatatgattctcggctcgccatcttcatagatcttgtatcacagaccttgcaagtgaagaccatcatgaagtcatgcctcgggtttatttttaactgggacttgtacttcaccatcattttctcagagggcgtcgcatgggagggaactttggccgattcagtagcagagtttgacgagttgcagacattggttacagaagcttcatttgcctcactgattacagataactgcctctgaaataatcttccataaacatgacttctgctgaagagtgagtttg

SEQ ID NO: 8803 - DNA, 901 bp, Arabidopsis thaliana landsberg
ctcgaagggtgaggttaggaattgagtttttctcatcttttttgttctttagctctagcaataccgacccttcgcatccctaaaacatcatgattcaatcattagatcacaaggtgtcaaaaagactaaaaggaaaattcaggatgtcaagaaaggacattaccctaacgaagcaatcgtggaagaacatcctgagcaaaggagctgcaattgtccgatcattcttcacagcctcgaagacagactttttgacaataagctcggctttggggcatgccttgtcgtagaatccaactttcaatccttgcacatttgttggagcaaatgaagagagcaagcaatatattacttgaagaaacaagaaacaagagatagtcatcttcaaagcagccatattattattagctcctctttttgacagatgatcgatgatactaattgagttaatattgttgttgttatttatactaacgtgcttatgtaataatgtcacggaacttgttagtactatagtttaaggttgaaatacaaaaatacaaagtgttcgtggttacatcattgaattttaaagacaaagatataggaattttttgtaaatttgttgaattttatattgttgtttgtggaatatatatagctgtcctttgtttatggcttatcgtcttcgttgatgtttattactatttacaccagaaaaagggtgccaatgattttaaacaatgaaaaaaataaccaacacaaacttaataagtttttgaaatttggcaatattcagatcttttcgtcaactaggtgttgaaacgaataagaaacacttgataacgaaaatggtaatttgtcgaaactaacttgaattgaccagtaaccacaagaaaaactttatatacgtttacattagaag

SEQ ID NO: 8804 - DNA, 2006 bp, Arabidopsis thaliana landsberg
aagtcggaataagtcaactgcaagaaagtccatcaaaaatacgtaaaactcactattttaaaaaataaattaatcgttaaaagatataactcagcactataaagaagtggaaaatgtttaaaatcatccaaaaaatacatccattccggtatgatttttttgttgaatacatggaaatcaattttttaaaataaaaaaattgcataatcaaaactaaaacgataaaatatatgtaagaaattgaataaaatcaatactaaaaatgataagtttaatgtgaaagaaatataagtttattcacattatactctagtatatattgatagatatgacacgttagttgttacacatagaagatttgattagtgaagtagcaacaaggttatatatatacaaataaaagagaaaagaaaacaaagaaacaaataaagagagagagatgatttgacgagtgactgatcaaaatatggcagactgtccgtacctttcttttctaagttctgaattgctgacttatctgttctttcttttttttttcaccccaaacacaattaattaccaatcttttggagtcaatgctcttatcccattcaaatctgaaatctccttacctaacacacccttcctcacatacattgacatttgacacattctttgttatttctcaattagtattgtcctttaagtacataaaatgattgtttttgtaacaatgatgggtaatttatagtttacactaatgctgttagtttgttgccatctagggttcatctaaaataataataataaaaaaaaaaaatctagggttcatctttaggaaaaaagcatgtcgacaaaagagaatctaaatggtcgatgtgttcaatgtttagtgcctcatgggatttttcaaacgtagcactatatcaaagattcaaagtgtaacgtttaagacaaggaaaacaattgttagcataagaataactaagtttgtaataaactatatttaaatgcaaatatgcaatatagtccgatacgtcaatcgttctacaaaatatgttttgaagtatttaatagcgttacacgattgtgtgaaacgatttttgtatagttttaaattcatgcaacggtaataactcatacacaatctctaatgtacatgagcaatcacatcgcgagttaactaatcatagatataatagtatatagtatagcttatcgcattatatgcatgtttatgatgatatctgttttttttttaaattgaatatgcacgacgcaacaggagtggtcaaaaccaaaatgtagagaatttattatgttcaatagggaaacttaagattttacctctgtttgtctacttggtgaattatttagggtgaatattacaattattattatcatgatcatcgctgtggaaaattagtgtctcattaggtactgttgataaacagaaaagttagaccgtaagatatgataattctatgccaaaattaatcacaaagccataacgtgtaacacatatataccatctttcttcttcttttatacgtatcatttaatttttcagttaaaaataaactaaacagttgggtattttctgaaagcaaaaaataaactaatcagttgggtattttttgaaacattttattttcatttttgacaaccaaagagagagctctctagtaagtagtagagaagaagctacgaatgttttaagatagggccagcgtaccaatcgaacccaaccctggtgtcatgtgttctctgactgtgagtgacacaaccactttgaacggggctcaattggtagttcacaatgacttgtaatctaagtagtttgtgatagtgttatcattgtacatatcatcatccgaattcaaattcgtattttattttatttttggatcgacaaagtccgatccatagtcaaaccctactatgccgggaaatacgatttagtggagtggaatctccggtggggaagacggaaaaatggacttaaccatttgactaaaggcacatcc

SEQ ID NO: 8805 - DNA, 1801 bp, Arabidopsis thaliana landsberg
tatttaatcagtaagtacaatctcaatatataccataaagcaattatattataatcatcaccaactgattaatactattaaaacggactctaatcaaagtcccatcagagactttggaagaaaagaatcgaatgattccagaaggaaaaaagctttaaaataacttaaactatttcgcatttttagctaaagcatatgattaaatgggaaacctaaataaattattacacacacttattgaagaacttttgcatttattaaattgattaaaaattagccttagaacgcgctaatcacaagatcacatgcaagttcctcttacttcgtccactatataaacacatccaccattacttcttcctccaaacacattccaaagcatctcattcctctatcaacaaacaaacaaaaaaaaagcttattcaatttcactacctattcttttgattcgatcaaaatcatcttctaaagatacctaaactattccattttcactacttgtaatcttgattcgatcaaactcacccctaaagatggagaacatgtttaggctcatgggaagtgaagattcctccgacagaagacggtgcatttgggttaacggtcctgtaatcgtcggagccgggccatcggggctagccacggcagcctgcctccgcgaggaaggtgttccctttgtggtattggagagagcagattgcatagcttcactatggcaaaaacgaacttacgatagaatcaaacttcatttaccaaagaaagtttgtcaattacccaaaatgcccttcccggaagactacccggaatatccaacaaaacgacagttcatcgagtaccttgagtcctacgcaaacaaattcgaaattactcctcagttcaacgagtgtgtccagtctgctcgatacgacgagacaagtggtctctggcgcatcaagacaacatcttcctcttcctcggggtcggagatggaatatatctgccggtggttagtggtggcgacaggagaaaacgcggagaaagttgttccagagatcgatgggctcacaacggagtttgaaggcgaggtgatccactcgtgtgagtacaaatccggcgagaaatacagaggaaagagtgttcttgtcgtcggatgtggaaactccggcatggaagtctctcttgatctcgcaaatcacaatgctaatgcatccatggttgttcgtagctcggttcatgtgttaccaagagagattttaggcaaatctagttttgaaatctccatgatgttgatgaagtggtttcctctgtggctagtagacaagattctactgattcttgcatggctgattttaggaaatttgacaaagtatggcctaaagaggcccacgatgggcccaatggagctcaagattgtttcaggtaagactccagttctagacatcggagctatggagaaaatcaaatccggtgaagtagaaatcgtcccgggaattaaacggttctctcgtagtcacgtggagctagtagacggtcagagattagatctcgatgcggaggttctcgccacgggttaccgtagcaacgtcccatcatggctccaaaaaaatgatctgttttcgaaaaacgggttcccgaaatcgccgtttccaaacgcgtggcaagggaaatcgggactttacgcggctggattcacaaggaaaggattggctggagcatcagcagacgccgttaacatcgctcaagatattggaaacgtgtggagagaagaaaccaaacgacagaaaatgagaacacgagtgggtcaccgcagatgcatttcagt

SEQ ID NO: 8806 - DNA, 1207 bp, Arabidopsis thaliana landsberg
aatatttattcggtggtgacacaatatgtaaaagtatacggtggtgtacaaaatatgtgaaagtgtacgatgttgtacaccattaatatcatgtacaccactaaaatggttcactctttctagacgtggtgtacaaattatgtgaaggtgtacaacatatcatgtacaccatatttaagatatcatctttgcacatattgtttgtacaccaacacgtatactgttatatccagtataccacttcttacatcagtatcatacattactttttatactattgtcgtacactactgtttgtacactagtactttttgcatggtcacgtacaccgtcgggttgagattaaatataaaaaatgttatgtatttccaaaatatagcaaaagtagactttttagattcacagaaaaaattaaatataaatatgttgttgtgaaaatatttttatgaaagtttttaaagcaaaccaaacttcaaatatttaaatcaaaaagaatatacatgtagatatataaaaacaaaaaatgatatacatgtcatttaccaatatctctattagagaagagagagaaaagtgtctactttactaatttataaaaaaactacccatattacaaattatttatagaaaaagtgtctactttataaattatctctatagaaaatggtacaaaaataaacccagttagccatttccattagaagttctaaaactaagaaaacttataatattatctaaacaatgaaatataatttatttattttaatttaaatttaggattagtttttaaaaaatcaggatacaattttacaaaatattttatgaatttaaaatcggattatcattatttccctatctagctaggtaaatagtttttatccctaattactgaataatttataaataactttaacaccaatactatcaatatattgtataatctgtagataaatttggatgattaattcgaatatacgcaatgttacaaaaaaaactgcatttatcttgttttgatccaacccgaaaaaatgtatggtgcagaactttcttgatacaaaaaataaagaaataaatattgtattaataaattgatgtcattttttacatgtattatattttatatttttatttttagtaataatattataaattaatttacagaatataactaataatatattttgatttataggtacacattgctatt

SEQ ID NO: 8807 - DNA, 2543 bp, Arabidopsis thaliana landsberg
  unsure (1)..(2543): unsure at all n locations
ttttttttttttaaagaagaaactaaatttttaaattttttttttttttttttggttttaaatggtttaaaacaaatttaaatttttatttttgttagattagaataaacttttctaccaatttctaatttatatttataaaaccatttaccaaaaaaaattatatatatttataaaccttccacattctttgaagtcacacaagtgaattcaaagagtataatcatcaacaacaaacaaacgatggctaacgcaaaagacgtgaaagacttcaaagaaacttttcagagatttgatcaatatgtaaacggagagattccatggagggtatttgacatgactggcgtacgcaaacgttctactccgatgaccaagtctgaaatcgacacaatatttgtagagcttggaactcgtggtgaagatagagtctttagagattccaagttttccggtaatcctcttcaagcttctgtctctcttaaacataagcctaaagatgtgattaatgtggtgcaaaaagagtcttgtgtctataattctgacaatgatgaaaagaaaacagagaattaacttcaaattccaaagaaggtctctcgaaaatatagtgaacgatgataaagattttgagttttgttaggtgtaagttcttttggttttggtgttaatcaagtttttaataatgactttgatagagcttttttctttctttgtgttaacaactttgatggagcttttgtcgtttaatatatctttatgttattatcttactaaaccataaagatttttttttatttacgaacgttaaatcagggaacaagattaggttctagaatatacttgatgacgcattacaatatgaattttggaaaatcaattttgttgggctgatgacaaaaaataatgttgggctgaaataggcccattaagaaacctcgacgtgcgagacgcgtacaccacacaagcgccacgtgcttaaccctccgtacatcttcttcttccttttgtaccacaaaatcaacaaaggcaaagaaaaagatctaaaacttgttcactaagaaaaaatcaaaatcaaaatcagagcaccaaaaccgactcagatctagatcggaattctccaatggctctcgaatgggttgtgttaggttacgcagcagcagctgaagcgatcatggtgatcctcttgacgatgcctggacttgacgctctccgcaaaggattagtcgctgtaactcgtaatctcttaaaaccgtttctctctataatcccgttttgtctcttccttcttatggatatttactggaagtacgagactcgaccttcttgcgatggtgattcgtgtactccttctgagcatcttcgtcaccagaaatcgatcatgaagtctcagcgtaacgcgcttctgattgcgtcggctcttgttttctactggattttgtactctgtcacgaatttggttgtgaggattgagcagcttaatcagagggttgagaggctcaagaacaaggattaagatccagcttcttcttccctcgtcgtcctcaggtcctttagtgtttttgctgttttcgaatttcgatgaaagagtctctttactacttgtgtcgttttagtttttttctgcgttctttttttcgatgtttgctctttgttcaactggggattgaaggatctataatacttaaaaatatatgcttcttatgccttgttcaatgcttgtttgattatctgatctgttgcacgtttggattttgattgatgaaacttccaataaaacttcaaacttggagcctttgtttgattgtgttctaatatcttagtttgataatcatgaaccaatcatttgacaatgatttaatcaacttagggactccagttatggatttgattagtccctctttttcagttatcagttcttgatagagtaatgtagataatttacactagctgctccatggttcttaatggacatctgtcccaatctctctgttacacagtcaaatagggtttgaatttttctattcttctccataatctcagttttgcagaggtaaaaatcccaactttgttttgatacaaagcaacctcagagtttcagtctttcttagatgatatgaccgcaaaccccacttttcggcaggatctatgcaatagtaatagtaaccaactgaaacatttattcagccaataatcagaacaaattaaacgttttctacataaaaaaaaactcgaggaaaaacggttctcttctaagtaaaaaattgagaagactcctttttctttcttggactacttcagggaaggatttcacangaaaggcatacttagttctttttcagacaatccacttttgaaccaaattaagacccatgagcatttttgcaggaagcaaacaccttgtgaccaaatgtcgctggaaccatattcacattgtccatcactatatctgagcatcccaagtctgcatcacaattcaatgtaatgtcttgatcgcttgcagatgacccacggattctagcgtaacgcacgtcactcactttcacgcc

SEQ ID NO: 8808 - DNA, 2039 bp, Arabidopsis thaliana landsberg
tgtcttcgttagtggattggttagatgtggaaatattttaaaattcttacgagcgtttctgtttttgaaattcccttttataaaaaatataggatataacttgtgaagaatgtttacaaatgatttgactcatatattcaaaattgatgtgacacaaatattaattttaggttttgggatgatgtatgattttcttagtttagcggaaatcaaattgaacccgcaagatagtgttaagacgtctaataccagctttggtcatgtcattatcattatcatcctttatactccaaaaatgttatatgtttttgaagcccagtaaaaaataattgtttttgttaagttcacccaatttatgtaatagtggttgggctgaaacaataaccttgattttgggctttaatacgacccttatttagatgggccgggttaaaccgtacccgccacaacacacctacacctactttccacagtatcgatcctgcaagtcatcgtcttcaattggcatctgaagaagaaaggagccatgacaatgtttagatctatctccatggtaatgctgctcgtcgcactagttacattcatttctatggtttcttctgctgcttcgtccccagaagccgactttgttaagaagactatctcttcccataagatcgtcattttctccaaatcctactgcccgtatgtctctttctctgctcatgttcaatcactttttatccgattcgcagaaaaattggatcttgggtgacttcaatttgcgattttgttttttagatcgttaatatctgaaatatgagtgaaagacttgaacccaaatgcacttgtattcgttagatttggatttttatgagacagactttgttatctctgtttacaaatggtggttgaaatcaatatggattttcgtttaagatatattcaggttcagttctcagtatttgttctctttgcttttcctttggccttaattgagttgtgtagagagatcatgtacctatgtatatgactcatctctacttttcctttgcttacttgtggtttggtcaacagctactgcaagaaagctaaatcagtgttcagagagctggatcaagttccttatgttgtcgagcttgatgaaagaggtgtgttttaaggttaaagggaatcatgtcttcatcatccaacaatgtttcttagctctcagacatttctgtcatttgaaactttgtccgatcactatgtagaagattcatttgtgactaatggttggtaaaaatttggtcttgcagaagatggttggagcatccagactgcacttggagagattgttggaaggcgaacagtaccgcaagtcttcattaacggaaaacatctcggaggatcagatggtatacttaacactccttttccttcaacaaaacgtctttgcttatgccaacatttgctgatcgatagatttatctttgtttctggttatagataccgtagatgcgtatgagagcggtgaactcgccaagcttcttggtgtttccgggaacaaagaagctgaactctaggttatatatagttggaagaattgataacactctctgtgatgcttaggtgtaagcaattcaatttccatttgtattgtgttctgcagcttgatcatgaccttgagacagcttgatcttgccttttaaacgtatcttatcaaagaccacattctgagttatacaaattgggttgaggaatcaaatctggacatgctacaaataacttatctgaacaacacacaaactttaagtgcattgtactgtttgggggataaatagagagtagctaagactagtggaaataaaacaaaatagatagtagctaagattagtggaaataaaacatctagggtcgtgctcttttgttgctgcaagtagggcacttgtaatgcttgatatgctccgctctagctggagtgatcttcacacactccccgtgaaaacatttctcgcacatgtcacagcaaatccagaattcatcagaagcatagttatctccacatgctccaccgttag

SEQ ID NO: 8809 - DNA, 1143 bp, Arabidopsis thaliana landsberg
gaatgaattgtttcaatattaggaaaaaaagcattagactgacgatgtaaggattcattgaaacagggcagtgaagaggtcgaattgtttccacaaaaatgggcataatgttaaatgtgccacttcaaacactcccttcatgatcatatttgcaatcatccaaattattcttagccaaatcccaaatttccataacctctcttggctctccattcttgcggccgtaatgtccttttgttatgcctccatcggtgttggtctctccatcgccaaagcggcgggtaaataaaatatacattcctattcttacaattatacatcttcttaaagagtgtgacctaatggttttgaagaacgtacaaataaaggtggcggtgagcacgtaagaacaacactgacaggagttacggtcgggattgatgtatcgggtgccgagaaaatatggagaacgttccaagcgattggggacattgcatttgcctacgcatactcaactgttctcattgaaatacaggcaagtcactattaatgtcctactgatattttgtaagcatgttacatgttgagggttgacttaatgatagtaggagttagggagacagcaataagagagagtcccaaaaaattgaattgtgtgccgtctggtcgcaaagtaaacgtcactgcatggacctacccattaaagacatagagttacttttgagaggagacagtctattaggaaacttattcaatttgaaatcatttcaatattgaaaacaatttaaaagattaggatgaattaataagagttcaccacaatccagataactcatgttaaaaaaaaaaaaaaaaaagagtttctgttaagtttggtttagcttctattgttttgtttgtctatctctactaaactattaacaattgtatatttctctaaaccatggcaggacaccttgaaagcaggtcctccatcggagaacaaagccatgaaaagagcaagccttgtgggtgtctccacaacaaccttcttctacatgttatgcggttgtgttggttacgctgcctttggaaatgatgctcctggaaaattcctaactggttttggtttctatgagccattctggctaatcgactttgccaatgtctgcaaaaccgtgcacc

SEQ ID NO: 8810 - DNA, 581 bp, Arabidopsis thaliana landsberg
aaccaccagaacgttctgtggttacacccgcagcaacaactgctgttcctgtcaaaacaacaagtcctccatcttttattgccgctaaaccgttttccaaatcccgcggctgaaacaaaggctctttcttcctatgggagatacagcatatgacagtcaacacgaaaataacacaggcacctaatataatgatgacattaacaacaggctccattatatcttttaacttttttttgtgaaactgaactgataccaaaggatgcaagaatagtgtccttttatatagaaaggttatgaaataaacctctctagtttcttaaacatacacgaaattgcaaaggaaatttcaacattacttgcaaaaatttagacattttcttgattattttcttataaattcaatgaaattccataaattttaaacttgcgttttattatttaaataaatatatacattgaatttttcgctgacacaacttcgttgatgtttctgctcacacagccatacagcagaatattcattcttcgtcgtgtagaatattatttaaaattatgattacagctttcaagaaattagtaca

SEQ ID NO: 8811 - DNA, 1519 bp, Arabidopsis thaliana landsberg
gatgtcgatatctgctcttggtctactctccatgacctgacatttaaacttcaacagctatttttaaactattgatgtttatttcagtttttggacttatatctataagcaaatcttgtttacctcaacagtggctccattgcttagattctgtgactttgggataaactcgaaaatatagtcacacacagagagaaggcaattcatttctctcttccacgtcgtcttctgctctatctccaatggttctaatcttagattctgtccaaaaacagtagctgcaaatctcaaaatcaaaagacattaactacagtttctctagatggcttagtttgaaagtcacaaaactgtgaggcgtattagtgtttagttaccataaagattggttatagcgtttgagattgtcactgcggtgcaaacgcctttgccgcttcctgacatatcttccccaagcagaagcttcgagaatctttccttcatcgtctccagctctgctacgaaaccgataacagtttcatgattataatgacaaagaggaaatacagacacagagaaagagagagagacggagaaacacaaaacctggctctgaaatttcttggaccgcaaggtgctcatcagtctcaatctgattatgtttcaagtcgaagacagttggaaaatttgagctcgcagagttgttggattcggttaagacaggccaatcactaggagaagcctcagtgcagaaactgctggtttcatctatttggtctgaaaagcctcctccagaggtttcagaacatgttcgatgataagcaaaagaatctgtgctcattgttgagtaaaccggagtttcagatgctgaatgatcatttggatcgatgggaccaggtgactgatgatagcccacatcgtcgttttcttcgtgatttggcaaattctccatcttctcaatgttctgtttttgaaaattcctctgcttttgttgatctcttgttttaataaaagaaataaagcttagaactttcgttgtgatgtatcaggaaaactttagaatatgaatctaaatccgacaattagaatcgggaattatttttgattcttggatagtgaaattttgaggaccagatagcagtaaagtagaagaattgttttgtttttttttggccaaaagcagagaccgttaggcgtgccaaaatcaaaaagcaaaacaaaacataaagaaacgaaaagaaagaaatgaagtaatcacaacattatttatcgaaactttcacgaagatttattttattactataacaaacatttcgcttatgtcgatcaagatacatgaaagtctgaaacttgaaattttgaaaaacgatattaaggaagaagaaaaaagcaacggtctttattttatttacctttaaggctttaaagcttctgcaaatttgtctttgaatttgaaacgcttgaatcttttataacgtttataaaacactctcttttccgcattgagctttctacgcaatttatcggtgaacggaaaaaaggt

SEQ ID NO: 8812 - DNA, 733 bp, Arabidopsis thaliana landsberg
gtcatcaaggtactcaaactccccaatgtaacctgcagtttcaccaaaaatgttaaaacagttgatcaaacacagaaccagggttattacaaaatgtgaaaatgagctaatcaatgcaggatcaacataccgtgtttctgcatgacgataagaaacttaatgatcactttagaggaaggcctgatcatgacttgcctcttccctctcttctcagcattgtacatactcttaagagcatcgttaagcacactgattctcaccatttttcaaagctcaaaacctgataccaaattaacaacaaatctgagccgataccaaacgtactaatgctaacaccaataaacattgactaatcaaatttagtctcttttgtgttaaaaagaggattcatgcttcaaatgcacaactatagtggcagctaaatcgacaatcaacgaacttgattctaatattgaaatgaatacaacaataaccaaatggcaatcaacgaaacatagaactataagcaaactttcgatagatctaattgtattctggtccaagaaactaatgttaaccgatagcatcgagctcaaactatgaaactacgagaattttcagagaattttaaaagcagatttcacgtcatgattgagcagaaatgaaagcagatcctagaaaggaaacaggaataaagctcgtagctgtggagatctctctaacctttggaaatcgaaaatggcagccgcgcaaa

SEQ ID NO: 8813 - DNA, 1506 bp, Arabidopsis thaliana landsberg
gtaatatatgcaattaacaacacctcgatcaagatctacagggttattgtcgagctggcatgtgcctgagctattcctccctcgatctcattcgactggacattcattggttcaaccatgtcagaatatagaccgattcacactgcaattaccggaggaggtgcaaagacaattggtaagcctgaacctgataaagagaagccatatagccttacctcgagccaggagttctagacagggctacaggagcggaagcgttgggaacgagagaaccggtttctctcaaggacggcaaacactcaggcgagccatatctacgtcgctatctttctcttttcaacctgctcctgttcggtccacacttgacagggacaatctaatgcgagagacttcccaagctaatgacaaagattttggtgaacggtcattccaacgcctcatgccagagaaaaactaatctaattaacgaggataagtcacaggaaaaggttgagtttgatttttatggttttggtcagtcgtgtgtgccacagtttggtttaaccgtaaactggttccactttcattcaaagtctagaaacatagttagagcaaatggaagctactcatatcaaaagttcttctacaatcagcggtttcagttagcatcgttcgaatatcttgtacagcttttcaagggatgctacctgcaaaagagtaaaaagaatgtaattaatgtctttgtgaaatttgattctccagaaaaaagtttgtttacttaatgtagcatgtgaagctccttatggtaattaaagaaatggtaacctttacaaaagtcccatttgaagccatggaagctggtggcttcaagaacaatctcattgacggaaacaacacgtgttggattgaccattcacgttgtgcccatgcgttttcagcatctgacagaagatcttggtcaagattgtcctccatatcgacgttaccctctgcaacagttgaatgtaaaattaaatgctctcatccatttcaaatgcagagaaccaaaagcgaaaacattgtccactagaggaggttacatacctaaatctgacttttcctgagagctctcacctctcttactatagaactgaataccgtcacccgatgggtttggcaaaagaggaggatgcatggcgtaaaagttcccaatagctgcagaaactccttgaaagcaactcttctcatcttcccactcaacctaaacagtacgttagggtgacattagaacccactattactatgattagtagcacttcagtaggcacgaatagtggatataattgtacaaatagtaatcgcgtaactcacatcatttcccaagcatagtaaaaattcaggaacacgatccatgtcaggtgtatactggtcgagtatcacaggaagccttgacaaatttgcactggagtcaatgtgcacgctgaaatactcctctaacatttctgctttttccttgaggagttctgtattcatctacgggatcctcta

SEQ ID NO: 8814 - DNA, 1663 bp, Arabidopsis thaliana landsberg
ctttctcaaaaatttccaaaacttgaaaaaataaataaactaaaaattacttactacccaagtttagaataaccatatgaaatttgaatatacgaaaatcttggtgggttagtaaatgcagaattagccccctacgcagtaggcatcaagttttaatgtctatgttttatacaccttataaaaaaatcatttcaaattttctttctttatgattagtttaaaaaaacattggttggcagaaatataaaaatagttagacgttttcccaaattattctaaaattgtgacggttagtaattaccatatatgatattttgcaggaacttcaccaattctgttacttgcgatccaagcaaaaggcacagctggaatatgatcgccggcaagcagaggccgcaaattatgccgacggccattggaaaataagagtaaaggacccgagattcaaaatttgcatcgacaaattatgtaattggaaaagtatgctgcggcattggggagaatcaaattggactgactacgagtcttttgttccgaccccaccagccattaccgtcgcccggagatcatcacttcccggccataacttgtgacgcaataattatacatacttattaatggatttcatgagtttttttgtttgaattgttgctgcgagattaggtgatcaatatcagttgtgtaactatatctttttcctatagtttgttcaaattgaataaaacatttttttgcagtttaaccacaaaataaaacatatgtcgtatttatatgccatttttgaatacaaacacaaactcaaaaatgttagtaacatactaacattcaaatagtttatacagaaacgatagattatagacttacatatagccacaaattaatcgatgtaactaaacatatgtagtataattaaactttcgaatactccaaatttttagtcgaatcgcagtgcagtatgtatacattacatatagtatataaatctatgtgtgtgtatcagtgtatgtatgtgtgtatacatgtatgtacatgtgaaaagaatctctactaaagatttccataatatttaaccaaaaaccaaagttttccttattagtaaaactacaccttcgtttaacatataaattgattctatgagaaaaaagtatattaaaaaaggcaatgaaatcttcaccgctttcattattgattcgtcattaattaccgagcgagaccaaaaatagaaattctcgaactaagggttttatatattcgcaaacaatgatcaccacctcttcattcaattcacagagaatatacacaaccatggcttcttcttcatcctcttctctttcgttttcaacatcgaagaagaacaaaacctttttcaagaaacctaattctgctttttcttcttcgagggccacaagtttgatcaaaagacaacagactgtctttaagaaagctaaagagctttcaattctctgtgacatcgatgtctgcgtcatctgttacggatcaaacggagagcttaagacatggcctgaagagagagagaaggtcaaagccatagctcgaaggtacggtgaattaagcgagacgaagcgtcgccaaggaagcggtgatcttcacgagtttctcgagaagatgaacaaggatgatcccgagaaggaggagaagaaga

SEQ ID NO: 8815 - DNA, 954 bp, Arabidopsis thaliana landsberg
catttaaataaaaccattaaatatttttatacaaactttcttatttgatatttgattttcgtaagtttagttaataagaataacttgtatatgaaattaacattgtttggcaagaataatagcagaaataaataaataaataaaaaatgagaagaattgtggacttcatacataagaattagtgtttcttttctaatatatagaggatgtaataaaggcatgagttgagctttaaaagaaaaaaaaacatttgctttgtgcgtagagaaagaacagaacacatttttttgcaaaagataaacaacggaagtttgagagaaagtagtatttttgtttgttaaaaactttgatatattaatcctcttgatacttagatatattaattttctcattaagaaactgatgaaagtattacgtctgttttgtgaggaagactgtatgcgtcgtccatctactcaataaaaaaatggtacaatcctttgcaaaagtaagagaagaagagataagtgtaatgatggagaaggtcgagaaagcaagttccgattcttcacaactaaatctaagcaagcttcttataacacttacaagcgatgtggcaagtagagtttcttttggtaaaaaacatagcaacgagggaagcatgagcgatttcaagaatcaagtgagaaaaatcactgagctggtaggcggatttccggttagcgaatatatcccgtgtttggcgtggatagatcaaattcgtggtctgtataatagagcggaggaagtgagtaaaaattttggagatcttatggataaagtggtgcaagagcatttagatgctacaaataaaccaacaaaggatttcgtcgaaatattgctgtcctttgaaagacagagtaaagatgaaaaagaagtaagacgaagcgacattaagttcataatcttggtaagatcagatataaaagcttacta

SEQ ID NO: 8816 - DNA, 482 bp, Arabidopsis thaliana landsberg
tgttcctgctaaaaacgtatcctggaggaatgaaaaattcattggttcattgttccaaatacattaagctattcctatccatggctaggcttatatatatatatatatatataatcttaccaagattatgaacttaatgtcgcttcgtcgaatttgtactccatttctctcgtgtctttcaagggatagcaatacatcgacgaaatccagtgttggtttatcggtggcatctaaatgctcttgcaacactttttccataagatctccaaatgctttactcacttcctcggctttttcatccacaccgcgaagtttatcgatccaggccatacacgggatatattcgccaacgggaaatccgcctacaagctccgtgattttcctcatttgaattttgaaatcactcatgctttcctccttgctatattttcttcccaaggaaactctacttgtgacatcgcttgtcagcgtaagaagaagtt

SEQ ID NO: 8817 - DNA, 2538 bp, Arabidopsis thaliana landsberg
ctcgcacttctcttcttcctcctctctggttttcactctccctctcgatatcactttttatcttccttatgctatcactctcgaaatcttcctttttatttccctctaaattaatgacactctttttcactatctccctcttgttcttaatctctgtttgatttctcatcgacattgttttgctcagctgggttcgtacatgttacattgatctcctaatcgacatcaaattctcagtcaaaagatttcgattgaaggttagttattggttctagctacaatttcaattggggttttcgattttagggtttgtcatatcaattgggggttttgatttgggttttcgactcagtttatgagttttattgtttcgattttagggtttctgatttgtttctttgtcggatttttgggttttcgttgcgttgcattgttgcgttgtgcgagttgtggtgttgtgcaagctgtaacatggaaaaagtttgggtttggctgttgaggtatgatttctttctgcatctagtttgtattttaattttatcaaaatcttaagcacaactttgaatctaactttgaatcttaagcacatctttgaatctaatttacttttaaaaatacagggcaagtgttgagtatgaggaaggtgcacggacttttgagtatgcatccgcaaagattttgggtaatcgagtgcagttgttgtgtccttgcattgactgccggaatgtgtgtcatcaagatttaaacacaaagatcatttgataattagagggatggataaaaagtacaagaggaatacttgttggagtattcatggagagataaagaatgagaagaccgtggatgttcaacaccctgaattagaagcttatgtgttaatgtagagaattcagagttcttgaacaagaatggatcagaacaacctgaagtgggtgaacgggaagaagaattccagtttaagaagagattagaggatgcagaaacgcctctgcactcaaactgcgcaaactacaccaaagttgcaacaattatgggtctatatcacattaaagttaagagtgggatataagagaattactatgatcagttgttgaatatggttcatgagatgcttcctgatggtaatgtgcttccaatatccacaactgaggtaaagaaattcttgaaggtctttggttttggttatgatgttattcatgcgtgtaagaatgattgtattctttaccgcaagcagtatgaggatatgactagctgtccatgatgtgatgcttcacgatgggaaattgataagcattctggtgagacaaagaatggaattccatcaaaggtacttaggtatttccccattaaagaaagatttaagaggatatttagatcgaagagaatggctgagaatttacaatggcatttaagcaatgcttctaaagatggaacaatgagacatccggtggactgaaggacgtgggcgcatgtcaatgccaaatggccacaatttgctgctgacccgagaaaccttcggcttggtatatgtacagatgggatgaatctgtttgctatccagaacaccaagtatagcacatggccagtgttcttggtaaactacaatatgcctccaacactgtgtatgaagtcagagaacataatggtaacacttcttattcctggtccaacagcaccgagtaacaatattgatgtttaccttgcttatttgattgatgatctgaatgatttgtggaatgaaggtatccaggtatatgattcattttctcagaagaatttctcacttagagcaatattgttgtggagtatcagtgattatccaggattaggaaccttggcgggttgtaaagtaaaaggaaagcaggcatgtaatgtatgtggaaaggatacaccttctagatggttaaagttcagtcgaaagcacgtctatttgggtaatagaaaacaacttaggctagggcatccttatcggcgacgaagaaattggtttgataacactatggaagaagggactagtagtagaatttaaacaggagctgaaatattagacatgctaagtgatttcaagaacgattttggaaaacctttggttaagaaaaagaaaaaaaactcaggtttctgtgaagatgaggtgcttatccatgatgaatatacagaagattcagaccaattgaggtgaaagaaacagtctattctatttcagctagcttattggaaggtaagtattgtgtcaacatacatttatttaaagtacatagctgtcaaagttgtgttctaactagtttattttctgttttactatataggatatgcatgtgcgtcataacattgatgttatgcatatagaaaataatgtgtgtgacgccatgatttccattttgatgcacaatgctaaatccaaagatggtttgaaagcacgtcaatatttgaaagacatagggattagaagaaacttacagagtaggaaaggcgggaagaaagcatatttacctccagctgcttattggttaacaaaggaagagaagaagattttttgta

SEQ ID NO: 8818 - DNA, 480 bp, Arabidopsis thaliana landsberg
gtctaacgatccttaacttaaacggttcgtcgatttgagcttgttgcttatataactttgattcaggaagatgttgtgtttttagttttgcttttagcagataaacaagaggaagggcttcaaggacttgggaatctaagaagcttcacattcagagaactccatgtttatacagatggtttcagttccaagaacattctcggcgctggtggattcggtcatgtgtacagaggcaagcttggagatgggacaatggtggcagtgaaacggttgaaggatattaatggaacctcaggggattcacagcttcgtatggagctagagatgattagcttagctgttcataataatctgcttcggttaattggttattgcgcaacttctggtgaaaggcttcttgtttacccttacatgcctaatggaagcgtcgcctctaagcttaaatgttagtataatgtcttgaaccatcagtccaaatct

SEQ ID NO: 8819 - DNA, 1405 bp, Arabidopsis thaliana landsberg
gatatgtaaacatattacaacttggatactgaatctacagcttaatttatgcccttcaattcaatgatcatcatgttctatttttgctttgtggttacctcttttatttttcttgtggatccgatgatccgatccctcactcttctctttgctttttctgatttttttattggtgcataatatttttttaaaaatctttatatacttcaaataggcacaataataattccaattaatctgtcgatcaagagactataacgtaaatgaaattacgtttgtatgcatgaaattaagacaaaccaaaccattagactcaacgaactcaagtaaaagattttcaataaaattgataaaagcaaacgagacatagaataactatagctcgtgtcttatgtagttatgttgcgccatacaaaaaaaaaaaaaaaaaaactgagaagagttgtcacgaagtgaaactacattcatcagtcaaaactcaaaatcaacgtcaccgcaaatgtccacaattgcacaaaaccaacgtcacatccttttcacttatctaaacgaggatgaaaatataaaaaattacgaagaaatgggcaacaacttcgagccctagccattgtttggagaagctttgagcgtggttcgtgcctggcacagaggtcgtccgaccactgttgttaccagcactggatcctggggtcgaagacatactagtgggctcagaggccgagccagtgggagcagaggctgggcctgtttcgttcagacctttagctagctgatagaatacttgggcatccggagaatttgggtccaagtgaagcaaagctgaaaccgaacacccatcccaaaaatattactagtctgctaatattagtctataataaattttcacttgtttgtttaaaatgtctatacatactctgttttaaccagaccgcacgtaacgaagaatatatcgtaaaatgctagagagaggtaaagctacgaaccagggcacttagtgatgtcagcagtggcgtggcaaacagaaggaagagcgagagcgagagagacgttgacctggagacccaaatcaggatcattcctctcttggatgatcacacaaagacacttcatgtcggaattaataacttgtttgaggccggagcaacagtctggcgtcggagattttgcctgtccttgcacgtaaggaagacatgtggccatacccaccagctgcgccgtacactcttccttgtctttccctttatcagctccggcggcatccaccaccatagccaccattattaaagctattgctgtcgccattactttaatcttccgtgactccattttgattgttctgatttaagttttcactaccatttggttcctaactcatctagcattatttatctttttctaaaatatt

SEQ ID NO: 8820 - DNA, 1274 bp, Arabidopsis thaliana landsberg
gaactgctagcctgcgccaactgtcacaatgcacacaaatctatagtcattcattttgtcgacactttctctcggtgggtgggtggagagtggtaagacactcccttttctcttttccactcccacaaatttttttttagcttcgcacatattttaatactttttgggaataatattgagaaatagctttgaagtatcaccaaccacggcttgtaggatggatggtaattagtacgtcgccgtattacaatctaataacttacatgtatgaattgtatatgccaaaagtgatagtatattttaaacctcattaacgatggcagtgaataaattaacgaatgtgacattcggactatatatcaatcttatttattaatttttcattcataaaaacaaaattcagaacaaaatacaattgattcagtagtatccatgaacttctggacaccacaacgcatgcaatcatcacataaacttacataaacaataaaccatttttcatatacttttgaaagatactaaaaattgctatataaatggtaagagcgttaggaagcaagtggtagtggaaatcacaacaacaaacaacagtgaaagataaattcagcataacaaaacaaaatggagtcacggaaaaattaacctaatggcgacagaatagctttaatagtggtggctatggtggtggcagctgctgatgataagacgaaagacaaggaggagtgtacggagcagctggtcggtatggccacgtgtcttccttacgtgcaaggacaagcaaaatctccgacgccagactgttgctccggtctcaaacaagttcttaattcaaacaagaagtgtctttgtgtgatcattcaagacaggaatgatcctgatttgggtctccagatcaacgtctctctagctctcgcacttccttctgtttgtcacgccgctgctgacgtcactaaatgccctggttcgtagctttttcactgttaaaaatctacctatacaatgttctgtgaagtaattattttttgtagttatgaatatagcacattaattaagaatgaaaacagagtgtagcaaaatcataattgttttggaatgggtgtttttcagctttgcttcacttggacccgaattctccagatgcccaagtcttctaccagctagctaaaggtttaaacaaaaccggcccagcctctgctcccactggctcgtcccctgggcctaccagcatgtctccgaccgctggatccgatgctagtaacaacagtggtcgaaca

SEQ ID NO: 8821 - DNA, 1411 bp, Arabidopsis thaliana landsberg
  unsure (1)..(1411): unsure at all n locations
ttgtccatcacacactagttaaatagcatgcacaaacatcaagacacaaatactttgagatttatggatattccaagacggttttgtatatgcgtcctaacgttctttgtgttcgttcttctgtcgccgaccaccgttcactccataatccgacattacaaattcaatgtaagtctaattcctatatatacatatgtttatatatgtaaggtgtgtattcgcacacaattgtattttgcgaagttcgattaccaacaatggaaaaaaagacaaatcatattatatttgtctccggtatatgagcagattttgcgcttaaaacgtatagtacttttttataacctatagttctgcatgcaaaaaaaaatgtctctacgtacgcttagatgatcttatctaatagttgtcatcgcataatattgatacatgcatgaataagtaagatcatgcagtatgtattgagcgcatgattgaaatgtgtgcactaggtggtgatgacgaacaccacgaagctgtgctcgtcgaagcctatagtcaccgtcaatggacaatttccgggacccaccattgttgcaagagaaggcgacactattttgatcaaagttgtgaatcacgtgaagtacaacgtctccatccactggtgagcaacttcaaacaaacccattttaagatattagtgaaatcagtctctttctttgattaactttaacaatgttagacccaacaactaaaactaacaataacggtataggcacgggattagacaattgaggacaggttgggcagatggaccggcttacataacacaatgtcctatccaaccgggacagaattatctccacaattttacattgacgggtcaacgaggaaccctatggtggcatgctcacatcttgtggcttcgtgctacggtgcacggcgccattgtcatcttgcctaagctcggtgtcccataccctttccctaagccctacaaagagaaaaccattgtccttagtgagctactacccaaaatccaaacatacctttctttaaaggattatctcagcaattacaattattcttgataatatataggtgaatggtggaaatcggacgtggaagaactcataaacgaggcttcaagaataggaacagctcctagtgcttcggatgcacataccatcaatggtcattcaggctccatctctaattgtccttcccaaagtaatcatttaccaataatcctaaattcataaccacttttaattaagtaattatttcttctatattatacttttataccatcaaaattatgacaccaggatgatcatatactaatacaaaatgntccgtttctcttttgataatattggncttttcacttgtaggtaagtaccgtttaccagtgagagcaggaaagacatacatg

SEQ ID NO: 8822 - DNA, 451 bp, Arabidopsis thaliana landsberg
ggaggaggagaccgttgaagaaggtattggaacaattggagcttttccatctcagtttgtagattaagtagcgcttgggggtccattggaaagggttgctgcagatcaacaagtcctctcaggttagacagagacatgagctgagataagctagagaagatatcatcggttcttggctgatgagtcatggggtcaaaacccatctggatcagctttttcttcaaatgagtgttccagaaattcttgatctcattgtcagttcttccaggtgagtggcttgcaatcattgaccaccttgtacaaatcatcaccaggaacattgtggataagttacaaagcaaaaaagatctcagataatatcaagaatcagaagggctcttacttgttgccaagaaccgcatgaaggttcaggatggtctctttttcctctgcagagaattgtcctcgctta

SEQ ID NO: 8823 - DNA, 1870 bp, Arabidopsis thaliana landsberg
ttaggattttgccaatagtgcaaaaactatgtgatcaagtggaaactgaaagaagaattggttctatacttatatccgatattcccctaacattgagttgagatagtgctcaacttttctcttgtttcaaaacaaaaacctgctacccgtaatcatgcttaattacttgatacaggcttgagatcgttatatttaaactagaggtcttggatcataaggcgcgggaaagagctggagttattactcctacccttggtttgccagttccagtgcttttgcagcctgatgctgctggtgaggtatacacttattttcttttgtttatctaattttgatttatatttggttatggaactcaaaaggaggaataaaatgatgatggttgattggctagttctcatcatagtgaaccatcttttaacggggacagttttccaaaggatgtgattatacttttcctcactgcctaaaactgtagcaggagccaggagcatagatctagtaatagtgattatattgcctcctctagaggaatgtgttctcctggggttattactcagaggcagagcaggacatttacattgttcttattgtgctgtttccattttttttacaggcgctgaaatatttgtccatcaaatatggagttttccacgctatatacagttattggaaaaataaggtttgatatagttgtcgtatagtttgatgataattgatttttttttttttaatgaaaagttgttaatggttctttgggcataggcttaaaacattaagtaacttcgacttttgtattcttttagcgtgaaatatggcagaagcctatcttgcggcgtttacaggtatatcatttggactggtctcaatcttacatgtggaagaaatgaatttattctgaaatgtactgaaaattagctactcttgtgttttttgtttggaacagcctccaccaccggtcaatgataccaatccgtacaatgtgtttaggccacgggagaaagctcatagactacacgcaagaagagtaggctgtcttgttgtctgtggtttatcaatttccttatcttacatgtgtgagtatggaaaatgcaccataacttactaacaatagttgacctcacttcagatgcagcagagagaaaacaatgcgcagtcatttgagaagctgcgacaggtaagggaagacctgaatctgtgtttaacttcttaaaataattcctggattctcaaacgttcttctcttctgttctgggatatgttattattaggtcaggcgcaatcttgaccaagcaaagaccattctagaagctcttattaaggtaatctaaatgacatctatattttgtgacttgaatgtaattttattgatatcttaagagatacctgcagactccataggtattaacttgattaaaaacatgttatctttatagagagaagagaaaaagagggatttcatggcgagtgaggttagccttcagagaatccaactgaaatataaggtagtcctctacaacctgcatcgagtgttcttttgttaccagaaagagttgtgcatttcgatctcctctgattttttttgtggggttttgatatgtttgcagaatgaaaccgaacttttggaagatagtttggctctggctgggtttccactctctacagcttacagatttggctcaagcgaagatgaattcatggactccgatgacccgaccaccacccaaacatgtacaaggccttcctttacccctcatcgtcgtttcaccgactcaaacctcgctcgagctcaagccgggagcataaagcaagaggcgagaagacttggatggctccacaaactggtaattcttcagaacctctgtatttg

SEQ ID NO: 8824 - DNA, 1300 bp, Arabidopsis thaliana landsberg
agtttcccttgaaccatcctcgggaaaatagatctgccttcttgcctgggacatatgaacattcccccagttaaacattgcaagtgcagccatttcttgaaacttatcagcagcaatatcaaagagttcttgcgcatcttcgccagtgacaatatcttccattgcttctgtatacagtttcatcccaaggttatgaagttccaagtaagaatcagaatcaaacccaacatggttcttaaacagttgcgcaaactggaaaatccagtgctcaaggctggtagatgctttctcagattccacaaagtctccgacgcttccattatcagcaacactactcgatcccttggcaaacttatcagttgattcatcattatcaatgacatcataagttggttcttgattgggactaacttcagctatatacaatctaaaagagccaagtttctccctcgtagacgcagccagcctcagctcatccgtcgtagtaatggtaaccaaatcaccctctgagtctctatatttgatcagaaaacccttcagagcaggaaaccgatccttaatcacatctctaacaagtacaacactagaatccaacggcaattgtgcccaccgtatatcatctccatgaaccaacttcactgtcctagtcactgttgcgtcttccttaatctctgaagcaatgacctctttgtccataacagcaaccttatcctctagcttcttctcttcaattgccttacctttcctcccgctatcaacttcctctccattatcaaccttggcatcctcaacaaccgcttcaacactcttcctctcaccatcatttccaccattcgtcatcgtcatcgacttcttcttcttcttccttaacctctccttaacaatcttcctcaacctcgcagcaccaacaggctgaacattaaccagattcttctccatctcatcaacatcaatccctttaccaaccaaaaccttcttcaccctctcaaaaatctcattagcagaaacattctcaggctccatattcaaaacaacgcgagaatcacgaaacgcgaaatccagtttattcaaagcctcgtaacaacgagctcgtttcaacaaagctttactaaacctaggagaagcttctaaagccaaattacattcgttaatcgcattaggatattctcctaatcccatttgcatgtaacaagaagccatacttgttctcaaataagctacatctccatgatctctaggtaatagcttaacggctttatcatacctaaacattgctccttcgtaatcgcgtttctggaat

SEQ ID NO: 8825 - DNA, 607 bp, Arabidopsis thaliana landsberg
ccatagtcggtaccgatgagtcttatcacaagtaagatagtcacattatcttctgattttctagaaaatggatggattgcacaatttgaatgatctcatggtgagttattcgactgatataaggttttatgaaaatgaactcttgtttgtttctcacagacaaaatcaatatacaaaaaacattacaagccattgaagagaagagagaaatttacagttaaaaaatcctgaaaaaatgatttgtaaactcaagattggaaacatccacaagttgcctttggaacaattctaatggcccagtattttagcagccgtttcttcttgcttctccacgcttaccttcaatcattgcacttctttcttctgcttccttgtgagtcactgaaacctaattcatcctctctgcatactcctgctttcttcttctctagttcctcctgcagtgaaacaaattcacaaacacttcacttctcattgttctcaatcacattgaaacagtatcagctctctattgctaagtttattttacctccattatcttgagttgcacttcgacagctgctttcttcacttctcaacggaaaactagtcacatagtttagtttaa

SEQ ID NO: 8826 - DNA, 2416 bp, Arabidopsis thaliana landsberg
aattactcgagctagacgtatgatgaaattcagcaaactagtagatttgctattatatcttcccttgtgatgattgtagttttgtctcttaataaaactagtaattaacgtttcagaaaacaatgcccattttggtaatttcacagagatttatccaaagtttttaaagagataagacgatagagttggacgaccgtcttccaccgttgaattcttctggaactggagtccactgtttaagcttcactgtctctgaatcggcaaaggtaaacgtatcaattattctacaaacccttttatttttcttttgaattaccgtcttcattggttatatgataacttgataagtaaagcttcaataattgaatttgatctgtgtttttttggccttaatactaaatccttacataagctttgttgcttctcctcttgtgagttgagtgttaagttgtaataatggttcactttcagctttagaagaaaatggcatcaggaggtaaagccaagtacataatcggtgctctcatcggttctttcggaatctcatacatcttcgacaaagttatctctgataataagatctttggaggcaagttctgctcaagatttatctagttttgtgtgtgttttcaagttagggacgatcttaatggttatcttcttgtgaaaatttcagggactactccaggaactgtctctaacaaagaatggtgggcagcaacggatgagaaattccaagcatggccaagaaccgctggtcctcccgttgttatgaatcccattagccgtcagaatttcatcgtcaagactcgtccggaatgagaaaataataagttcaatgctttgattttcagaataagatgaacgatgacgatgttttctaaatccgagcttgtactaaataacaatacattacaacacggtttgcggaactactccacagtctatcttctgttaaagaactcaaacaagctattgcaaaaagcccttacgagactcacaagtcctaaatatcaacaaaacaaagcttctttggatccttttcacttgccatcatcttttccttgtccatctgctccatcttgctttcctcctctaagccccactgttagcaaagaaagaagtaatggatacaagttacaatttatgagattgagtattgtcttaataatgtaaagagagttaccgtttcctccaagaccggtttctggttgttgcatcgcatgctgcatcccgttgttggtcatacccattggtctaatccccatgtgtccttgcatagcttgctgatgtatctgctgctgctgttgcggatcctgaaactggagtgggctaccaaactgtaaaggaccccttggagcgaaaatccctgcaggggatgcttgtgggtgttgcatgaagtagctaggtggttgcatcccagaatgcggtgttgccatctaacagaaatcatacccaacagtaagcaaacccccaaacaacattaaatttctgtgatagatcgcaattgagttttatcatcacaaacaacctgggcagcgacagctgtagatggtgaaggtcctggcgtaggtggtgggggttgagcatcagcaattgcagcaagatacatcaagttcttctggagaagagcttggtacctgaaaatataacagagcaaaagatagaataactatataaacctcaccattaataatagtaattctaagcttccattactatctaagagacataagaagatggatagaaaaggtgagacttactgggcgcactcagcaagtttaccgagattctggttttccatgatggccataatcagcttcttgttctcatcaaggtactgcgtttaagcaaaggaaagagaatgacaaggaaatgacgatgcagcctatcatcttaccatggaagacatcaagccaagagaaagtacaaaacaacaacatcaagcaagcatctaacttcaatgtccattcttgaaaaccggattcaaagtttcctgacccaccaagcatctactaatttcctagtcctagaaactgtctcttctcatcatcaccaacaacagactctcaagtgttgtggaattaacgagaaagattcaaatgaaaaccctaattgccaccaattacagtcaaaagagtattacttgcactcagaagccaatgattttgtcagtacaaaaaagctctaagagcctcctaagtagtgttgaacaaattaagagagagggagagatatagggtgagaaagaaggaaccttttggatctgttcggtagtgatgttgttagcagggggaatcgacggaaccatcggaaacatttgcggagactgctgctgctgcatcttcttcttctttactacttactttgccccaactaaaccggggatcctctagagtcgacctgcaggcatgca

SEQ ID NO: 8827 - DNA, 1383 bp, Arabidopsis thaliana landsberg
aacttttttgcaagctaggcctttgtccaaatcgaaacgtttactttaagcttctgactaaataactctcttgtctcctggaaaatctaagtgattgcttcatcgatgttgcagttttggatcctcttccatgtccgacaattgtgtgagattttaaagaaaaacaaaacattatgcatatttggtgattcagattcatcaagcactagaagagttgtacttgtaacaacatcaaaccgtgttttgcttcatgcgtgaatatttgcttacctagcgatcatgctaattttctttgtatcgttttaattatatcggatatcttcgaagagactatattgtctagtggatgaaagattcatcatgcgattggagaatagatcgtttcgaatctttctattatgacttcaatcattgtaggcatctggacgtttttaatgacaagagtacccgtcttataacaagtctcaataagtctgaatttatgagattccccgattctacaacagaaaaacatcaaaacaaatattatggtatattacttgtaaactaaggaaatacataatggctacgattccacctcaacatgctttcaaaagatctttaaacctcaagaggtttaggagtactctcgttaaacctcaagacgtttaggagtattctcgttgacaaacagatgcaaacataaatgacaataggtgtaggtttaaaatggaacaactatagctccagatcagtttatttaaggttttaagtttgagattgacaataggtggtgcagaattgtatgtctgcccagcaaagagctggcgttttgggacagcaataacagcctccgtcgaaaacaccaccgcaaatttcatggacgcatacagacatatcgattttgttcgatctttctaacctcacacctacacattaatttgaaacacacatcaacccaactcaactttgatgactctaaaacaaagagatatttggtaaatattatatataagagaacttgtacatacattgatgtagagaaaatagagagagcaacagtatgcagacgagatatgcatgggatgatttcatggtttgaatgtcttgtaggatatgaatatgtgctatttagttatctttgtgagttgttgtaacatccaaagcgtagtctacatatatatatataggaaatagagaagcttaagttaggtgatacagtttttaagataatatatttacacatctttttttccgatcacactctctgagatttccagatattctcgttaatatcttgaacttctttagagtagtttgaacatcttggcattttgcaagctagatattatagttgggtcaacatagctctttttactttaagcttctatttaaacaactttt

SEQ ID NO: 8828 - DNA, 913 bp, Arabidopsis thaliana landsberg
tcagtgattacaattcgaacgggagactaaccagagtagcacacatattatgaggggtgaaattgatagatctgtaggggtactacccggactctataacttcaaggacgctatacctattcttcccagatccattactaaaaaactcatcactgaaagacaaagtctaaatccaaagttattttaaaaaacagatctgagactagagatctaaccaaagaaaataaaatcaagactctccttaccacaaacggcggtgagacatcaaacaacaccccgaaacccaaaggacaaggtctcaagaagaaaggaaggagaactagatcttcaatggagagagatctgcatctgaggcgatgaaagatcgaaatgaacctgcctctgccatggttggaacggccagaactgaagctgcagacgaaggagacaaacaagcagcaaaactggaagagcaaaggatttagacttcacagatctagatctgtgaatttagaacagagaccgttggaagaaaataggattcagatcacattaaacccacaagaaaacgaaactagagagattacaacaaagaaattccggttttggtgctgaaaaagccaccggaactggaaaccctaggcggagcggcgaagcttctcgtaatatgttttttttttcttctagaaggaaaactataaaattaaatggaagacattttgattattataatgaaatgtaatgctctccccaacaataacgaaatatctcctttttgagatctttattctcctcttttaaattcttatattaatctattttacaatatttcacataaccactgtaattatcacaaatctgactttcttttatatgtttcaacaactatatggtatgattatatctttttacacaaatgtgaaatgtcttatgt

SEQ ID NO: 8829 - DNA, 754 bp, Arabidopsis thaliana landsberg
tgatcgatgtacttgctttcttaaataaaagatattgattagaatcacattctactcttaaaattaagtatatgtaacgctaattaaggttttgagttttgtagcatatctattgttttttataccactttagatcagaaccttacaagagttgaaatacaaagggtaaatacatatgttggcaaggaaaacaatccttccaagaactaagccggcgagcacaagacatctcccggggactaagacagatctaatggggaaaaaacccaaattaaagaacaacaatgatactaaacctaaactttcaagattcattactaaaaaaactcaaaactgaaaagcaaagtctaaatccaaattttttaaattaaaacagatctgaaactatagatctatccaaaggaaataaaaccaagactctccttaccataaacggcgctgagacatcaatcaacatcccgggacccaaaagacaaagtctcaagaagaaaggaaggagatctagatcttcaatggagagagatctgcatctgaggcgttgaaggatagaaaagaacctgcctctgccatagttggaacggccagaattgaaactgcagacgaaggagacaaacaagcaacaaaaccggaagaggaaaagatttagactttacagatttagatctgagaatttagaaaagaaaccgttagaagaaaataggattcagatcacattaaacccacaagaaatcgaaactagagacactaaaacaaa

SEQ ID NO: 8830 - DNA, 704 bp, Arabidopsis thaliana landsberg
gcaatttatttaagtggcagttctatattttagagttctagctttaaaaagcaaacatttttcactatattcaacttcttttttttttttcacaaaaaaaagaaaatttcattgatggattagaaccttacaagagttgaattacataagttggcaaggaaaacaatccttccaaggactaagccggcgagcacaagacatctcccggggactaagatagatctaaagggaaaaaacccaaattaaataacaacaatgatactaaacctaaacttcccagattcattactaaagaactcaaaactgaaaaacaaagtctaaatccaaaattattaaaacaacagatatgagactagagatctaaccaaaggaaataaaatcaagactctccttaccacaaacggcggtgagacatcaatcaacaccccgagacccaaaggacaaagtctccagaaaaaaggaaggagatctagatcttcaatggagagagatctgcatctgaggcgatgaaggatcgaaatgaacctgcctctaccatagttggaacggccagaactgaagctgcagacgaaggagacaaacaggcagcaaaactgggagagcaaaggatttagacttcacaaatctagatctgagaatttagaacagagaccgttggaagaaaataggattcagatcacattaaacccacaagaaaacgaaac

SEQ ID NO: 8831 - DNA, 1655 bp, Arabidopsis thaliana landsberg
acattttagcatactgaaaaatttaataaggaggctcacaatttgttcccatcacaagaaactcaaaacttaagcaaaccattatgagattctcatgtattagttttgatttcaatagaaacacgatcttacactatgctaagacatgaaagttttcaaattttgcaactttaagacaactagatcctaaacaaactcaaaagtgagatttttaacgaaacccagataggaatggaatgattgatcagattcaactaaagttcggagtctgaaacaagagatatcagagagaagaagcttacaccggtgccgttgtcgcaaacgacgacgtttttgttgtccatcttctccgatttctatagagactacagatttttatcgaagtacaaaaatttcgatttcttcgattcgatctctcagggaacaaaagaaaaaacctgtctttgaatcgaagcgaagaatcactcttctctacttgtttggtcgcgatcgagaaaacatatttgctcttcgacaaacaaaaagcagctgtttcctcgtttctttataagaatgcgcgtcgtttactctacgtgaaaacgtcacgtagtgcaaacggtcaatacatagaaaaaattattaaatacgttaccccttttctcgaattattgagatggagttaacttggttgtgggtattgatgggctatctcaggcccatattaggtcaaacagataattctgtttacttgtataacaatcttctagatgatctaaactaagaattagtaaatgatcatcatgcaatcccttgatcagagatttcaatcactattagggttatgttacgagaaagatgttactagggttttggtacgaagttgggatatcaatcttcttctaggtttttttgttgtctctatgttgtctctaagttcctgtcacaacatgttatgtatcagtcaccaatatagtaaaaataagataagacttttacagtttcacacacacaagtccaatgacttgttcgatgtaaaatcagctttcatgttttcacttttatataggttaattaggacacacactgtctctcatgcttactggaacattgctaagctgctttatttagttctggtaagaacaaaactgcatgtcttagacctcaaagtaaccacgcgtttcatcttcacttctgtatattgaaatggaagaattcgtagacaagtcaagctccttgcccaatgtgtcgaagagaatggaaattaaaagagtaagcaacttaagtcacgctctcatcatgagggaggctttggaatggatctattggagttgtatttggaccatagtgttgagttagatcattgctcaaaagggaaagagagagctttgtgaatgtttttgaattttcttcacttgttttgattggttggacaaatcatagagatcaagcaactttttgactcgttaacctctctctctctctctcttagtctctttccttagttccgtcaaattcaagtcagaatgagtaaaatgatataaactttttgactcgttgaacaatttatacttatctttgaaaaagcttgcaaggcaaagagtaaatgcaataccagcttatttggttcccaactgcgaagggaaagaacctagttcaaaaccttcccacagttagcg

SEQ ID NO: 8832 - DNA, 584 bp, Arabidopsis thaliana landsberg
  unsure (1)..(584): unsure at all n locations
aggtctaaaatcatatttttgaaagaaaatgggcaataataatgttgggctttaagttcccaaatacgcaatggtggtaaaattgcattgtttttattattataattgtcaccaagaagcaaaatggggatttgaacatccaacaaaaagcnnnnnnnnnnnnnnnnnnnnnnnnnnnngaaaagtcaacaaaagattatgctgaatgaaagacgtacaaaacaagatattatagaaggacctttgctactgtatgtgagttacctatttgctctgaacccttgatacaaatgtatcaatgttagtatccgtagaacctccttcattgagtgacttgacagccaagtctctccatttcttcacgttcttcttcatctctttgctcctctctccttccatcacttccttaatgctaaactcaatctcctctctcttggcaatcccactctccttctctgtcttcacacgaactccagccttccacacatcttgtatgtactttgcgttcatcggttgatcagtccattggggcattgccaccatgggaaccccgaaggtcaaagcctccatggttgagttccagc

SEQ ID NO: 8833 - DNA, 1430 bp, Arabidopsis thaliana landsberg
acaccattgatgagtttgaccacaaaataagtaaatcattaacgtgttatacataaacaaggaaaaatatccaaggaatagtcaattaaaaaaaacttaaagaccaacaaagattaccaaactacccttatcctgaaattgactaaaatacccctccgtcttcaacctctctgaccctatttaaatcagctaaaactctaacagcccaattcaacacggattttcaacacagagctgacgttagcatttgtctctgaaatcccagatccgaaaacccaacaatggcgtcagagaacaacggatccagatccgattccgaatccatcaccgctcccaaagctgattccaccgtcgttgaaccgaggaagatagctctgatcaccggaatcaccggccaagacggatcatacctgacggagttccttctcggaaaaggctacgaagttcatggtctgatccgtcgatcatcgaatttcaacacccagcgaatcaaccatatctacatcgatccacacaatgtcaacaaagctctgatgaaactccactacgccgatctcaccgacgcttcctctctccgtcgttggatcgatgtgatcaagcctgacgaagtttataacctagctgctcaatctcacgtcgctgtctccttcgagatccctgattacacagccgatgtagtcgcaaccggtgctctccgtctccttgaagccgtcagatctcacaccatcgacagtggccgtaccgtcaagtattaccaagccggatcttcggagatgtttggatcaactcctcctccacaatcggagacgacgccgtttcaccccagatctccttacgcagcttccaaatgcgctgctcattggtacacagtgaattaccgagaagcgtacggtctcttcgcttgtaacggaatcttgttcaatcacgagtcacctcgccgtggtgagaatttcgtgacgaggaagatcacaagagcattgggaaggatcaaggttggtttgcagacgaagctattccttgggaatttgcaagcgtcaagagattggggatttgcaggagactatgtggaagcaatgtggttgatgttgcagcaagagaagccagatgattacgttgtggcaacagaggaaggacacacagtggaagagtttcttgatgtgtcatttgggtatttgggactcaattggaaagattatgttgagattgaccagaggtactttaggcctgctgaagtagataaccttcaaggagatgcaagcaaggcaaaggaagtgttggggtggaaaccacaagtagggtttgagaagcttgtgaagatgatggttgatgaagatcttgagcttgctaagagggagaaagtgcttgttgatgctggatacatggatgctaagcagcaaccttgatttgatcaattatacaaatatggagtc

SEQ ID NO: 8834 - DNA, 778 bp, Arabidopsis thaliana landsberg
acaatacagaaaaagtttgaaaaattattattagttatttcgcctaagttttgaaatattttactataactttggcaatcacccttgacataatctagtaaccaaagaggaatgaatgtatgaataatttgaatagctcaggtcacaaaaattcaagagcttgtcagtgacaacatatgaactaatatggctaatcaaaatttcgcatgaaatgcatgttcctttagtaaaacctacgcttatgttttgtgacaactctattcacattgctaacaaagaagcttgtcatactgttcggttcgtgaaaggttgcttccagatttgttcaaattactctacatgaggtagaatcttcaacttgttaattcaccaagcaattctaccccactccatttcagcatttgttatgcaagatgggttatttgcctcatcttgaaggagattgttaattatacataatttacatgtttgtatatagtattgtacatatgagtatgtttaagtggtataatataaataactttatatttccggatcgagaccgtgactttggccaaagtaaatttatatataaacctaggataacattttttatttattaatgagaatgtgtttttttttttggtcaaagagaatgaggttatttattaataggggatcctttactaatatagtttattcatgaaatgcaacttggtgttaaagaaagggaaaattacatcctatgccatattttttgaaatttttatgcaatgtgccatattttcttttaccttac

SEQ ID NO: 8835 - DNA, 1163 bp, Arabidopsis thaliana landsberg
agtaaaatcaccttaccctaaagaatagaagaagaaaatatgtgaatgaaaacatgtaacaatatcacctgaacaaatgatgatgtgtatccattcatgcgcacaatttgctcagactccacaaaattagcaacataaccatcagggtcagctcctcgtcgccacatgcgcgtaccttgcaaatgtagtccagatacacaatcacaattaggcatatcatctgaattcaaaactaaagctaaagattttttgcccacttttgtagactataaaacggagctagctacttgaaaataaagtgtcatcatgtgttaaaaaaaaaggcataccatttcttctagagcacctcctagcaatcagagtaatgtcaacgatatctcttccaatggctgtttgaaaactatgaaaacgtgatgcagggttaaggaaaattgtctgaagtcatgatccaggaaaaagatttgaatagtgaactgatagaaaaaggatattcccttgaattacaggaagcaagaactgatcaagctacaaaattaaaacaaccacagggtgatatatatttgcaagtacagaaaacagaggagtgaacttgaacaagagttcactaaccttattatcgataagaacttctaacatataattgttccatagaaatctaggctcagcctgccaataaagatgtaaattaaaggttagtttgcacacaaacaagcaacaaaaagggcgtatggatggatacctgtctccacaaaggaagcaacttagactcatcacccaaatcatgcaagcgctgtgcactgaaacaacaacatacatgattagcaaaatctcaacttttttttttaatctctttttacaatctagcatttccagagttggcacaaattaagaagaagagaaattatttacgtgagagtcaagttaatttcatatgagaagtagagaccagttgtcctctcagcgacacttagcagcctagagtagtcatcagtctccatctttttctgcgaaaagcggttcagtgttttgatcgttgaggcccattaattattgtttcttgcttggcagagagatagatacaagaggggaaatgttacatgggagtcaccctgctctttaatgccggggtttacaaggagaaatgaatcccccctgggaaagaa

SEQ ID NO: 8836 - DNA, 1706 bp, Arabidopsis thaliana landsberg
cacccaatatgaaaccctacatatcctcaaaagcttaaactttgcaaatcccaagagacttttgggcattaaactccagagtaaagaaacttcccaagaaattgaatagagttaaagtcctccatagcaacaagaatacgaagcagacaacaaaaaacaaaattttcacctgtaaatgggtttttgagttcaccggaaccttctctttggcatgaatcttcatagacttggaattgctggtatacctcatagaagtctccattttcctcaaacgattttctcgagaaaatcgcctagaaaatcctcactgagtcaacaaaaccaaaacctcacctagtttttgcacacttcgactactgtatcatcctctgcaccaaggttcaccataatccaaccaataactcaccgccagctgtcctattagtaaaagagccaatctagtcccttaagcccatgtttagggcccaatatatatgggcttcgactagatccgacccggggaaatagccaatattttgttaaggtctctggttctctgagtgagtaagctagttcgaagactggtccgaaaaatctgacaaggatgaagcaatcaagtgtcgtcgatctgttacttcttctcctggcgatcgctcttcttgcgacgccggcgttctccgatctggttttatccaaagtcgaacgtcgtgtaagtctctcaatctctcaccacataatatcttcgatctggttttggattcatgaggttcctgaatcaagtcccacaatttgcatttgttgatctgtgctttaacacttcgaaatcagttcaaaagatataacctttatatggaattcttataatctcgttagaattgaaatcattttcgagagtcttttagcttcatttcatgctttattcatcaaagtttgttgcttttttgcagatcgatgtgacttcacagattgctcgtgttactaagacccttaaggtaatttctatgagactatcttagtcacgaagttatatgttgtgttggtgtctctaagtcctggtttcaaatttggtattaggttgtaaattctggctctgaatcagtttctgagtttgctttgacattcccaaagtttcttggtaacaacttggcttatctatcggttgctcctagtgagggaaaggggaaatctaaacgaactttagtgaatctctctgtgagagaagctgatcagaaaggtttacctgattcaattagtgtttactcagttgcattacccaaaccactgagtaaaggcgatactttgacgctggaggtagttgctgcattcaccaatgtacttcagccatttcctgaaaagataactcagggtgaaatccatcttgttatgctccaagaaagcgcacaatatctctctccttacgcggttgagtctcagtcattgtctatcaaactaccgaatgccagaatcgaatcttacaccaaattcgagaatacaaagctccagggatcagagctcaaatatggtccttacaagaatctccagtcgtattcatactctccaattgttgtccactttgaaagcaaggctgcatttgctgtggctgagaagcttgtgcgagagatagaagtgtctcattgggggaatgtgcaggtcacggagaattacaatgttgtccaccgtggggctcaactcaagggcgagttttcaaggttaatattcgtactaaa

SEQ ID NO: 8837 - DNA, 2300 bp, Arabidopsis thaliana landsberg
gtaggcaaagaatggtgaaagagtgttttatattcttatgtctatattcgacaacgcggtgttttgtcaaccaataaaattttctaacaccataacataaatctaaactttacatgttaaatttccttagcttagtgaaacttgattaaattatgcccttccaatttttctcaccatttttaccctccaaaatttcttaaacattccacacatcaactatttcacagctttacaattacgagccatcactttcgtacaacaacaaaagtaataatagattttctggtacatgtatcgaaaagttgtgcggcctgcgtcagaaaaatctaagaaaaaaacaaagagtaaacaaaaatatccaaacagtgaatctaataataaattctgtttactttctgcaaaaaataggataaaatcgaatttaattctttttatcgaaagtcggaaatatatcctatgtcgcaatcaattaatgtacatatgcaagaaatttaaattaaaaaaaaaagaacgcaaaaaaagaaaaagaaaaagagagagagaaagaaagaaatcgagtttaactgctcgtgtctctctgtgccactcgtcttcagttttgtcagcgtcttcataacttataaagtcctatcgatctctcttcttctttctttggccactctctgtgtctttctttgttaataatatctcaaagaataagaaaaaaaaaagaaaagaacaaaaaaaagcacaagtttcttgaaaccgtgttgttttcgtgtaatatacacagttgttacagattctctccttttgggtttctttttgtaatcatcatttgattgactgattctctgttctttttttcccaaaaagagagtccttttattacaaaaaaaaattaaggttctgttttgtttcgtttagcttttttatccaattacatcagaaccagagttgtttgttgctgctctgtgatatactcgagtcaatatttatacttaaaggaaaaaaaagtttcaatctttggtttcatctcaggcgaaaactgctacaaatggtaatcgatttctagggctctgactggttttgattaaaggaatcaattcaggggaatttcgagttcttttgttacaaaaatggcggaaagagtcgaagcatcatctgtaccagaaggagaaaatacaatagaagaaagagaagtaggagctatgtgggaattagagcagaaacttgatcaacccatggatgaagaagctaataagctcaacaacatgtatagagaaaaggttattactttctcattgaaattcatatgtagattttgagaaatggagaaaagttgaggtttttaaagtttgctctgttttttttttcatcagggattatcaatgttgatgcttctaaggctctcttttcattgtctagggattttttatggagatttagggacgtctccattgtatgtgttctacaatacattccctgatggaattgatgatagtgaagatgtaatcggagctctttctttgatcatttactctcttttgcttattcctctcatcaagtatgtgttcattgtctgcaaagctaatgataatggtcaaggtaaggtttagaccgcggtgttttgaaccaaccggttttggtgtatgctcattcggattgatcaatgttgttttgcaggtgggactttagctatatactcgttgctttgtagacatgctaaagtgaaactaatcccgaatcagcaccgcagtgatgaggatctcacgacttatagtcgaactgtatccgctgaagggtcttttgctgctaaaaccaagaagtggttggagggtaaagagtggaggaagagagctcttcttgtcgttgttcttctcggtacttgtatgatgatcggtgatggtatcttaactccagctatctccggtaaagcttctttactttctttctcgttgaggtttacaaaaaagatgataatagtttgcaaaaacaacttcttacagttctttcagcaactggtgggatcaaagtcaacaatccaaaaatgagcggcggtaacattcaccgcgccttatgtcagttcatgtttcgaatcggttcttgttttgctaacttgctacttttcccgtttgcagatatcgtcgtgcttgtggcaattgtcattttgataggattgtttagtatgcagcaatacggtacagacaaagtcgaatggctctttgcgcctatcgtgcttatttggttcctcttcattggagcgggtgggatgtacggcatctgaaagtaaccccccccgttttaaaagcgttttcgcc

SEQ ID NO: 8838 - DNA, 812 bp, Arabidopsis thaliana landsberg
acaatctctcttttaacgataactacgaggaaccataacgtttcaggcaatggttttagacttttagacccaacccagtcacaattgtatattttgatcatacgacacttggtcctatccagtcccggctcaattcattatgggacctattgcaaaactcaaaataaaataaaatttcttagtaaaatttttttttggaaaaattggggctttttagtcttaacaatttttttgaaattgattagtaacggcatttgcctacgatgtgaaatataagtttgatacataaataaagtaatgattgattcttgaattgctttttgtacttctagatcagtattgattactttatttacgagaaaatagttcatttaagcacatttatagaaaaatgttaagtaatgttaaataggatagtccgattaaacctattaattatgcaaattttctttcaaataaatagatacccataaaaggcctttttaatttctaacttaactacaaatgacatcgtttatgtgtagagtttgagatttcacattaaaattctgatttcaaacaaactctttcttcttcactatagtgtatcgatttcgatcttatcttctttcgaatttcgacgaatctcgaaatttgatatgaattttgagtacctttactgtaattttgtgttttatttctggatttggtagttcgaatctaagagcatacaaaaattatgggctgcatttggaacttcgattcgaatataattcttcgggtctagcaatcgaatattacatattttgcaatcgtaaattattaattttgtt

SEQ ID NO: 8839 - DNA, 407 bp, Arabidopsis thaliana landsberg
gactgtgtgaaacttgggctgttattagatatgataatagaaaaacatatgtcaaatgcttgttaccagccaatacgaaaacagagaaaaggaaggcttaacacgtgaacgaaatgaccaggattacacgcgacatggcgatggatctaccgaatatgtctgccaacattggccaggacgaatcttaacttccaaagatacacgtgtgagctgtgtcaagacgtttaaacgggcacactgacccttgcgatatgaaaccggaaaactacatatccggaccaattaacacaactacctttagacccttactacatcatataacctagatcctgttttaaaacaaacactattatacattgcactgaagaaaaaaaacactcaacttgcaatcaagaccgtccaaaacc

SEQ ID NO: 8840 - DNA, 1019 bp, Arabidopsis thaliana landsberg
catcataattcaaattttaactaaattcccctaaaataaaataaaaacaaatttgtgagtgattattttggcgattatcgtctttctctgtcttctccttacgttggtgtcggttcatgtttttcgccggatatctcatcttgttggccgcgagaactggttttgccactcattacaccactggttgggttgtccaaaatctgttgtgacgaaactaaccaaacagtctcccggctcaattcattatgggacctatggcaaaactcaaaataaaataaaatttcttagtaaatttttttttttgaaatattggggccttttagtcttaacaatttttttgaaattagttagtaaccctaggcatttgcctaccttgccacccccagagacgggcctgtctcgaacaaatcacgatccgtcgtcaagcaagattaacataacttgttgtgaccatcatcaccatgaagaagcagatcttgtcgcaaacatcatgggcaccatcaccaacgtatgttgcatcaaacatacgaccagggcgttggtctcttctctcttggggcgggttaatcatttcatagtaactgccatgtctctctttcataaaaatttcttatggtttccattacaatggagccgatttctttgcctccttctcttcatgggaacggtaaatttctatttcgatgccggtgtggagaagttgttcgacggatccgctaagcatcttttatgtctgtgatgggaacatcccattgcgatgtcaatttggcaatacattgccaatcttcgattgactctggtgcgcttcctagtgaaccgttgcaagaggttttagccgaagatcaaatgaggctcgtagcgactcttcctcacaactggtgcttcggtcgacgaatatgggttccgggaatattatgtcttcgaagatttgacaaattggcgcaagagaaaatgaaaactaatggattgaatccgttagtgagtcttgtaaaaggagaatccatagtcattaaccgggc

SEQ ID NO: 8841 - DNA, 665 bp, Arabidopsis thaliana landsberg
tgattttggagattcttttgaaaacatgtttaagggttgggtacaggtaaacataaattttagatgtttttggcttcttttttattgggaagtttgattatgaattttaccattatgaggagtatttggaacgctcatgatttttagatcaattgtttcgtaagttcgatttgtggactgtccgaaataggacagagttgctggatttgcatgggatacttttcttttcgtcaacatcgaagacgtcctctagaatagaaattaatatttactcttgcagtgtatgctttagatcccggctcaattcattatgagacctatggcaaaactcaaaataaaataaaatctctcggtaaattttttttttttggaaaaattggggccttttagtcttaacaatttttttgaaattgattagtaaccttgggcatttgcctaccttgccacccccagagacggcctgtacgagccaggtacacagacgaatggagaaaacactctaggggagacgctacctcacttttgcaactatcttgtgaaggacgcgcggccataacacttgcattatgtctgattttggggacactagacaaaacacgggtcatcatgatttacaattaattgaaactagatttggacaataagtctacatgtcttacatatag

SEQ ID NO: 8842 - DNA, 2605 bp, Arabidopsis thaliana landsberg
ataagcatctatgaatctgttctggagaaaataatattttttggagtaggacaaattctctataaatgattttcaaaattcaggctcgtgacaagccacttatcaaatcctaaatgtttatgagtatacaacattgtagtttacaaattatgaatgaatttgtaagtgtacaacatgccatacgtgttggcgatagctcaaaccgcagaacaagaagccaactcggtatctagattttgttcgataagcagatcgctggaaatcgctgatgctattctgtgtcgtttcaaaatcaaagaagtggcaatttttgcggattggtagttcaagacgattaccctactctcatcgtctaagtctatcctcagcttttcggtgttgcagttctctatgagctgacatagatgtctcagattattcacttctactccgttcactttattcacctgtttcagcacaaaatcagtttagttgtcagtctctcagaacactatatcatgcaaagctatcatgtctaagttatgattttgcatttcatatgtgctgttttagaatcatatggtactgctctgttatgtttaattctttattttaattgctgattccctaaacgtatgccatattaagaagaatcgatgacaaaagggtcaggagcattttacaataatgacaacgaggtttaagattagcttttacttacttgtagttctgcgagacgctcgtatcctgtgttgatatcatccattaacacctatcaaccagagattcaatatcagtgtgatacataaatggcgagacatcattgctgttatatttgctggacattcaaaagttctaagcaagctttcgctgcttaggaaacagaggaaatctggttgactgtatgtacttattatcattgtggctcaagtgattttcaatctttctaacaagacttaaagaaaaaaaacactagggaaaagaaagcacaaacctgagagacaatgacaagttgttgaccggcttttttgggcaaatcttttaatgcacgatggcacaatgtgcggggagaagtgttataccaatcttctccatattcatgaaggtatggctgagtaagaggtacaaatacgaagcccgcaaatatataataactgggaagctgatcaaattgatgcactggaactagtggttgcagctgcatacaatacaaaactattaagctcagaagaaaagatgattgtccattttagagatggtatatgaaccagcaagcaaacaacatacagtgatttagtcataacaaatgacttacaggtcttagtgtgatactgaattcatgttctttcccctctctcaaaactttaaccaaggctgtttcatctggtttcttcatagaaaccaaatggtcgaaagtgattctctccctgttccgaaaaggaactgcaatacatcaaaacacacttcaccaacaaaataggggacaaagtcagcactgaggcttatggaaataaaggaaaatatacctgttccatcatttgctataggaacaccatcaaatgcaagaagaacatcatctttcttcaaaattttgtgagcatctgatagagggtttattttgctaacaagaacccctgtcatttcagaactcatctgaaaaccactacgaagttcaccattctccataggctgacatgatacacccattgaacaaaaaccaatgtatttaccacattcttcaacgccatttatgaaatgctttatcactggtgttggaattatatagctgcagtttaaaaccacgaaatcaaattcttcaattaaaccttgccttgtcaagacatgtacactacttcaattatactgcatattgcaaaccatgattagaaaatcaaacttaggagatgtctcaagacagcagtgattcatacatcattccgagagtgacaaataaactcatgttacttacataagttaagatatcaagatataaacttcgtttaactccttttcctaatcctttactgcactagagctaaaataattaacctctgacttaccctatattctcagcacctgaaagattttgaaatgcgacaccagctactttgtttcccatgatagctgggccaccactatttccggggttaatagcagcatctatttgtatagccattagctgggtggcaccgtgaacatattgtgtcggttcaactcgagacacaacaccttttgtaacagaaatgttgtcaccacctgcattagagctcatatgattaaaactcaaagccactttcttatttcagattgtcgtaaccatataatgggaacccttaagccaaacatcataactattcagtttttcacatgacaatgcacattccaaatatattgctttccatgaatatgaagccatagcacgtatactaatccttgaaagttttgaataaatacagaagctaaaacataatagttgcctcatcacaataaatttccatgtttagaagcagaccaataacatgacagaaatcaggtctcggcctacgattatacactgttggagctagtagccaaagatacatacatacaacgagaccatctaaaactcaaaattggtctttgttca

SEQ ID NO: 8843 - DNA, 1856 bp, Arabidopsis thaliana landsberg
  unsure (1)..(1856): unsure at all n locations
attaacgtatcacaatgaacagtattatccgtataataaccatattgtagctattgtaattttgtaattaatccaaatatgaaagaggcttttggttaatattttctttctcttttatacttacctaatttttaaattatctctcctactttcttaatttccacttcttctgagtatataaatttaattcactctagaaattattgattaaaataaagtttgtatataagaaaagaaacgtatacttttagtggtgatgtatgatgtatgaaacattaaatgtcatctaatttattccttcattagttgaagaatctagttgcagttattgcaacaaaaactagaatagtttgaccacaaaaacacacactagaataatgataatggacgtagacgagcaaaccatgttgagagttgagacttggaaaaaagaaagcgagaaaataaaaagttgcaagaagattaattaaaaaacataaaggagagaaaacagaatgaagtttcaaaatgagtagtttgagattgattttagatttttgttggttttgccagagacttgacaatatgttaagatggtactgatataactttttgtgaaattttatgagattcaccttttaataaatagaatggcggttgatgaagtaagcatattcataggtgttgcttctcttacttttcagtctggtggttcataaacaaatttacataccttgaagctgttccaacttccaatgtatgtcttagttactactatcatactatattactatgtattggaaaacttttggttagaacctgttgggaggaaagggtttatgttctggttcattttacgtgtactcagtacttataattaagattaaaagaaacatttacagcttcaccctctagtcgttgtatgtgggcatgtggccaatctctgaagcgttagctagagcaaatatatagttgagagttgcttaagttagtgaacgtgaatgactaaaaagatatgttgcatttaaatcgtattgggcctcatcccatctaaaatatagtaggtgtaggccttttaggttaatttgaataaaatcaacctttttgtaagcaacatcgacgattgtcacatttttctcatacacataggtgtaatctagctttgaatgttttctcatacagataggtgtaatcaccgtaattatcatttgtgaagatatatgttttaccaagtggtttgtattgtccatatatactttaccactttcatattaacatataatgtttttgtaagtattataccataaaggattggtttcttaatattattaacaaaacgcaaaaattcttttaaacgcaggcgattccaatccacagcgttacggttagagtaggatcaacacaatgagtagtgatggagatcataatcacattcgcattggtctacactgtttacgccacagccattgactccaacaatggcactctcggaaccatcgctccacttgctatcagactcatcattggtgctaacatttttgcagccggcccattctctggtggtccaatgaaccctgaacgttcttttggaccatctcttgccgttggaaatttttcaggacattaggtttattggattggtccacttattggtggtggacttgctggagttatctactccaacgcttttatcaccgaatccaagcccgaaaccgtcgaatcataacgcattcctcttatttcctctgcttaaaatatcttttcattatgaaagtttttaatatttggcttttttgtgttgctttaaatatatgctcgtttgatgtgagtgaatcctttttctttgtgctaattngtatgaatatcatcaattgatt

SEQ ID NO: 8844 - DNA, 1806 bp, Arabidopsis thaliana landsberg
gaggtttaaattggaatgggttccttatatatggcttccacctttgagccagagttcatatcgacgatccaattcctcaaccaaaagcagagtctctggatcaacaaagtcggcagtttcgtcttcccaaacaatatcagggaatgggtacttttccggaggcaagacgtccgaatacttgttcaccaaactagtagcagcagcatcatcttccacactcgccatgaactccctgacctgatcgagaaggttcaaagcaggaatgcagctctttgcaaaagtaagcatacgcgcaagagcagtcactcccagggacctgcacttgtcccttgagtcgcaatcatcgtccttgctcagaagatccacatagttaaaggacattacattgactagcgtttgtgtcacggggacttgacgtacagctcgatcgtaatgatacatattgtagcgctgatggagaagactggcgtacaccggatcaagatgacggacgcaaagaaactcgtgtaaaacatcattgagcttgtttgaaagtgttgtccctgcagacatgaccttgacggcatacttttgacggatatcggagatatcatcatgacaaacacggtctggtatcagggtacagtttggtatctgatactcaaaacggatggctctatcaaaatccaattctgtcggaaccacaacactcatcttcttgaatatgttcttctccattgttccacaacgaaccatcttgaatttgttcttgtccatttttctgcacaagtaaccaataaaaaaataacaggaattacaactctttttaaagatccttatcaatcgtatgcaatctcaacccctaagcaatttctaatcacacatcacataaaaagactaaacataaaagatttgttagtcaattaaaggcgagattttttatttttttttttgttttaagaaagatccaaacaatcatatgcaatctcaacccctaagcaatttctaatgacacaacacacatcacagaaagagaccgtgagttttttttaccgaacacaaagatttgttagtcaatctaagtcggctttacgacaaaaatctaggtcgaacttgtacaaaagagcgagcgtgttcgcatcaggtctaagatccatacaaacaaaacctaccaaacagttgggagagagatatccaaagagcttgcttaagagacttgcgcggaaaaccttcaccagctttttatatgtctttacataaactagggttcacaatcgatatctcctttctctactctcggtttcgaataccaaacctccatctaattttgtggcccaatagagactgttccgaggcctactcaaaatgtccactattgttatttttccgtttctcggatagccaatctttatttttaattggagttttaaacaactaatgtaaaagaagaaatgtgaaatgataaagaaagaaagtgtcacattcatccgattcgtcttcatcggattcatcggaatgctataacaaattaaacaaacatagaattacattgttttgtaccgtcgtttaaacctttttatttcaaacattttgtcaaagtttacaataaagaaacgaaattacagtattacacgatgctttctctcgacaagtttcactcgttgaattgatagatgattattcatttttctttctttcattctcaatgtatattataactacatcataaactacaatcaaatattcttggtcttcgcactatttacgaaatttgtcatggtgataaaactaaaaggctgactttggaccttaattactcttcatcga

SEQ ID NO: 8845 - DNA, 1285 bp, Arabidopsis thaliana landsberg
cgagttattcaaaagaacttgaggaaatgaatcacatgaccaagcaagagtttattgcatctcttaggaggtgagaatcaaattaagatttacatatatgttcttgatttcaaaattggaatatttccaacttttggttaatgtaaatgtttcaggaaaagtagcggtttttcgagaggagcttcaatatatagaggtgtcacaaggcatcatcaacaaggtcgctggcaagcaagaatcggccgtgtcgcaggaaacaaagatctttacctcggaacctttggtaaaacgttatcttagtagacaaatgtcctattcttcaccctgaaaaatccagtcattgattcgtatatatgtgtatagcaaccgaagaggaagcagcagaggcttatgacattgcagccataaagttcagaggaatcaacgcagtaactaactttgagatgaacaggtatgacattgaagctgtcatgaatagttctttacctgtaggaggagcagctgcgaaacgccacaaactcaaactcgctcttgaatctccttcttcatcatcctctgaccataacctccaacaacaacagttgcttccgtcctcttctccctcggatcagaaccctaactcaatcccatgtggcattccatttgagccttcagttctctattaccagcagaacttctttcagcattatcctttggtttctgactctacaattcaagctcctatggaccaagctgagtttttcttgtggcctaaccagtcttactaaatcatttggttcgttcttgcttagacttctattcaccgcactaaccgatgacccgaggcttatcttcttgattctggctataaggatgaatctttcaagttccttttttaactgtaggctaagacagaagtagaggggagaaaagttgaagaatctgaaacttttggggtcaattttgtattaatgtttttcttttgtcaagggtggattatcggttttattacttattttttgaatgtaatcggcctataacggtataactctgtttccatttatgaatatttttctcaaattgtcataacatttttaaaagcataattgaacacactttaaatctgagtaaaactaaagcgttcgaggtcataatgtaaataatgaaaaatagcaggatacaaagtgaaattctaagaagttatactaaaaggaaacaaagccacgacctagtccggtccatctcattcatcacgtgccgtttacggaactaggttgagcttttaaagcttcattaaaggccactg

SEQ ID NO: 8846 - DNA, 1943 bp, Arabidopsis thaliana landsberg
tcagtaaaagaacctcttgatgagataactaacactcgagattgttctttgtgcaaagaagaagaacattgttctgttcaaaaaccaagagaacatcagagttttaatagtaccaaaccctttttgttgccaacaagttctcaagaataaaattaaatagccgcttaaccatattgggcctttgaccaacataaaaccatattgggcctaagcccatataatacttatagacagacattgttgtggggaaaaaattgttactcctcttccgttggttctatcttccgcatcgtcgtctcctctgagagtccgtacgcatcgacgattctctcatcttctctcaaacacgacgacactggtaattttggttttccttgttttccacttcaatctaagatctgttgcttttagtttctgtttggtttcatactgtgatttggtttcgtttagggtttctttgtatcgacagatctttcgatttgaatctgaaacccaatctcttcgcttttttttcgattcagggttggtaaattagagttgaaagatgtacaacggaatagggttacagacagcaagaggatcaggaactaatggttatgttcagacgaataagttttttgtgagacctagaaatggtggtaagcctgttaaaggtgggaaaggttttgaggatgatgaaggtactgctggtttatctaagaaacccaataaagctatccttgagcatgaccgtaaacgtcagattcatcttaagcttgctattcttgaggataagcttgctgatcagggttattctgatattgagattgctcagaagcttgaggaagctagagtgagtcttgaagctgctgctgctgctaatgaagaagagagtgattcgaaggtttctaatactcagactcatcaggttgctgctaggaaagagaagcagatggaagcgtttcgagctgcgttgggtttgcctgatcagcaacaggtggctgaggagggtattattgatgatgagccgatgagggagggttttgaaggtagattgaaagagaggcgggaacattcttttttggacagagatagtgggaggaagaaggtagatgaggatgtggatgagaaagatgctaaggtaaaggaaagcaagaagcagcgaggtggtgatgatgatgatgtggatgtagtgaagcgtcataagaaaaaagagagcaagaagagaagacatgatgattcatctgaatctgatgagcatggtcgtgaccgtagaaggcgctctaagaagaaggctaaggggcgtaaacaagaaagtgaaagtgactctagcagctcggattctgaatctgactctgacagtgatgatggaaagaagagaggaaggaagaagcctacaaagactacaaagaaacgcagcagaaggaaaagaagtgtctcttctgaatctgaagaagttgagagtgatgatagcaagaaacttaggaagtcacacaaaaagagcctcccctccaaccgatctggttccaaagaattaagggacaaacatgatgaacaaagccgagctggacgaaagaggcatgattctgatgttagcgagcctgaatcggaggataataaacaaccactgcgaaagaaagaagaagcttaccgtggaggacagaagcagaaaagagatgatgaagacgtggaggctgatcatttgaaagacagatatactagagatgacaagaaagctgcaagagactctgatgacagtgagattgagtatcagaacaagaaacaactgcgcagtaaggtagaagtttacagtgcaggaatgagccagaaaagaaaagaggaagaagatgtgaccaaacatggcaaggacaagtatagaagtgattctcgtggcaaggaagttgctagagactctgatgacagtgaggctgagtatgaaaataggaagaagctaaaggatgaaa

SEQ ID NO: 8847 - DNA, 1179 bp, Arabidopsis thaliana landsberg
cgacgtgaaacgggacaagaactccaatctgaatcacaccaagcagtgagaacaagaggtgtgttagctcggagaaagataccttggcccggactgcttttcatgtaacaaagaactcggagagcagcagtccaatgttgttccttaggctgactcataaattgcgataagatgtgtatcgcatatgataattcaggccgtgtaacaccaagatagattagcttgccaatgagacgacgatagcgtaaaggatccgtaataggttcccctttgtctaatgctagtctgtggttttgcaccatagggaaagcgaccggcttagcacctaacacaccggtagttgctaggagatagagaagcagattcgggaccaaaagaatcatcggtaagcaaaggtagtgttcgtggagtaacaggttcttcgggtgcacaagaatctcccaaactaggatctgtggttggcgaaatggagtccatcggagactaaataatacccgcactcatcgtctcatcttcatgaggtaaaccaactggttgtgaaagataaggctgtaaatctgttatctcatctttctcaagcagagcaaaaggaaattcatcttctatgaatattacgtcacgagaaaccgatactttgccggtttgaagatcataaactctccatccttttttcgcaaaagggtaacccaaaaacacagaccgattactccgaggtgcaaatttatctcctccatgcttttggttatgaacataacataagcacccaagaactcgcatgtgttcaagtggaggtggacgaccatatatcatttcaaatggtgttttaccatgtagaagcttagttggagttttattgataagataacccgcagtgagagcacaataaccccaaaattcaatgggtaaatttgcttgaaatcgaagagcacgagcaacgttcaatatatgttgatgttttcgctcgacgcgaccattttgttgtggtgtacccacacaagacatctcatgaacaatgcctttttcagcaaagaaatctcggagacaaataaattctgacccattgtcgctgcgtatcgtgcgaacatgtgtcgaaaattggcgttcaacaagtgccaggaaatttttcatatgcgttggagcctcttgtttggaagtgagaaggtatatccaccccgcacg

SEQ ID NO: 8848 - DNA, 1476 bp, Arabidopsis thaliana landsberg
gagtgtaattgtaataattactatggtttgtttgttttatatgtctgccatctaaataattacattatatgataaaataattaccctagcgacaaatgacagctagaaatgtaataagaacaccaactaaataattatgcaggttaataatggagcaagtgatgttctttctatatactgtacattttctttttaaaaaattatgtaatttcgcagaagagaaaagaaaaacacgtggtgattagagagtagtataaagatagttggttgggttctgtttttttctgtatctcgaggcgccaaaaacaacaacaaaaaaaacttcagagcggtgatcagattcaccgatttttctcaaaatgctaatcaaatcccaaagatcattgactcttttctctcctctcttgtccaaaacaagacggatcccggttaactcccaccaaatactggtcgcagaatcggtgataactcggagaacactcggtgcgatcaccgcaactccgagttttcatggcaatccggtggtgattcgacggaggatcaaattagagagagttacgaggaactgcgtcagaattgatcgggaaatcgacgaagaagaagaagaagaggagaaggagagaggggatctggtgaaacagagcatatgggaacagatgaaagagatagtgaagttcacaggtccggcgatggggatgtggatttgtggaccgttgatgagtctcatcgacacggtcgtcatcggccaaggaagctccatcgaactcgctgctcttggtacgcttttcaatcatacttgtctttccggtttagtagccaattttgaaccggtggactggtcccctacccaatagctaagctgtaagattcatacactgtttttggttcctttgtttagtctctttcgaatatattacacagatatggaaccaataatagttttaaaaacaggtaaacaaattaggcaagtgtccagctatatcatcttattatttaatcatttttcaagccaatcattagatttgtgtcggtttaccaacttcgaaaattagtatttgtgtaacgttttgcacgattcttctagacagaaaaaaatataatcggtaacataattaatagaacaaaatacataatgttaaagtttaaatatgttggtctgaagaaaaggcaaatggttttagtctcgctggtcaaagttaacgaccgtttccaatcatttgattatacaaattggactagtcaacgcaaggctaactaacataattcagtggttaaaaaagaaaaattgtttgatttttggtgagaatacggtaaataattgttagtatatttgatatgatggctgagaaaattaccggtttaataggaccgggaacagtactatgcgaccacatgagttatgtcttcatgttcctctccgtggctacatccaatatggttgctacttctcttgccaaacaggttatttcgttttcc

SEQ ID NO: 8849 - DNA, 1445 bp, Arabidopsis thaliana landsberg
gccacagctttcacagcttcgtcttgtctttcttttctctcgtgcaacttatcagcaagagaggggagcctcttcttctcgttctggtcaagtctagtcactggtatcccagtccatcggctcactacctcagcaatattctctgacccaacagtttctgtaagcatcacgttatctttagcactcttttctagtttcgctatcgcagattctacttcctgaattgcaccatattttagaacagcagctttaggaacgtcatgttgtctctcagcctcttgtagagcaatcatgagatcgtctcgattctgtttaagcctccgagtttcattaatgatctttttctcctttttgtattttattgtaagaggctcaagcttgtccctcaagtcatcaagctctttcctcacctgcagaataacaaataaaagaagtgaggtactatatgtaaaaaccatgtttttgaaagtaatttacctcggaaagacgagcttcgctagctttgtcgtccttctccttttcgagagcatgaatctctatctctagttgcattacttttctttcaaggctatcaatttcttctggttgaatataaagctgggctttgacatgtgcacaagactcatcaactaaatcaattgccttatccggtaaacgtcgacctaagcacagaacagaacactaataagcaaacataaaagaatcataataaattacaaggacatgttagataaaaagatggcgcaacataccagtgatgtaacgttcagacaattgagcagaaagaactagagctctatcttggatacgaacaccatgatgtccttcatatttttctttaagccctcgaagaatactgatagtatcaggcacactaggctcagctacaaacacttgctggaaccttctctcaaaagcagcatctttctcaacatgtgttcggtattcctcaagcgtagtagctccaatgaaacgaagctgacctcttgctaacataggcttaagcaaattagcagcatccgttgacccacttgctttgccagcaccaagagccatgtggatctcatcgataaacagaacaactttgccttgagcttcctcaactgctttcaagacagacttcaatctttcttcgaattgtccacggagtgttgttccagcaaccattgcaccaaattccaaggaaataagttttacaccagtaagattgataggcacgtctcctttcagtatcctttgagccaaaccttcaaccacagcagtttttccaacacctggctcaccgatgagcacggagctgttcttggtctccttgagagaacctcaatactcttttaatctccctgtgttggccaatgacaggatcaagcttacctgtttgctcaaccacatctgtcccataagtctttaaaagcccgaaggattacctccccacgaagcttttt

SEQ ID NO: 8850 - DNA, 1552 bp, Arabidopsis thaliana landsberg
ctctacgttgatttggtctgtaacccctggcttattccttttgatgttaatggaaatgactcattgattcagactgatcattcaattcataggagattcttgtctttttgtctgaattttattttgattcaacattcagaacatttaatttgtctgtggagtacttgatgatttactttaaaagcagcatatgaagggaactttttgacctcctttatcatttgaacaaatgtcaaacaggaatacttaaaaacccttggaaatgataatcgtgatccgatcagaagatcttggaatttaaagaaaatcaaatatcttgagactagattttcaaacagaagcaagatgatatccagtttcctttagaaatctcagcttcgtcatcataatcattcgctcgcaacggcaggctcagcttcggttgcataatcgtgtctgtagatcaaagcaagtgtatcagtttggcaagggagaaaacttcaactaatcaaccaaatgcttatttgactaagtcgtgtcttaagatgtacacaacatgtaaaagtaagaagaaaatcagatgttctctcgatcttactttattttacgagcaagctggtatatgcctgtccctgccatagcaacattaacactgaagaggttccagtttttctgtaaacaagagtcggaatcaaagaagtcagatcaaccatgaatacaatcactaacatctcatcgcaaacgcaagggagaagatcatgataagagagtattacaatactaaacacagattggattatcaaagggaatgtaaagaaacttaccggattgattaccatgctgtaacgagaccaaataacaccagtgcatgtaaccgctgatacaagaaatatcagagaatatttgtaagtacattgaaggcattgcagcacaatgaaactgatcaaggaacaatgacaactatggggaatataataagcctataaaagtccacaattcaaaacagaggagtgaccttctgcagattaagaagatgatagaataatacataccgatttgttgaggataggaaagtttctctggaggtttggcaaagtctgcaatgttggcaatgctaataccccacttgaacgttggtgcccagaaatgaactgataaaacacaaaatgagagtcttattgtttgatgttctgagacacgagtgacgtgaattggtaacggaagactagagaatcaaactcgaggatgatcaattcctatcacttatgaaacccattataaaagcaaagagtcattctcctggaccataagcaacaaatcaatccatcctcgagaattaattgaaagtcaaaattcatcaaaaaatttttttttttttagtagaaacaaatcaggattcaccagaaaaatcgaaaagacaagaaagtggaacttataaaagacaaaactaacaacagattccaaggagatgtagattgctcaattatccataattgaatcgtcaattttacatgaaccaacaaaaaaaaaaaagaatcatcgaaatcgatgaggaaagctaatcatcgtggaa

SEQ ID NO: 8851 - DNA, 559 bp, Arabidopsis thaliana landsberg
  unsure (1)..(559): unsure at all n locations
ttgcgaccaaccaagttttactatatgacgcttcttgactctttacactatttctctctttcgtatggtaggttggttctgtgacaacaatgtgctttacgggtttcctcatccgatgtatcatggtaaagacacacacacacacacacacatgtttgtgttgatatctaccaatccttaccttcttggttagactttagaatgaacaactaaccaaaggttttgtcatttaatatggtttagatgtgctttgccactttctatgatggagcaaaccttgatgtgatggataatccagtccttaatctcatatatcacctggtaagctctctcttaaactaaccatataatctgatcatgaatcttactgtcatacataatcaaaccattgtttctgcttgaaacctannnnnnnnnnnnnnnnnnnnnnnnnnnnnnaatgttgcttaattacagttggtagagttaataccattttctctggtcctcttcatcgtgagaatcctcccaccaaaacgaggcattagaccgaaggtgtacacanagataatgatcagac

SEQ ID NO: 8852 - DNA, 2184 bp, Arabidopsis thaliana landsberg
ttttgtgtttgatcataatttttaataccctgaggttaattagaaaatagtgattgttgttgttgatgttccatgactgattcctgtgatcattgtttctctcattcaggttctttgggattgatgtgattacgagatacatttcagctacgataattcgtacgaaagcctaatcatagggggtttagggttgtcttaacttcaatatgaacttttggaaaatattgattggcaagatgtgagttagaaagcttttcagttccagagttcctgaacccgtgcagggacttggtcttttctaaagctcacgggagaagaataagggttgattcctgggatttcagcctttattccctgttgagctctcttcattcccaggaatttaggataaaagtgtacagttggaatgtcagttgctagtgtagcgttgagtccagccctggaggaacttgtcaactttccaggtattattggacggtttggtttcaacttagacgacccaatcctggtttttctgactattgctggatctgtgatccctaagcgggtcatggagtctgattcaatagcatctgtgaagctaaggattcagagtatcaagggtttttttgtgaagaagcagaaacttctgtatgatggtagagaggtatctcgaaatgattcccaaattcgagattatggccttgctgatgggaaactgttgcatttggttattagactttcagatctccaagctatttctctaagaactgtttgtgggaaagagtttgagctcgttgttgagaggagtagaaatgttggttacgtgaagcagcaaattgcttcaaaggaaaaagagctcggaattcccagggatcatgaactcacattagatggtgaagagctggatgaccagagactcatcactgatatctgtaaaaatggagagaatgtgattcacttgctaattagcaaatccgctaaagtcagagctaaaccagtggggaaggattttgaagtgtttatcgaagatgtaaatcacaagcacaatgtggatggtagaagaggaaaaaacatatcatcagaagcgaagcctaaagagttcttcgtggagccttttattgttaatcctgaaattaaacttccgatattgctgaaagagcttatcagctccactttagaaggcttggagaagggaaatggcccgattcgatcatctgatggatcaggaggagcttattgtatgcaagatccatctggacacaagtatgtctctgtcttcaagcccattgacgaggaaccaatggctgtgaacaatccgcatggacagcctgtttcagttgatggcgagggactaaagaaaggcacacaggttggtgaaggagctatcagagaagtagcagcctacgttttggactatcctatgactggaccacgaacttttcctcatgaccaaaccggttttgctggagttccgccaacaacaatggtcaaatgcttgcacaaagatttcaaccatcctaatggttacagtttctctcccgagaacacaaagattggttccctccagatgtttgtgagtaatgttggaagttgcgaagatatgggataccgagtattccctgtcgatcaggttcacaaaatatcagttctagacataagactggctaatgctgatcgtcatgctggcaacattttggttagccgagacggaaaagatggtcagatggtgcttactccaatagaccacggctattgctttcccaataaggtaaaatgacactccaatatacacaacaaacacaagtgtgcttacgatattcacactttgttttcttaatttcataacaccttatttgtttttgtgcagtttgaagattgcacattcgaatggctatactggcctcaagcaaaagagccatactcttcagagacattggaatacatcaaatccttggaccccgagcaagacatcgaacttctgagattccatggttgggagattccgccttcatgcgcccgtgtcctccgaatttcaaccatgcttctaaaaaaaggttctgcaaagggtctcacaccttttacaatcggaagcataatgtgcagagaaacactcaaggaagaatctgtaatcgaacaaatcatacatgatgcagaagccatagtgcccacagagacaccgaagatgagtttataagcactgtc

SEQ ID NO: 8853 - DNA, 1088 bp, Arabidopsis thaliana landsberg
aactgtatacagaaatggaggcaaaacacatgttatgatcctatgcattttaatatgggaacaattattgaatgagcactacaaataatttatgaagagtacatgtcctataagagatcaaaaaagaaaatactgggactcatgtgagcatagaggagaaaagtaatcatgtttgaccactacctttgttttggctgccaaacggtaaatttcaggcacatcagattgttggtgatgcttaggcattgccacttgaccgtataagtcgtacttgtctattagcttcagaattgagagcagcacagaggaattcgtggaggacaactcatcaatatcatttcgatttcccattatcaatgtctgcaatcgaagatagtgaaagaagaaatgaaaaaagtgaaacacacttccaataaattagttggagatcatgattctaaaaagaataactgcaagacttacaaggttcgcaagctcccgtaatggacggcattctccaaaggctttgactagagtaaccaagttctttttagggtctggccgagcaagagcgagaatcataggcttgcgcgggttagagaagaagcgcataatctgcccaagtgaagagttcgtagtaagtttaaaggtaccgataaaacaaatatagaaaatgtaaaacctttgactaaagaaaaaggaaataggctatgatttgaagataagattacctcagaccaaattggtggatcagcagtttgtggattttcatcatctccatctgcatccacatcatgtggtacaatgtgatgaaattccattcctggaggaataacctaggatcacatgacaaggctactcatgagtcatgatataaagacattctcacgtataagtcctagagtggaaaataagatgatcagagaggacagagatgatacttacaaccatgcgaggcataaatctgcctagacaactcacaccccttttcattcttgctctgagttttcgctccaaaaccggatcaaaaccatcataaaggcgccattgctcgtctacctcttgccttgtactagttatgacaatctcagaagcatcaagacataact

SEQ ID NO: 8854 - DNA, 603 bp, Arabidopsis thaliana landsberg
  unsure (1)..(603): unsure at all n locations
gcctactttagctgaggtttcatagtatggaatgtttcctttcgaagcacaccaagctcgagccttcttctctgatacctgaaaaaccataaagtgattggaaacaatgcagagaggcttcaaatttcaaggttgttcttcattacacggagattatatacataccacccggctgcttccaccatccacatcgatcttattaccgataacaacaaagggaaagttctctggatccgaaggacttgcctgcaaatcacaattaccgcaatttcaagccaagttctttctctttaatctactgggaagagagagtaagatctatatatatttatacctggatcagaaactcttccctccagttgttgagatcctcgaatgattttgcggagttgacatcatatacaagaacacagcaatcagcaccacgataaaacgcaacaccaagactctnnnnnnnnnnnnnnnnnnctgtgtcccagatctgtaaaaaaaaagcaagaccttagctcttatggtcaagcaaagagagcaatatatatagtacttgggatcaattcttaatctaagacactcttatggtcacccctttttgtatgtttccta

SEQ ID NO: 8855 - DNA, 1762 bp, Arabidopsis thaliana landsberg
tgcatcctccaaatttggataattctacttttaaaatctgagatcaagctcagttagggcatgcttcaaagtcaacttgggatctccaagaacagaatttcatatggttcttacagatgttaatcttgatggattgtggagcaagcaacatggttatcttcttcatgttttgtaatgattcttctttatcttaccctctaaactaagagaagaagttctgtttctgatttgccaaacctttatacaactcagaaacttatgttgggacttgaagttatccaataatatacaaaggcacaccaaatcaaggaaaggtcaaataaagattacaaacactaaaggcaaaaaatttataaaggaatgatcaagtaacgaacacaagaaaaatcaaagatataaaaagagttataattgttgcatcaaaagtaagtttcactgatcattgagctatgaaggcgctgctttagaaagacacaagagtctcgatgtggtttggaaaaaaatacatgttgtataaaccgtcgtctttatcaagtccataacggcacctaaattcatcgcctaaaatgtagaatataaaacgatttagacaaactctgtgaagcaaaaataagcaagcacaccagcatcactaacacccttgaaatgtagatgtttccttcgtattgggtgtgtcccagaaagaggtaaaacaaagtgtttatgcatccattcgtgtctgtctccatccttcaaaaaacccatagctcagtagaagagaaatttctagtattaactatggctaaccttccctcataaggtactaatactatcatatgagaagccattaaacacaagcacggataccactaaaccctaaatccaaaactttaagctctaatctccatttagttatgaattaaacgctcacataaattagtttttttttttttggttgccttctttccttggtacaaaagtaatatcctaaacttattattcacaaagcaatagggtttagtttcgtggaagctttaaagtttaaacctctaccttttgaaaatttccatgtatggttgaaattgctttttcaaatagatgttgctcgtacaatattctgccatgaagaacccgatgttctaccaaataatcattaatttgttgatctaacaagaatttacattaagccaaacataatcattcataacaatcgatatgacaaataactaactcttttacatatgacattgacaattttctagaatgcgccttaaattgtacaaaaaagaattagactattttagaagagttatttcaattctataattgcgtcccgttgacaaaatcttcatcatacgtgatgatacaataatacaactactcaagtggtagttgaggtcagcctcttctagaggctcatatattatatttacttattttggctttcttttaccctttaatataataaccatctcatttagaccccctaacttttgcatggttaactcaacacacctctcaattgttttcttctcaaatctatatctatttggaaaagaaaaaaaaacaagctatatagcataaaaaacacaacataacaaaacaaattatttttttctcacgtaagaatctaaattctacttttcccattaatagggactctttataatcattaatttaattcaaaaattcgcttcaaatattcaacattatgggtgaaaattctttcaactcatgacagtctcgtagaaattaggattttttttaaacctttaaagaaaat

SEQ ID NO: 8856 - DNA, 1680 bp, Arabidopsis thaliana landsberg
ctcgacagacggaataggtgacgtgggtgcttagcataattttatgtcttgtcataaacaaaaagtaaacccaaattggtttttcgaaacaagaatcgatttggcacgaaatcgaagatttgatgaattgtgtaaaacatggcgattcatgaagaaacccagatatcaacaacacaagaccctccttgcacttctaatgatgcctcgccgcctcaagatcatcggttcgagaagcttcgtggcgtccgatggcgaatcaacctcggaatcttaccgtcttctccttcctccaccattgatgagcttcgcagagtaacagctgattccagaagaaggttttgactttcccctacattgaagtttttgcttttagggtttgcatttctcgatttggtagctccagattcagactcagaaacaaaagaatttgtaaagttttgatttttagatgttgttgtttattaggtatgctgctttgagaagaagactcttaattgatccacatttgcctaagaaaggaacaaattctccagatcttactattgataatcctttatcacaaaatcctggtaaaaatcaaaactttactatctcatttctcagatacattcaatttgcaaatttctctccaatgtaatgataatgtaaagctttatggattgtgtagatagtacttgggggagattctttcgtaatgcagagctcgagaaaacgcttgatcaagatctttctcggttgtatccagaacatggaagttactttcaatcctctggatgtcaagggatgcttagaaggatacttcttttgtggtgtttgaagcatcctgagattggttatagacaaggttagtagatacttgatttttcgagtgtattacattgcgaatatggtttgtgatttttaatggtgttttttggttttagggatgcatgaactattggctcctttgctttatgttcttcaagttgatgtgcaatatcttacggaagtgaggtcaaactatgaagatcagtttgttgatttgtttgacgaattagcgtttcaagaacgcgattctggagcttatgatttcgatataaaaaaggttttggatgattccatggaagatgaagaagaagatggtccaccctctggaagcacaaagaagaaaaaaccaaagagtttcgatgaactcgataccgagacgcagaccgctgtgttgttgagtgatgcgtatggaggagaaggcgaattaggaatcgtcctctctgataaatttatggaacacgacgcttacactatgtttgacgctcttatgtacggtggatcctcccttggttcggtttctgtagccaatttcttcatctattctgctcccaacgattccatcacgggactgcctcctgtaattgacgcttctggggcattgtatcatctactttctttagttgatgcttctcttcacagccatctcgttgaactcggtgttgaaccgcagtactttgcgcttcgttggttacgggttctgtttgggcgagaatttccactgagtaatctattgatcgtgtgggatgagatattttccgctgacaattctgaagtagagagaggcgttgaggctgatctagggtgtgaattcaggatccttagctctcctcggggagctctggtcgcgggaatggcggtctcgatgatactttc

SEQ ID NO: 8857 - DNA, 2903 bp, Arabidopsis thaliana landsberg
ctcatttgttctggtaaaaaataaataaattatttttatatcttaaaaaaaacgatttgattccattgacctacagtattgcgtattgtatgtcgtatgataataaatctacattactcgaaaaataaatatgagaatctaagtaccatgatatgattaatggtttgtgataacattatcactatgttatcatttggattcaaacctaaataaaatacgtgaacctaactaagtattcatcaatctatttatctaacaatataatggactgtaaatttgttctacagatcaataattacatggtcatatccttaatcatagcgttttgtggccatctcttctatttctctatatattattaagctatatatgaaggtatagtatatatatatatttataaataactcttacgactttgacttgacatttgattctacatagacaactctaatagtatgaattgaaaccagtattttattgctcctatcaacctggagaccttggtttcccaaatatacctatgttactataaaaataatatgtgtataataatattttttacctacgtaatgatgctcacaagtcacaagtttttacaggaactagtaaaaatcaatttataatcagtggtctccagactctccactatatttttttttataaacaaactcaaaagtagtgtgatcaatcagaaattacgggtcaactttttcgataatgcccaatcccattctcacatctttggcgacttgtgatctaccaccaccccatccaccaattttaaaattattttataataataaaaagccggagaataaaacaaaaccaagtgtcttttaaaactaaatgcctatttattgtttttttctagtcaatttgtggagaaaacctatcaaactaaaaggtgttagaaaatattgttggattaaatattataatttgtatatagtaaacattaaaaggtgattttattgacgtataataatttaaaaaccaaaaataaaggtgatatattgaatagaatttaactatttagtaggaaggaagcaacatgggcaaattgccaatttggtttataaaggagcccacatgtttaccttactattttggactttctgagttagtgtcgaaggcctttgggcccataaatggaccccacaaaaagacaggacaaaatatccttagaactcgccacgtagatatctcgacgtggagatctgaccacgtgtacagtttatgtcctgattttcgcaagagtgacgtggacgggtcatgatccgcttatactttcactttgtctacaagccaagtatattaaattgggcctcaaattagcccaatcaatatatcagcacattattaatcacaggcccaagtctcacgctagcattcgtcgacctcgattatgagtctttctcggaagtcgccgaaatcgtattcgccgatccaagtgtcgcatagacactgtcatctccggcgagagactgatctctggtaagtcaattcgatttcgcgcgtcttctaacttctggtattttcgtattccgttgctcagagaacatatttcagagattgctccacatgaagctgatactttccccgattcatcaaattgtcaaaaatcgttttcttctttagggattgattcagaagtcgtaggatgatcgatttgcgctataaagaatgctacttgctcatctgtcttatcgtcttcataaattttgtgacttgttatagcgatgagagactgtaagtgttgttgaaaaacctcacattatccccaaactcatcaatttggattcttttattggtactgtagaaatgatgttatcaggtttctcttaggtttggtggaaaaactttatatgctgggaaggaactttggaaagagacactgccattgaaatctggatctcgagtttacaaattacaagggcttaagtcgaactcttggtatgaagtcaagatatcatacccagcttctgtatgtcaaatttgttatcttgttctatgttcttatgtttccaaggttcttgtgcttgttaaaaatctcatccttttttgttatgataacagataccggctctattttcgctgcaattactgaagaacggtgtaatgggtttgaaggttaaccatatgaggagattactaaacactgagaagttgatcttcaaaacagaaagtattgaagaagttgataacaaggtattgccatcttcttcagttagttcctaaaacttagaaagaagaacgaatacaagtttaggagtttgtttctgatttaggagggattgtatgttttggtgacggtggaacctgaaggaatcgtggctataccaaatgttaaagaaagaccgtccatcatttacaacataggcaagcttttttttctacttactatctcatcaatcttcttcttttcacaacataagaacttgtattgagtgtagtgcttcttctagagtctgaaaactctcatgttgacagtttgtgaagaacagctcttaggcatccctcactcaagctggtcagtggtggttttagtagttttgtgtctcgttgtcgcgttgattcttccccggttcctcccatcttatcttctgatcaaagatgtagatcgtgatcgttaagaagaagcatggttaatacagtttcctcacctctttgttttgttactctgttcgcattttgatgtttgttcatctaattttgtatggtttttagttcttacatgtccactgcctcattcatataccttaccttaccacaccgcactcaaagaagagtatataagtctacatgtgttagattaatttcatgtttttcagacgcgggaagtcctattctgaacttgtatggtttgatcgtatatagttaagaaacgcttatctgttttgttt

SEQ ID NO: 8858 - DNA, 728 bp, Arabidopsis thaliana landsberg
ctttttgaaatctttggtctgcccattgttgctgttcacttatttaggttttctgtgagaattatttgaattattgaggcataaaggttttaactttttgaaatctttggtctgcccattgatgttgttcttaggatgatagtttggaattagtttgtttaaacataaaatattatatctattgtctgtttctgagtcttctgttcaatcgttgttgttgtgcttctgaatccttgcttttgaaattttgtagggaatgtcctttggatctaaaagaagcgatatcaagtgtatgttttgctgcgccgaggtgctctgacttgacagagctgcagcaggttcagatactgtttgtatctaagtatggaaaggaatttgttgcagctgcatctgagctcaagccggattctggtgtcaatcgtaaggtaatatcagagttcattggtggtataacttaaaacagattgatgtatgcaacttaaatcagattgatgtatgcagctgtattacatgtccatttgtagaactagttttcactggcattttttatttatcttgcagactgaatcgctgatattcattgcatggttcagtctagtagaaacaagagatttgttcatgtttttgtatttttccaattcaattttacagttggtggagttgctgtctgtacgtgcaccttctccagaaactaaactgaaacttctcaaggaaattgcagaagaaca

SEQ ID NO: 8859 - DNA, 1572 bp, Arabidopsis thaliana landsberg
gcgtatcagaaaaaaaaattagaaatctttcttagaaattttcttcatttaattaagattatacatttttttttgccgtctgatattgatacagaaaattacaaaagacattcttgtgcaaaaacatctattcagaggtgaaaaccacacaatattgcatgaaagtacattggagccgaaagaaaaacctcaacaaagacagatgagaatagacatagcaaagagaaaaccctcctgatctatcaatcaggcaagctataaaatcttcaaaatcgagtctttgaaacaacaaaaggacatggcaacagaaaaaccgtgttgacagtaagcacacggcaatggaaagctgtgttgatggattcaatttgtgagaacagaatggttaaataagaaatgcctcagtatcacaatgataacaaattcaagtatacaagaagtttatagaatgaataacaattaaaaaaaatcagaaaacaacctagataattaacttagggacaataattgtgtacctgaacaaaacactactcaaattaactttatgaccttcgaacatcaaatcttcaatgctcgatcgaaattgagatcgacgaaaagaaatagaatcatactaattttagaaataaccttagatttaccttatttatatactaatgcatctcacattgtcacatacatgtgatcaaacgtagttttaaaacagagaataaacaggaaacagagcaatacataaaaagcaataacacttcagaacgcatatgtatctttcctcatcagttaaatgttatgaaatcgtcctctttttgatctttctctgcttttttcttcctgtgatcttccacgcctttattcatatcagctcgtgccttctccgcatcctcttcaggccctaccacagcttcagtgacggtttgggcagcgtttttagtactctcccaagctcctttcaccgtctccttggtcttctctccaagttcctcagctttacctttcacagtctccttaaacccttctgccttctccttagtatcttctccatactctttcaccttctcttttgcatgtcgagctttctcttttgcattgtccattgtatcctctgcgtaatcctttgctttttcttttgtatcttccgctttatccgctgccttatacgccccttcgttcaccttatctttagtccgttcagcataatccttagccttctcttttgcattgtaggctgtatcctttgctttctctttagtttcgtaggctttatcctttgcttgctcttttgtctcgtaggctttatctgcagctttgcttgctccttcgttagccttgtctttagccgcttgggcatagttttctccggtgtcctccctccatttcttcgatccgtaagctgaatcagccctcgagtctctagcgttatctagaggatctcttccctgagaataaacagaacaaggtacaaactagggttaatagtttgaccaacatgttaaccaaaggaacacctacatatatctaaataaaccggaccaaaatcttgtctagctaggatacaccacaaccgctacgagtgct

SEQ ID NO: 8860 - DNA, 1304 bp, Arabidopsis thaliana landsberg
tttcggatatgctgtccgacatcaccggctccagtagtggtgttggttggctctagtccggcagcgactagttcacatcacccgcattggctggctcttgggttctcttgtcgatgtagatcgacttttcttctgtttttttttttaattttcatgttttgcttttaataattctcatatgagacatattggtgatagagtgaaagcaatctcgctttctaatgcttcttatccgatctgttttcttttgagttttgatttatagaaatctttgcagagatttgagaatgaagttgaagaaaagaagtggattccgttgctaattatcatagcattaagctgttgtatctttaacatgagcctcgattgctttttatcggtgagaaaataaaaagatccatgttcgatgagactatcgacggtgattctttcaccggaatcggtgcccggactgcaaggatgaaatcggttcgctttagagtactcatctgacacgtgtattaatatatcgacatgtggtttggatagagtcaaactgtagtttcttcttctgtgaaagactctctgttggcctatttgggcctaaatcgtttctgtaatcgcggggcttttctttaagtcttgactaccttgtttaatacaatatttctcttgagacaaaaaaaaaaattacataaacattaatatctaccatttatatacattattatgtttttagattgcaacagcttattaagcttttctgtccatagatttgtctctctgctctgcatgtataaaaatgtgcatgttacttaattcttgttatttttacaatgatgattaatatttaagatcaagagggtccatatgaaaatgagtgacaactaagatgacgttcacgttctcttggtcctcgcatatagcctaggagctatggaccaactcttgcttcacctcttccataacgtaggacccttctccaattttacaacacttgccttcttttgtcttttactatctaatacaacaaaaacagaattgatttggttttgtcgtcacaagcacattttccaaattctgaccaacaggatatatcatacttgtagctcaagattatcaaagtattaacatctttgaaatttcctttgactcgtgaaacaaatacattagaccattgtaagggtttgattagaggtcatatgaatatagtaacaatgttatataattaaatactaaatcttggatgccaatggttaattttggacatagcactataagtaaggacgatttattgagttataaaagcttgcaataataaatat

SEQ ID NO: 8861 - DNA, 2259 bp, Arabidopsis thaliana landsberg
  unsure (1)..(2259): unsure at all n locations
attggcttcttggaatagacttttcaagattaataatgcagccaggatagaaaacgaccttagacttgactgaagaagacttttaccttatagaatagcgactagtttcagacaaagatattgaaaatttcacaacatatggctacagggctttctatgacatctttttgttacataatatgagacttttgatgacatatccatggatatacaaaatcagagcttgtgcagaattagatgagctccgaattggggacgagtggtcatgactgtttgaggcgcgtgaacataagaaggagagagctcgaaggagaacttttgtagaatcaaagccattgccatctttgcctccaacatagcaaaattctgaccgatgcaaatccttggtccccatccaaaggggaagaaagagacctggttctttgttgcctttgagagcccgtctctgaaccgctcgggtttaaaatccgctgcatcatcgccccaaagctcggtgtcacgctggacaagaatagttggtaagtaaatttgaattccagctggaagggtcaactctccgagcttcatttctttgttgacaactcgtttaagctgagccaccggagggtatagcctcaaaacctcattgaagatcatagtcatctgttgaaaaaacattcaaagacaacctttcagttgaaatttaactgactttgttaactataaacgcagtttttagatggacgagaatggtgaaagttgtgttttcttcacttacgactttaaggttgttaagggactccatatcaggtttattattttcaccgagtacttgcatcacttcctctcgtgcgcgagcttgccagtcttggtgatggcttaataaaaccatagtccacaccaaaagtactgaagttgtctcttgtcccgcgaaataaaacaacttgcactctttcatcactttttctacgctcattccatttccttgagattcctctgaattggattcaagcaatatccccaacaaatcatcgtttgctggttctccagcttctctcgctttctcccgtttgctcacaatacctctcaatattacgtctacttctctatctattgctttcatccttctattgctctttgttgggtaaaacctacaccaaacaacaaattctcaaaatctttagtttgcaacagaacaaagagacaatggagatcgtggttttacctcgatccagggatgtaagatttcttaaaagcnnnnnnnnnnnnnnnnnnnnattccccttgtagttgaaatattctctgcccttctttatagctacttccaaaagcagtatgtgagatgacatccgcagtcatattcacaagccaaggccaaacatcgacttcaagaggcgattctttatctgtaaatagcttctcccattgacagacaacctcgctgcaacaatggtagaacgcagggatcatgttctgtaaaccaaacataaggttactaaacgatcacacacacatatgcacagtctaacgtaattcgggcaacagaaaaaaaccaaaaccttgattttgtcgaggtgaaaagccgggttgatgatcctcctgtgactcgcccatttatctcccttgtaacttgcaagcccacctgctaacaatctgatcaaagggaatgtagaagctttctcaaagtcgttgactttattaaagacttccttgatctgctcaggattcgttatcacaatcgttggaagtggtccaatccatatgaagaaagtctttcctgttccaccaacataactcaatcaagcaccaacaattcaacctaacagagatctcaagtcaaactaaattctacacaattcacttcccaactctgctgaaacaaagaaagaaaagacactataccgtgagaattgagcatctttaaggcaagaggaaggagacgtggggtgatatcatccgttacattgatgggtttagatctcgcttccatcatcatatcaacattcctctttatatctccgacgagaggagtgtaaggagttccggtaagaccctgtcttttcaaagaactctcaagcatctttggttttatccagacccacttcacgatccgccatgtccacagtaccactactgctacaagcaccggtaaagctgctactactgaaaaagacatctccgattctcacactcactctggagtccgcaggtttttgtgggtctttataaagattgagacttttggctgtcactggagttttgattatacaaagtacactc

SEQ ID NO: 8862 - DNA, 328 bp, Arabidopsis thaliana landsberg
tgtttttgagtcagagaactcagaaactgtgagagatcgatagagaaagtgaacttttcgaagcggcccaatagcccatacccaaacaaaaaatattaaagaaatactaagatttttttttttttgtcccaagagaaatattgtattaatcaagatagtcaaagcttaaagaaaagcccgcgattacagaaacgatttaggaccaaataggccaacagagagtctttcatagaagaagaaactatagtttgactctatcccaaaccacatgtcgatatattaatatacgtgtcagatgagtactctaaagcgaaccgacttcattttc

SEQ ID NO: 8863 - DNA, 1805 bp, Arabidopsis thaliana landsberg
tccggagaagtttgcaactgaatggctaagtcaaatttaagatagacaattctatgttaaccctctctaattagcttggtgtgtgttgctttgcaggatcataaattggaggatgaatgaaagaattggaagattcaatgccatttcccttttgtaattccatttctactacaattgaaagtgaatgattatggttgtaacttgattattcattctggatatttatgtgttcatgtagtggaaaaagtttcaattttcaagctcaggtccatcctcaacatagtatagatattcttaagagttgatccgagatactctgtacttgctatgatcagcagttcaccactggttgcttagttctaacttctaaatgcgttgacgcgaaccggaagttatgaaccgggaaaatcgtgtttgaattttgacttgaaccggatcgtttaaatataaagagataaccaaataatgtgacggttttttgttaaccgtaaaccgaaattgggagccacgcaaaattagggtctcctgcttcttcttctctgacatcgtcatttgacatcggaagaattttcagtgccgagaaaggaaaacataatggcggcaatcagaacgatgacgaacatgattcttcgcgagtttatccatcatccacttctccttcactcttcatcgaaatcgtgtcaatctcttttaccatgtctccgtctcactcccctaatttctccaattccctctaattcccgattcggatccgtccgatgtgcggcgtctacctccggtggaagcggtggtgatcggaaagtctcttcacggttgtcgcaggtgcaacagatgcttcatgaagccgaagagagagctagttccgctggcaatgagcctactcctcaaatcactctaggcaagcttttgctttcatccatttggaaacaaactgagtttagttttaaggaataggttatggagaattctactttatgatgactcttgaactttctagagaactgagtttaagttatttgagccaatgatcatctgtttacatgaatctcaaatcaaattcgctaatcactgtatagtctgtattgtatatacataaatctcaaattcaatcactttgtatgattcaaatctcattttcaggaagggaaggtttgaattttgtagtagattgatgaataacgtatatatcgacttgaatgtggtcatagtttcatgtgtatctgtttttggtatttgcagacaatgttacactgaactttgctagaagtggtggtcctggaggccagaatgttaacaaatgtgtgaccttgttcttgtgcctttacctttcttttcattgtagtttttagttacttgatgtttcagtgcttttacttttcccttgcagtgaataccaaagtagatatgcgcttcaatgtgagaaacgcgtactggctgagtgacaggatcagagagaaaatcttgctgacggttttttttttttaactctatcttccctctacgaaactatgattgcgagttttatctctatcgtgttcagagtagagataattgtgaaaatgttgtttgatatttgaatcttgttgatctggtaggggccaaaatatagaacaatggagtatttatcgttttgtttctatgcgttgtgtatttagctttttgttgtttgtcaacaggagaagaatcggatcaacaaggacggtgaacttgtgatatcttcaacgaaaaccagaacgcagaagtaagtaacctaagaaacttctctttcatataccattttcaagaacttctccgttaatgacaga

SEQ ID NO: 8864 - DNA, 1249 bp, Arabidopsis thaliana landsberg
gaataagaacgaaatgataatgagaattttcaatgtaataatttttttctgttttgtttttgcctttcatacttttgttttgtttaataatgtaatttacatgaagcctcctccattagcagcatacagaattagttacgtgcatcattgttaggttaccattgccaccggtagaaactagaaagcaatgataaactaggactacattatttgacttatgtcttcggccaaagaattatcttccacacaattgtttcggtaggattatcttccacacaaaatttcggtagattttttcggaatattccgcaaattgagaagatgatttatcgaaggttgctgaatctttttgtccttttctactgtgtgatcacgttctatctaatacatgattcaaatcatattacttagtactaagaaaaaatactttctttatttgttttttctttctattttgttaaacacatttctttagttttgtacatattcacaagtgtttggtatttctcctatatttttcaacaatagttttcctatctatgacttttcaaatttgccacgtattttcttgtaagaaaaatctaggtaaatatttacgtatacatgtatattacaaatttactcatcgccatctgttaataaattgcatatatctttgattttaagcatcactatctgagtctttatctcgagcttatcctcactgacggcaataaacggcaataagttattttgtcttaatgtttctctatatcaaaaaaagcagagcacaaaccagaggaacgacaataatggtgagtcttctatcttttttcttgcttctactcgtccctattttcttctcgttaatcttcaccaagaagatcaaggagtcaaaacaaaatcttcctcctggcccagcaaagcttccgatcatcggaaacctacaccagctccaagggttgcttcataaatgtcttcacgatctctccaagaaacacggacctgtgatgcatctccgtctagggtttgtcccaatggtcgtaatttcatcaagtgaagcagctgaagaagctcttaaaacacatgaccttgagtgttgttcaagacctatcactatggcctcaagggttttttcgcgtaacggtaaagacatcggatttggggtatacggtgatgaatggagagagctgcgtaagctttcggttcgcgaattctttagcgtgaaaaaagttcaatccttcaagtatattagagaggaagagaatga

SEQ ID NO: 8865 - DNA, 5240 bp, Arabidopsis thaliana landsberg
gtgccatccacctatccgggtcgttcccgggagatgcattctacattgagactcgcatcaaaaccgctcttgaattgtcttgtcccggggtggtgtcctgcgcagacatcctggctcaggccacacgtgaccttgtcacaatggctggtgggcctttctatgaagtcaaactgggccgtaaagatggttttgagtcaaaagcccataaagtcaaaggaaatttacctttagcgaaccaatccgtccccgacatgttatcgatattcaagaagaatggtttcactctaaaggagctggttgcgttaagtggcgggcacacaatcggattctcacactgcaaagaattcagcaaccggatattcccgaaggttgatccagaactcaacgcgaaattcgcaggagttcttaaagatctatgcaagaatttcgaaaccaataagacgatggcagcgtttctcgatcccgtgacaccgggaaaattcgataatatgtatttcaagaacttgaaacgaggtcttggactgttagcttccgaccatatattgtttaaagatcctagcacgagaccgtttgtagaattatatgcgaataatcagacggctttcttcgaggattttgcacgtgccatggagaaactaggcacggttggtgttaaaggcgaaaaagatggagaagtgagacgtagatgtgatcacttcaacaagcttaacgtataagtagcataaacagaagaacatcattgacttcgatcggttttctttgtattttttttttaataaatgtatttataaataagtaagttaatgtaacaattttgagtgcctaaaatttacaaataatctttgttatatagagagcattagatcttactttatggaggagaatacaaattcaagttcttgagttatttccccatcatcttcttctttaaaacaagtgtctcctttttaagtgttgttggccaaacttcgacgaataaagtccaaattgattattaaaacggctcaacttgtgataaggccttttcgccggtaagtatttttcttcatttgccaccataagattatgatatttgcgttgtagctagaaatagcctccgatatttttactgttcaaatatacttttttgctatattcatctaaagtatttttgatttgaccaatctaaaattttagtaaaatatactatatttaagtaagattatgtaattactacgtattttcattatcatcatcgtatgcttcatgtgtctaaagctcttgttaaggttaccaataaaaagaatcttcgtatggttggttagttttcttaacatttggaattatggatagattgtaatgtatttcgttttattctcttttttgtctttactcaaaatgaataattagaagaaaaaattagtgaaagtcttcgtcgggtcaacgtcacaattgtcagacacgtgtcagagaaccatgtgttaagaagtaaagcagtccgatttagacacgtggatgagtcatagctttgcatcgctgtaatgatgaccaaataattttattcccattcaagacaagaacaagcatctcaaatttatgacccaaaaaaaaaagcatctcaattttacagtacaaaaggaaaaatgaataaaggaagaaataaacgtcatttcatatatattttttcaaaagcataaacttttaagtttgagatttatataatttttaacagataatatgtatttttagtatatataagaaaattagggagagaggtttggtgtagctaaagtgaaatcaagattgggagtttcagtctctggtcttgtccctgtaaggcttgacgaatctgacgacaaccgttcgttgcttggacatcttcgattcttccattcattctgacatcattttagaataaaagattatatattataagaatcatctcatataacatttcatatatagactgtgtctttattttcagtttgctttctatttcaaaatttccaattaaactattttgaagatttaaagacaatcaaatctagtgaattgggttctgaaaataaagtatcatagatatcaactctccaaaacaaagtctttaatttctctgcttttgagacaaaatcaaaagaagaaaaacacttttttacccaaatggaagagaaaaaaagtaacttataatcctttataaaaacttttttttcttttttttcagcctcgaattttgcaagtcccgttttattccaatgcccttttggttaaatttttgaaatctgttacctcattggatgaaatgtctacacctgatgatgcctttgccttcaactggaaccgagcttcactgtttatacagattcaaattatatcacattgattttttgaaggaacaaaaaagaataatataatgctaatgattttggactcaactaacataatattatatatattaagtttctcatatgatgcaaatatagaaagttgcctaataagtatatacatatctgtccaacaaatactaaattctacttaggcaaatattaaaacataacataccttgaggagttattccatagacccgtgagatttcttgcttctctctcactgtttacttgtgatccattctcacaatctgactgccctatacacacacgtttatcagatgtatagtatttaacagataatttaattaaatcaaatacataatcaatcaaataacctgatgacgttgtaggtttttcagtagacttgatggttcgatacatctgaaacattatagattagattactaatattatatataagtgctagttataagaataattaatagttatatcgatcaatacatacacatgaattatatataatgtgtgtgtgatgttcgtgtgtttagacttgttccattcaggcattcacgtgtgtgtatataaggctataacctagatatgcacgcacacagagacagagatggataaagtaagaaaaaaagagatcaaagtaaaacagaaagcatttacgattcatgaaaatgtgcagccatacacagagatgggagatgtgcatgggtctacgtgccttattctgactatagtcaaattatgcaaaacagcaacttatatatttgttatcattgaagaatcatgcatatacatatatgtgtgcatatcaatctaaatatcatcattgaagaatgatgtctcctttgtacttttacttttctactgcatctctagtaataaaaggactctttctcttactctttgtctatatcttgcttttgattccttctctttttatcttttttctttcttcactttgtatataatttcttaatatatatatatatatatatatatatatatatatatatatgggggcgaccaaaagtttaaccatgtccaaattaatcacattttttcttttagccatttcataaaaaagtgcagtgggtttggttcatttgcatattcaaatccataatacaataaattcatttatttacctatacattatgtacctgtaacttaagaagattacctgtagatgggatttaacatgagccaatgtgagatcttgcacatccatcagctcaagtactgattttggggttgctcctggatattaatcataattactaagtcaataaaattagaatttttgatcaagcctattcattattctttttgttaaaaatgaaaaagagatataaattcaattaaataaaaaggggtaatagtgaaaaaggacaatactttcatgaccacccaataattgaacagcgtgtacaaaatgggcgtggagggtcgtcgtccaccgcatccttggagcccttactcctcttttggcggtgaatcttggcggctgcggttgagcttgacgccgatgacggttgtggagattaaaactacaattagggtttgtgattaagcgacgactagcatgttgaccgttgacttcactgaagaagaaaggattgggagaggtagatgagtagtagtagtggtcaaggacttgattctggtaaagagggattcctcttattggtctcatcataaaaatagatctcaagtcttgatcgagagattccttgtgttcttgattactattaatcttggtggcttcattgtttgaagtgaactggagagtgtggatgagattatttgaagacttgttgtctaaatctgaggctttactctgaaaccctaatctcctttcgacttcttgttcttgtagttcttgactttctttttcttgttcttcttctcttcttcggctgatcttcaagtacaagtcaggttgtgaagggaaaagctccataagaagagagaattggtgaatgattttgagataattttgatgaattttatgggaaaaaggaggggtataatgttatttatttcaaaaagttttttttttcttcttcttaacttaatgaatttttgttcttggtgagaagagaaaagcagttgtaaagaattagagagagaaaaatagggatggcaaaaggtatgagggaaatgagaagtctctttcttctctgttccctttgagaaaatgacactttaagagtctaataaaggggttgggtgaaacatgaatttccatttaatttttcctttcccttttcttcatatgtaaaggaaaataccaatttatatggcatattttgttacaatgtagatatcatctatcacatatcagtatttaatgatggtataataaaacaataatgtatggaattattcgattatttgtgttcagatttacatgtgaaaatgacacttgtgttgaaactgaaagatgcgtgtgtgtatatgttttttttcctgataatatcattgtagaaaatttaaaataagaatcaaaggctgatattttcttaaaaaacaaaaaaggaacaaccatagctacttgtttagttgttgataaaatgctactatatataaaaaatacacctgcatgaaatttaagagatgaagatacattaaaaccaaaacttaagtctcgtcgtcacttgttgtttgtcttgtttattggtttaattctttgtcttccttgaaatcggagtttggaattataccgaacattacgaacttggtggctcggtgcctaagaataaattgaatatgatattgcgtctaattaatacctgaaaaagcttttctttttccttctatatattgtttgtggagaaagtgattttgtttacgtgataagataaaatttaaggaaaataagaaatgggaaaagaataatat

SEQ ID NO: 8866 - DNA, 548 bp, Arabidopsis thaliana landsberg
ctaacgagcagtaacactgtttcgctttttactttcaatagacaaactttcttaagcacattgttgaatctaaagtcttatatgcgttagttggttactggactgggcttatacttgctactgctcgaatctgcaagaatctaatcgaagatactgcaggattgtaataccaaagataacatttttaaggagaactaaaatgatgacctcatgtgttaaagtagaagatgataaagagcgtaatgacgatattacaggagatcacaaatctggattacttgtaccaaagagcaatgattcgctttttctttcaatacacaaaatgtctcaaagcacatcgtagattctaaagacttcaattccacttagagttgcaaaggtttcacagctttgaaattcagatctctcccaagtagatatttttatcactactgcaagagccaatgataggctacggtgggtggaaaacacacttattgacagaaccggtgtggcctgagagcttatatatagtgcgccgactggttgagacccagatatgaaccata

SEQ ID NO: 8867 - DNA, 2726 bp, Arabidopsis thaliana landsberg
ttataattaaaggattagggttcgagtgccattgtgactttgatcatggttggtcattaactcattatgaacaccttaaaataagaataccatcatttcataggttctagagattagtctaaattacaattcgggattttagttatcaaaagataaatagatttaattaaattttaagttgtattcgaaaattcaaaagcaacacacaataagatttatctacaacgtacatatatattttgaacattgtctaattacaaattaagaataatataaaaaacttcaaacgtattttccctctaaacctaacggcttttaaaaccaatccacaaactaaaattaactaaagaagaataaactcaaaaaatatatgtagcggttttgtttcatagtccaatataggttttaatttgtaagaaacatacttttgggtttttgataatgcttttgccccctccacttgacgactatatagtatatactaaactctctatctttgtccctctttcacctctactatacaatataaagctcacaagaactcttccatttcttaagccttttaactagaaaaaaaactcttccatttcttgcacttttttatattttggtcggactcactaagagcagaaacaaatcaatggcaccggaggagaatggcacgtgtgagccgtgcaagacttttgggcaaaagtgcagccatgtcgtgaagaaacaaagagccaagttttacattcttcgccgttgtatcgccatgttagtttgctggcacgaccagaaccacgaccgcaaagactcttgattactttcttcttattggattgttatcttcatattttaaaaataatttatctacatattaatgtgcatacgtatattagagaagattgaaaattgtgtgtttgttttgtttgttgaaatgggtagcttttggctacgttttagttgtagtgcgtttttactattttgtcaggattatataaatatggtaattaattactgcacctagtttaaaaagattctgagtcgtgaccaaatctaaacttgagtaccgagtacgacactatctcttagagtaaaacaatattaacacattagccaacttttgcaaggtaacccttgaactatgaaaaatataaataaccttccatgaaaatgtaaaacaaccctcgtaatataaccctcagaggatataacaccgtgtatatattctatttttaaacaaaataatgtttaatgtttaatgtgagaagagagaacttgacaatcaattttttgtatatgttactgatgaaatgattgtatatccaaagaacacaataaaaataaaaaaaaagtactgccaccaccaaatcatcaataccacatgcttgtggtggctgcagcgacgatcgtggcattggtgactggaatttgttatcataatcagccagcttgaaccctgaagtcatggaaacatatgaaaacgtggtaaatttatggccttatgtattttcaaaattttcccttttgttaattaagaaacttgagagttatataaatgtgtctatggtaaatcaggataaaaatagacactgtctagtattctatagatagaaatctttctctgcttcagaatataacatatcgaagtcatcatcagattcggagtcataaactccatctcttcttgtccttttttacatctctagatacgcatataactttgtcttctacatatacataaataatttatatagtttatgtataccttgtctgtttttgttgttcaaatttttgaactacatctctcattactatctcttaacgtttctaatgattatagcatcatcttttaatgctaactttaacttctagaattattttatcaccaatcaactctacaaattccatggcatggctacaaattacgaatatatgtagaacataaattccaaccacagagataaagataatggagtaactctgacgcaagaagataaatagttggagaataatgatggaaaataattatgagaaagtatagtacgatctaaagaggccatgtgatctagtcaaattcgtaccaatttatgcgatctaaattttgactagtaggtcagagatgagtaattatttgtttctaattggatctcacactgcttgtttgaaaccacgaatttttttcacacaaatatagtataaatctatatttattttcttttgtcaataatgttgagtttgattctcaattcttgtggacctttcacactagaaagtagaaatatatattgatgtttcgttctactatgtttctagtcattgtcaaaaaaattaagaggaatcactaatgagtttatcaaacagaatcaacataatgacattcaaaataatagatggaaaattatatgaaacttagattcaaaaccttcttttactatgtgtaaatggagcatttgaacatgactatataaacaaaaaaaacttaagaaacttttgattctatatattaaagggattattattgtcttttcaacaaaaaaaaatgtacatggcttttttatagtatgagacttctgtatcaagttattttgacctaaacaacatgaaccagtgtccaagtaaaaactaaaagattttaagctaattcatttgcttattaccaatacacattatacaaaagtgaatgtgtgtgaacgttgtttgttggggatctgcttcatatttttcattggctatatcactaa

SEQ ID NO: 8868 - DNA, 564 bp, Arabidopsis thaliana landsberg
gttaccatcaaattgtcgattattgcatagtcttagatgcttgtaggagggttacttaaattcccatttcgattaatgaagatggagttttcttattcttgttctgcactatcttaacaaagacataaacatctgtgtgatgaagacctgacaatttacagtttttttaatataatgggagtagaaaaatgatcttaaaccaatgttacaggcgtcctactacactgcaagatagaacaagggatagtgacgaagaagacagggactacgatgttgcagctttggcgaacaatttgaaccaagcatttaattacagaatctatggaaatgaggataatgaagaggtattttactgcttatagttgttcttgaaattatgaaacggcttattcgacaccagtttaatccttgtcttatctggcttcaggatcagaatgctctcaatgctctcgatagagacgatagtgtaagtcctgctcacttcttctctcttctttgtatatcgaagaaactatttatttcgggtttcatattttatgaaaagatgtaagcctgaaactattt

SEQ ID NO: 8869 - DNA, 706 bp, Arabidopsis thaliana landsberg
tagatccatggaatgttgaactctcagaagcataagtatctcgaagtgttctccagaggataaacaaatatgttttttacttactgcaatataaatgacacctgccccaccgaagtatgactagaaaagctcagcatctaaagttgcactcatcaaaatcagcttaagctctgagcgacgagatagcagatccttaagaatgataagaaggaaatctaaaatacaaaagtaatatagtaagacacctaaatcaagttaagctaaaaatgaggagctgcttgatagcaaaagtatacataccttcattcattccacgctcatgaatttcatccacgataacatgagtaactcctcttaaatttctatctaccaacaagcgtctcaacaaaatgcctgtggtgcagaagagtaagcgggtatctcttcctttaacaccttccaatcgaactttatatccaaccttcacaaaaaagtaagaaaaaagcaagagagcttaatcagtaaaaaagtgaggaattcaaagtataagaagggtccacgctaactagatataggagcatgcagggtgaaactcacagattcacccaactgctctcctctctcgtaagcaaccctctccgaaacagacatagcagatattctccttggttgagtacatatgatactgcaaaaagctccacggtttgcttcaatctcggattctaaa

SEQ ID NO: 8870 - DNA, 537 bp, Arabidopsis thaliana landsberg
gacaggatcagcttgctgcctcgaaggtgatttgattctgcgttcttaatcaatgagagtaaacttttgtttagatcatggtatgacctgtgtcttgttttcattaggtgtcacaagatgatgtcatgaagcaaaaagatgaattggtgaatgaaattgtaagtctcaaggttgagattcaacaggtcaaagatgaccgtgaccgccatataacggaaattgaaactctgcaagcagaagcaaccaagcaaaatgacttcaaagacaccataaatgagcttgaggtttattttcattcttgatgcactcctgtgttttcttcttaaaaatctccatagagattttttgtttcttaagatagtgttatcgttttgtccagagtaagtgttctgttcaaaataaggagatagaagagttgcaggatcaattagtagcttctgagagaaaactgcaggtctcatcacattcttgagttttacatatagaaacgaaaatgtatatgaaaatctccaaattcttgtcgcttatttattatga

SEQ ID NO: 8871 - DNA, 2200 bp, Arabidopsis thaliana landsberg
gatccatatgaaacagaaccaaaaggaaactttgcacattccaagaacgaactttgtctgaaaaattctccttattttgttttgcagcaacctatggttagagtaaaaaagtccaactgttccccccaaaacctaatatttcttcaagagcaaacaatttttttgatagaaacttaccatagaaaagctatccctgatgaacggatcaacagtccatttactggtttcctgaaatcgatcaacttccaggtaaaaacaaagaacgaatcttcctctaaacaaaaagatcaattatttcatcagcaacatgaatctgtatatgctggatgcagaaaaataccaaatttctggtaagagggcctgcgcagtgatggcatctgatttcaatatcatgcccagaatccgtcattttctttgcaagaagaagaagagctcgagaaacccaaaccagactttttgttttgttttgtttcgtctcttttgtttttgggtcgtagggtttatactctgttactgtttccttcttcctctgttcgacaacaaagagagtccaccgatcgatcacttacggtttagaccattttagctccgtaaaccgagtcggtccaacccgtgaagaaaataatcagaatatttggaccggtcacagaaccggttcctgacctccatctatttttagcttaaaaggtggatgtttttgcttatccaaagttttatctacggaagaatcttacttctccatgttttccaaagggtttcaaacaacttttgaaataaatgtttaaaacgaatcttaaagaaagtaaacgaaccaagagaatgcataaaactgaaaagaagaaaaacaagaatggatactactaccaactacttgcaactagacaatcaactctttataatgatccgacttgtcgaataatttagccagcatttgcgtttgcgtccagtcgcagtgccctcgattttttatagtttcataatattcaaaccaatataacaaaactgctacatgattcggttggatgcagacaacactgccttgtggtgaacacaaaactcctacaatgattctcctaatcttttgttgtgcttataagaatcacaattcattaaaatatccacaaaaatcgagactaagtaaaaggggaaagaaatagacccgaatagtctctttttttttttgggttcgggttgtgatgaacaaaaaagattcttgagttgagaatgcgactcaccaagctttctttagttttggattctcatattctcattctctagaatctcatgaacgaacccacttattactctccattttctctccaaacgaatataattccgcggtcatttcccgcttcctcctgttttatgtatccaatcctctctcattcaatcaagcgaatcacaatcccacgtgttgaattatgctccctatggaagatcaaacactgattaaagttagtaaacaagaacaagaatctgtcaaagggaaatgaacgtacaaggaagaacattttgtctgtatcactcttttctttcactgaagaaggggaaagactacataattaagcacaaactagtataacaattgtgaccaagataacatatcgtttaagctctagttctgaagaaaaacacagtagtccaaaatctggaacagaacctgctacaaaaagcatacacaaaatttgatcttttctgaaactacatttgatatagaacagaggattatctatctgataaaagagaagccaatcaaaagagttcaacataaattgtttgcttcgtctaatttacttttgatggtatacaaatagagttttcaaacttgcagcacacaatatgaagcctctctttgtggaagcatattcccactcacatgccaatcaactatttaggcaatatgctcaaatacttttaactgaaggttatgaaaaaggttcttcaccaaacagaataaagtgttaatgagaaatcagaaccatgagatttcaccaaaaaaatattgaaaaatgcaaagatatcattcaaggaacataagatttgtttttttgacattttcctttcaaacaatagaccatatttctacctagtttttttttttaaggcacctatcaaactcatttagatttgtggagactctttacctgatagtggatatattcttctattgccccatagagaaagcccataattttcagcc

SEQ ID NO: 8872 - DNA, 1692 bp, Arabidopsis thaliana landsberg
taaatccaggaacacccatctccctcatctttggagattgcttcattttttataatacaccaatcaaaactctgaaacagcgaaaccctaaagttccttctcaccattattacaaaacaataattctgagtgataaaattggtttaagagcccaatgcaaaacaaactgatgcaaaaatattcaacaaacgaatattttggattatccttaaatttaagacttttgatttgtttgaatttcgccgacgaggtttctgggaaatcgtaggacaaaaaagtcccccaaccaattaatttgtctcccccaccgaatgtacacgtggcaccttgtctgatttttcgtcagctctacgataaccaaaaaaagacaacatttgtagctgttattatttattgggcctgttaatgggccttataaagaattatgaaagcttctgtgtcaagaagaaggttactttaaatctgtatcaatatcagctccacgacggcgattcgtcgttgtcctccgaaccaagcaaactccgatccctcaccgtggctccggatattttacggcggttgttcccggctcggactcgaagaattggccggattctccctttgaccaggctggagatgaaccttttccggttctgctccggtctgaaagtcctcggctatttcatgatccttcttgtcgtcgccgtcgttggtgtatcttactacgccgtcgtagttagcacatggtggccgatcttgatccgcggagaccatggagctttatccgccctcgctgccttaatcatctttgttttccatttcctggtaatttccaagtctcataatttcagattaggttttgtttctggaattgtaagtctaggttttctgctacttaacctctaaaccttaaacttagggatgtggcatgaaacttatgtagccaagagaatgagaaatgcaatgtagttatgaagcatgaagcagtgtagatacataatcattgtttagaccattgattgttagtaaatgtttaggctccctgagtttaggtttacaattatacttctgatttgcttggttctttgcagctgataatgctgttgtggagctacttcacaacagtttttacagacccaggttctgttcctgagcatttcagaagagaaatgggaggtggtgacagtttggaggctggtacttcgacagatcaaggagcttttggctctttaggttactgtaccaaatgccggaatgttaagccgcctcgttgccatcattgttctgtgtgtaaggcgaaatctgatttgtttatactatgttctgcttgtgtttctactgatagagaaagaaagctttattcggttctttgtttccttatgtaggtcaaagatgtgttcttaagatggatcatcattgtgtttggattgtaaactgtgttggagcacgcaattacaagtttttccttctctttctggtaaatattcatttccattgtagtctcttatggttcttaaaaggtttaagcgagcattgggattatgtgatttgctgatttcttcaccctctttttttaatttgtagttctatacttttcttgagacaatgttggatgttattgtcttgcttcctagtttcattgaattcttcagccaagctataaagcattcttcttctccgggtaaactggcctctctcgttctggcattcggt

SEQ ID NO: 8873 - DNA, 594 bp, Arabidopsis thaliana landsberg
catgtcttgtgttcctttttagctggccaagtcttctgtgatggtccgtctctgtttattttacagtcttgatttttttttctcctttttcaggagtaacaatttggcttctcgccgttatttacttcatatcgggtgttccaggaggctatgtgttatggtatcggcctctctaccgtgccttcaggttcttatttttcatccctagacactaattttgtgtaggaaagtgttcgtagtatttttatttttccatatatccatattcaaagtttctctttgtgttgacttcctgcagaagtgatagtgcattcaactttggatggtttttcttgttctacatggtgaatccctagttttttgctggttttagtggcactgtggcagatcttctgcatagtttataacagacttgcctaaaattcatctgctttctgtttctggctacagctccacatacttttctgcctctttgctgcagttgcttctcctattgtcttcaaaggaaaatcacttgcgtaagtttcctcacaagctttaagacatcgtctaaggtggtacacaattaatggtcaagtgtctgatgatcttgaa

SEQ ID NO: 8874 - DNA, 1441 bp, Arabidopsis thaliana landsberg
agaatgctttagattatcacattgcgctattgctgtctctagttgtgatttaaaatggtaatgactgcttctttttcttctttgattcgctgcaactcccactatatagatgctgccgtttccatacttgattttctcatctcttccaattcaagtctcaagatctcagacctcatccttcatccttgtgatctcctgtgttaaatctgcattaacatcttctttttgcctcttttgattctctagatccactaacattctctccatctctttcgttttatgatctgtctttcccgagagctcgttgagctttgtttcatacttgaccctatttactcgaatttcatcgttagcgttcatgagaagttcttctagctgacgcttctgcatgcggagttcgcgggtttcggccattgctttcattgtcaccttctcatttgctgctaacgttgaagacatctgctcagagattctcttgaactcgtcctgtattttgccggctacacttgcgtttttccacctcgtcttcctcaaggcttcttcggcttcgatagctctttgctcttgctccactttagcacgtgtgacagcttcaatatctccctcaaagatgtgagcttgtttctctaattcttcttccattccctcgatctgtgtttcaagttctttaatgcggcacagggactcagaaaattcttcgtgctgcttcttgagcttagcttctaggctctctacatagttttcaagctcatttacgtttacaagagaagaggaacattcatattgcatcttcaactgttcttgcacttggctttgctctagcttgtatgagatatcgtgattttcctgcttaagtatctcataatccagagaaagctgctccacctgtatctcaagatcctctttgtctcgtttatagatctctatctcattgtagagatcagtgatccttcgctccaggacatgtgcttcttttgcatccatgtgtcccttcacaagttcatctagtgccttttgatcctcatcgtcatctgtctcacttgtgcaggacattctccttgattcttcggtgttcctctcgcaggttcttggtctaggatgatcaactgtttttttagttctttgcccctccattgcttctagatcttgcacagcaaggatcaactcagtgtttgattcttgtgtcttctgaagctgtaaccgtagattcgaattcagatccttctcataatccagttcttctcgggtttcttctaaaagaacatgtggatcccttccttcaagctgcaacttgttcctaatttttgcctcttcctttcgcttgtcagatgctttattactctcattatctgccttcagcaagtccctctcctgcttcaggctagttacttccctcaggagatcctgacttcttttggtctctttaacaaattgtttccgc

SEQ ID NO: 8875 - DNA, 1215 bp, Arabidopsis thaliana landsberg
aagacttggaaatttaccattttgacaaaaaacttgctagaaaataactaaaataaaagtaaatcattcttctaatttttttcaatttatcaactttaaaagtatatttccttttcttcataaatctcataaactagcaaaaagataatgtcataaactaatactataaaatatatattttgttttttttgttccgtcaaatatatatttttggttttgcctgtattcttgttgacttccgtttttttttttcccccttttttttaattaacttcctttctttgcttttccatttcttcttgattgaaaaatgtatattgtgtgattttgtctactttatttaaattatctttgaaatcgaagaatttctgctctattaaaaattcaaactatagtctacgttggtatttgtttatttcattttatactctgcttatttttctgatactacattacaactaccactcaaaactacaattaattccctaaaaatatttttcgtttccaaaatttgttttgtgtgaacgattccgaactccacaattgatataaaaaattatctttgagttatattatcaacaacagaaaaaagaaagaaaacaaatacaacgcaagccttgaaataaagtctcatagatatttggctttttttaagtgcaacacaaacaaagcctttcaagacgatgagcaacaaggcttcttagcgtttgattcagaagtagcagccacatcaattgtttggccttccttgatgttggcatttgcagttgtctggtctgaagatatcgacttcttgctgatgatcctataaacctccgagagaatcgtctgaaaagccttttctacgtttaatgcctcgagagccgatgtctcgatgaaagataagccttctttctctgcatagctctgagcatcctctgtggcaactgctctgagatgcttcagatctgtcttgttcccaatcaacatgatcactatattggaatctgcatggtctcttagttcttttaaccacctgcttacattctcaaacgttgttggcttggtgacatcatagaccaaaagagctccaagtgcacctctgtaataggcgctagttatggctctgtatcgttcttgcccagcccgtgtcccatatctgagctttcacagtccttccttccaccttagaacaaagatcataggttttttaataggttaattcagatctaatga

SEQ ID NO: 8876 - DNA, 1129 bp, Arabidopsis thaliana landsberg
taagcttgaaccaaaatgttcaaagaaaccaaaaggctgtataaatctcaagtaactctgtggatatcatcactaaagagacaacagtcttggaaacaaatccattgtcaagtctatcgatgatatttctactggttgtggctaaataaagctggttgcttagtgcattttcttatacttcggtagttttggcctttcatataatatggtctttgcaaagtttcagtctgaaggaaaaagttcatcttcgcatacaaaccccacagaacatttaagcagagatgtgacaacagttccaagattctccaactcatattctcacatctctctaatcctacatcctattaattacatccgcaaaccactagacacatcgagaacatccgaagaaacatatgtagcactaaaacagaagagcttcaaaagaggtaactgaagctaaagctcagctgcgtatacctgtccagcagcattcttaacgaatgtaacttcggtagaaaaatggaaattctccaatatcctcccacataaattacatgccctgtaaaaatcaaaaacgatgatatttcataattcgaagcttggaaaccacaaatccaacagaaactgagctcctaaagagcaaaccataagataacaaaacatcagtgaataatcaaaaacacttacaatgcaccatcataagggcgtattccgggaacattcttcacgcaatggttacaccataccataactccttcactcaaaaagctcctaccttagcttctaatatcgatccgaaactcagattcgaggcttgaatcgattcgaaacaacagcttccaatcttactgctcaatagaaagaagatcagactatttatagcgaaagtaactgttttcacacaatcgtgcgaggaagtggaaagaatcagggtttgatgagattatctagttcactgtaattgtatctatataacaataccggagttggccgtgacggcgacgacggtgttgaaggcgaagctgagagacgtgacgagagatttctccgatatgtgagactgccttgattcgaactctgtccctttagggattgcaaagtaattgtgacgttcgctttggttttgttcttcggttcaccgccattc

SEQ ID NO: 8877 - DNA, 1998 bp, Arabidopsis thaliana landsberg
  unsure (1)..(1998): unsure at all n locations
aattaataaagccgtattttcactttcactctgagtcatttttattatattgtcattttcgacataatcgaatttagattgtgcattatatattctgacgaaaacaaagaaagattgttgcattaatttaattttaaaaagttgattgaaaacgcaagtctcgttcatctcctccaaatgttctttttctttttttatgttctttctcttctaaaagtccaacagcgacnnnnnnnnnnnnnnnnnnnnnnnnngcgtgtctatataaagcaaggtcgtcgattcataacgaccatctccattacttctccataacctttcaagaaacaaaaacaagataagatctcttcagattcctacactccaacaaatataagtttcattagattctttcttagctagagaatgaaactgattgagaagacgatgagcatgaaccagtttaggactatggaggaggagaagcaagacggtggtgagcttttccataccatcgaggtagctaaagttgaccggaacaacgtgtctcagccgccgccggctgctactgcagcactgctagaagttcccggtgatgaacttaacctaattccaccgttgaacttttcgatggtcgataatggtatattccggtctggattcccggactcggcgaacttctccttcatcaagactcttggccttcgctcaatcatgtataaaagctttcaagaactatgatcaattgactcttatattggaaacgttggacttgttgatttaggtttttgtgtgtgtgtgtgttttttttttctgacatcaagtttttgtggtttgtttgtgtatgggaaatgtgtgaagatctttgtgtccagagccatatcctgagaacaacatgcagttcctcaaatccaatggaattagtctttttcagtttggcattgaaggctctaagtccaaggtgtgtgccattttgctaaatttttttggcctctggtttataaaaatccatttctcaatcactgccttgttctctgtaattctgattttgtggtttgaagttgttgtcacaactttttaggaggaattattagaattaaaagttcacatctcttggatatcttgaatttgcagtgtcttcccggattagagaacgaggtttggttgcatatttggagttctaagcatcagaaagaggatttttatacaaatggaaattcaaaaacttcggtattaatctgaatactatttggagttctagttttgaattgcttaatgttgcctaactgttctttaattatgcatgtgtatctctagtttcatgtttccttaggagtagtaatttgcttatgcatgttatgatatagactagttatccatattttttatttatgaaccgcccaagaaaagtgtacaccattctttaatgctttattgaaggatgcttttcttggctctgtccgttaccattgactctatggtcccactgtttgtttgcttgcccttcctcaactaatagaccacttggtcctcttactgtgtatatataatattttagataatgggctgcgtcaaaaatatttcttgcatacaagtattgtcagtgatccactactcaaaagttttacttttctttgtgtgtatgttgatactgttttcttggttcatattagttctgtgtgcactttgatgcatgaatggtatattatgtatcttaacttttggtggtgaaaactttgtggatagtgacttgtcgatgtattaatggtaagagtattcacatatcaactggtaggtatagtacataaatcaagctggaattaagtgtgaaagtgatagatggctaagtttaatgtcagttactgatgtgtaaatacctacctacctattgttgcttatgttttattggcccttgtttggataaaatgacttttcgtttcatgaaataaccaaaaaatagagtcgtgaactagttatcttgatctccaagtgtataatctgtaactttttagatattaa

SEQ ID NO: 8878 - DNA, 443 bp, Arabidopsis thaliana landsberg
tttaatttatcacatatcatatagatatatcttagtaacagaatatgtaagataattgctctaaaataaaaacttctatagtagtttatttttgtcacccaattgaatatttttccttttggggtggaaaatatttgtggtatctcaataagctttttgtgtatcccaccccccccccccccccccagcatggcattcctacaatttaataaagccgcattttcactttcactctgagtcatttttattatattgtcattttcgacaaaatcgaatttacattgtgcattatatattctgacgaaaacaaagaaagattgttgcattaatttaattttaaaaagttgattgaaaacgcaagtctcgttcatctcctccaaatgttctttttctttttttatggcctttctcttctaaaagtccaacagcgacaacataggttt

SEQ ID NO: 8879 - DNA, 987 bp, Arabidopsis thaliana landsberg
gaaataccgacgctctatatctagtgaagagcgttcttcaaaactatggcgctcagatttgatcctgaccgttggatcactccttctattaactacatctatattagaatgcttgtcgactttgtatataaataacggcatgcagtctaatgttctattaaaaaaacaaaaacaacgcttctttcttctccgttaagagaaacctccctcactcccactttccgacgaacaaaaacaacatctgaaaaaaatcatgaatccagcagattccgatcatccacagcttccaaacatcaagatccatcaccctccatctccacgtcactctcaccatcaccactcctcatctactccctcctccgccgcaactccaacaccaaccgccggagctcgtcgtaaaatcggagtcgcagttgatctctccgaagaaagctctttcgccgttcgttgggctgtagatcactacatccgtcccggagacgccgttgttcttctccacgtttctccaacctccgtcctcttcggtgccgattggggacctctccctctgaaaactcaaattgaagatccaaacgctcaacctcaacctagtcaagaggattttgatgcttttacttcaacaaaagttgcggatctagctaaaccgttgaaggagttagggtttccttataagatccatatagtgaaagatcatgatatgagagagagattatgtcttgagattgagaggcttggtcttagtgctgtgattatgggaagtagaggttttggtgctgagaaaaaaagaggaagtgatggcaagcttggctctgttagtgattactgtgttcatcactgtgtttgtcctgttgttgtggttagatatcctgatgatcgtgatggacctgtgcctattgttactgtcaagtctggtggagatgatgatggagatgttgaagctgcttctgcttctgctcatcatgaacacatcaaaggtcaggggtcttt

SEQ ID NO: 8880 - DNA, 324 bp, Arabidopsis thaliana landsberg
tttctataaattgttgaatcaaagcagagaagaagaagaagacgatcatgaatccagattccgattatcctcatctccctaacatcaagatccaccatccttcatctcctcgtcactctcaccaccactcttcctccactccttccgccgctactcctaccccaaccgccggtgctcgccgtaagatcggagtcgccgttgacctttccgaagaaagcgctttcgccgttcgctgggctgtcgatcattactatcgtcccggagacgccgtcgtcattctccacgtttctccaacctccgttctcttcggcgccgattggggac

SEQ ID NO: 8881 - DNA, 1424 bp, Arabidopsis thaliana landsberg
ccgatagcagggtgaaaggagaatgctcttcacccaatgaaagagtaataaacacttcttcgaatgccatcataataaacaaaattccgcagagatggtatcaaaaatgaagtaccttgatagcattaagagagaacaattcattgtcgacgaaaccatcttcaagtacatccatctgtggaccagtcgccttccgcgccttgtcctggcaaaagatattgaatttagtgaaggaagtataaagtctaagggatccatcactaaggccactgactaagacataaagacttgataggttattatcataaggttaaaaataaccttagcccttcgttttgcaagaatcttctttgcctgtttcttcttgcggtcaactgtgtttgtcagctcttccaattcattgagtagtttatcatcttcattttcctcatcttcctttcccacatcaggctcaggtttagcaacttcctttttctcaggagtcagagctttcctgatttgcattcgccatctacaaaatagagagttcaatgaccattaagcaactaatataatttctagacgcatagatggatgacgacaaatgctaaagtcttaacaaaaccagtagtttcccacacgccaattcctaacacccatggacacccgtttacccatttcacacagtgctttatcgggttgagcactcaaaacagcataggtaaaaacttgaagtgctaaggaaactgttctttaccgaaccaatttacagctaactaattctacaatagctgaattcattttagtcaaagctctaccacatccttggaaaagcttagaaattaacaagtgagacataaagattaaaaagatccatgaaggagtcaataatactgttcttactttaggatatgcttgaagtcattcttccccaagacaggaagatcatcgcatagaattttaatctaccaacagaaaaataaaacgttaccatggcgtagagaaggacataaatacttgattagcaaaggtatggaaaattagaaacagtacctcctctgtcgtcaaatcatgttcctttaaaggtagagaggcttgatcatcaaatgatatggaagtagtcgtgccaagaacgtcaagaggattttcagaccaaatgaaatcagcagcagatgcaactcttctcaaaatggactccccatcttcatacctgtaaattacactcggttataaaaagttcatctataacgaagaaaaaacagatggcggattttgcactacccatcacgggttctcttttgttttgatcctccaagcacatccaccacctgcaaacacaagtagtattacacacaaaactttaggcccaatgggagagttgtaaaaaaaactccaaacaccaaataagccatagtgattacctttctcgtgggttgtgctgactc

SEQ ID NO: 8882 - DNA, 1751 bp, Arabidopsis thaliana landsberg
caaacgcaaaataacaagtaaaggaaattatttcattttaataccatatatagcttgaaggtgtatagttttttaataaatatatacaacataagtgatagtgtaaatatatataacataagttcttacaaaactttgttagaagtaccataggtcgcaagttcgaaacatgcatggaccattgacataactgatttttacgagaagcgaaaaaatggaagatgactggaacttaaaatcgaaacatctctgttagttggaagagacctcatttgtgtggatcaaatgcaactgtttcacatttcacatcagattcgaaatgtgtatggtgtggataaacaagggattctattggtgtgtggaaatgctgaccaacaaaactatgcattagaaacaataagtttagtcttttcacacatagcttgatggacgtgatacaaagtatgcaaatatgatggccacatacatgttccaagacattgcaaaacggtggaaattcacgaggattacagatttttaactcaacaacacatcttcaccatcactttgtatgttcgagtggttaatcaagtttaaagtttgccagtttttttgtaagacatcatatatgattgactttagttaagaagcattgatatacaaaggtgagagagaacttagaaatcaccaagaaaaataaacattactatatacaatggtgaatctgaaagaagataaatccaagttgattatctatattacaacgagaagatagaaaccagagttttcttcccaagaaaattttacagcttcttcttcttctaatcttccctcttagttatatatgaaacagtaataaagatccgcccgacccagaaaaacaccaaacgaatacatagattcgacacttcttttaaatactgcatctttatatacaaacactaacctgaataaaacagttaaacggtgaccggcgacggtaactgatcttcatcttcctccttcctcttccctctctctctctcttaggagaagatgaaaaacaaaaacatattcatttactttcaaaaatggtagtagtaatagtttgcagcagtagtaatcaaatcctcctctgttaggcattggcgaacgaacgattccggaatctctatgtacacttgtttttttgttgtttgtctactaagccatggcagggatgctcgagttttgacggtcacggttcaagcaatcaaatccttctactctaactgcaggcgagttgagtccaaatttcattctaacacaaccacgggaagacgacgatgatgaggaagaagatggagatggaaacccggttgccgaatatggctgaaggaaaggagagtttggtgagattggattgagtttctcatctcgaaaacgagcatcttgggctaatgggttcgccgctctactcggtggtgaaccgggaaaatacggtggggatgatgatagtaactgccctattgttccattatcctcctaaagagatcacagcaaagtataatgaatcagaatcttctgaagcagaggcagatcaaagtacaaacttgaggtgtacaaaagttaatcagagaatattgactatcacaacatgtagcctgaagtgattcatgtaagatcaaaagcatacctttctacgaatgatttccaaaagctcagcaccagctttagaatcacacaagtcggctgcagcttgactacagatagcaaaacagagtttttataaacacttttatttctaatcactg

SEQ ID NO: 8883 - DNA, 601 bp, Arabidopsis thaliana landsberg
aagcaaatagttctaacttttatatagattactttttcagttattggtgttcaatttttggatcacctgtggtgatgtgattgaaaaactgtgtgggaattttttatggtcagacaacccgaacaccacacgagttgtaaaagtgcttacaagatatttgactgcattaaagataatctagatttaaggcagcttaattaaggatgtttcacaattgtttgttttctttcaaattattttatttattttataaacatttaaatcttaaaaataatatatgaaaattaaattaataaataaaattttaaccataaattaaaaataaaagtaacaaaaaaagattaaaaaatgaagtaaaatttttttaagattgtaacattttttttaataggatggttttttattctttactttttttcaccaacgactattttattaagttaggagaactaatccggagtcgatgtacttacatgaaaaagaaaaaaaactacgtgtccttatattttttgttagacaatcaacatagacattggtacaacagagaataactcttatattaattaaggcaaacaatttcgaaggcttttttaaaaatatt

SEQ ID NO: 8884 - DNA, 1549 bp, Arabidopsis thaliana landsberg
caaaagccacaatctttaactaatttcttctcttaagaatttcaattaaacaaattttttaagagcatatacaagtctcacataaaacagaccagtcatacctaaagttctaatccaataaattaacatcttttgaaactcgatcatcatccatttagctcaaaatctataaaatcaaccaggataaaacttctagatcccaatacaagaacaagaccgttaaagtgttgtttcaagtttaaggaagagagatggtaacaaatcaatgcattcgaactggccatggtcatgtcacatataccaacacaagaaatttttatacatgttataaacttttttggccttacagtcaaggaaattaatatcttctcacttaaaaactatacataagacaagatcacttaaaaaaaaaaaaaaactagcaatatagttaattctttaaaataaaatatttgggtagctagctatagagatttagatgcagagaataccgagtttcttagatctcatcttccatacccttccaagatcgagtgagtaacatgcattgatgaatctgggataccaatggtagatgatggttccactgaaactggcataaaacccccaatacctggagaatctggtgagaaatccggtaagggttgtttccggcttaggtattgcatcacttgtcccatgtcaggccttgattctggaacatcatttgtgcagagcaacccaagtttcaaaaccatttcgacttcctcggataagaattcccttcccagttttggatctctggtctcgagcaaaaaagtctgtttccagcattcacaaacccacttgaccagatatttcttttgcactggaaactcgggttcaaaaggtcgccttccacaagttacttcaagaaggaagataccgaaggcatacacatcagttctagtggaagctcccatataaagtatctctggcgccatgtacccaatagtcccaacggcgcatgttgagtctgagatgcctccatggtcatgaaaactggccataccaaaatcccctaaccttccattgaactcagcatccaacataatgtttgaagctttgatatctcggtgcagaacaacttggtcagcacctgtatgaaggtaacagagagcagatgcaataccctttataatcacaagtctttgtggccaagaaagtaccggtttctggtcatcaaacaaatgctcgtcgagactaccattggtcatgtaatcagagacaagaagaaactcatgctttctcctgcaatacccaagaagtggaacaagattcctatgtttcagacatctcatgctcaccacttctgccacaaattgcttcaacccttgatcaccatcatgtgacattctcttcacagctatttctctgcttaaaaggagttttcctctgtagacttctccaaaacctccttttccaagaaatccatccttgtgaaacccttttgttgctttgtacaaggatttgtaagagaaccgatgtgcaccaaattcattttcccattcttcggttatttctgcatact

SEQ ID NO: 8885 - DNA, 1937 bp, Arabidopsis thaliana landsberg
gaatatctttacggaaagaggtcatataggggactggagaggccattatttggtcacaggcttcttgttttcttgcatcatctgtgtaaagtaggctttttttcctctgcaactttggcctcttcttctttcttttctgcaattggccattattttattagcttcattgattcctctgctgaataaaaggtggataaatgcttctaacttatctctggattttctagatatttgtgacaaatgtcaaaggggttgttgaatcttcacgtgtcctcttttctcctctaatctcatctaattggtttctttagttttgttcaactcaaccacatcctagaaagtcatcgtctttgaacatcaaattgcgttttgtttgtcaaatgacttaagttcttgatcttttcttatagggtttttctctgcaaggtcatggcttcgtctacggtaagaaaccttcgtgatcttcactatctaagttcattagatccttgtgtttagtctcttggtcctaacatttactcactttgtctgatgttctctcaggctcagagcaagaagcagtttaagaggtctatgactaagaaatcacattcatggtggtgggatagtcacaattgtcccaagaactcaaaatggcttgcagagaatctagagagtatgttgcttcacttagcattgagatctccacttaatcaaaaataaacaaaatctgatgttctctttcttgttcttgttttggcttctcagagatggatgatcgagtgaaccacatgttaaaactgattgaagaagacgcagactcttttgcaaagaaagctcagatgtattttcagaaacgtcccgagttaatccagcttgtcgaggaattctaccgcatgtatcgcgcattggctgagcgttatgatcaagctagtggtgaacttcagaagaaccatacatctgagatccagtcacagagctctcttgagatatcatctcctaccaaagagaagttgagtcgccgtcaatctagccataaagaagaggaagattcatcgtctttgacagattctggttctgattctgatcattcctctgccaatgatgaagacggtgacgaggcattgatccgtagaatggctgaacttgagcttgagcttcaagagacgaaacagaagctccttctccagcgcgaaagtgttgatggtgacaacaatgttgatctccttcacaaaattactacatatgagggagagcttaaagaagctaatgagaagatgcgaatgcacgaagacgagattgctaatctgaagaatcagcttcagagcttcatgtcttttgacacagaggatcatcttggtgctgaacaaaagagtgttgatttggataaagaggacactaaagaagatgcagtagctacaaaagtgctagccttggaggaagagctgagtatcgcgaaagagaagcttcagcactttgagaaagagacttattctctgaaaaatgagctcgagatcggcaaagccgctgaggagaagctgaagagcttacaacatgagctcgagctggctcagagagacgctgatacctacataaacaagctcaacgcagagaagaaagaagtcttgaagttgcaggagagattggcaatggtgaaaactagtttacaggatagagataacgagataagggcattgaaaactgcggtttcagacgctgaacagaagatattccccgaaaaagcacagatcaagggagaaatgtcgaagatgcttgaagaacgaagccaacttggagagcaactgagagagctggaatcacatataaggctgatcaaggaagagaaagctgaaacagaggagaagcttagaggagaaactgagaaaatcagcgtaatgagagacgagagcaatgtgctaagagaagagattgggaagagagaagagacgataagggat

SEQ ID NO: 8886 - DNA, 1734 bp, Arabidopsis thaliana landsberg
tttccattaaaaagttacatggcaacagcccaacaaggcacacatgctcaaaagaaaaagaaaaataatgaaggaaagaaaacttacaagcccaaaggccaacaaagcacacaggcccgaaaacaaagaaaggggaagcctagaacagaaagcagcggaagcctagaagaaaaagcacctgaatcagagaccgaagaagaagaaccaaaacagagaagcggtgactaatcaactttggaacacagcaaaccaagtcatcagaagcgagtcacccacaagaccctgacccatcctcctagaaagtggatcaagacgggcccttacaatgagctggatttccttaatgagctgagtatgattcaaaaatgaggatgtgtgaatccgagagttgcgctccctcaacaacagataaatggatcaaaaatgaggatgtgtgaatccgagagttgcgctccctcaacaacagataaatggaagcctgaaagaggagcttgattataagtgataggttctttgacgttgaagccgtcttcaaccagaggagagaagccatgaaggacgttggaggagatagtccaacacacctagtgaaataagtccatacagcgctgctatacgggcagttgaagaagaggtgctctctagactcattccctgagttacagagcacacacactacatgaatagagaaaccccaacttttcagcctatcccttgtatgcaaacggttccaagccacaacccaagagatgaaagcatgcttggggacccgatccttgaaccaaattgatctatgccaattaacttggacacccggagggtgaagagccatccaagtctttgaagcagagaacgagtttgaaggagcatgagcatcgacttttcacagataaacatcatctttagtacactcagccacactccccacaaccggtaagcagcgctttaaaagaagaatggaggggttacgactcctactagcagacaaccatcaaacaccacctcttaagccatcttttacctccgtattcagaggcaaaccaactaagataggtccagtaggccccgtcagattaattgagaagaccaagactcgttcaattgtcttgccagaaacttgcagtttcacctgaaccaacatcacacatcaagaagggtctcgctaaaggtggtatcttacaaagcttcctccaaatctaaccaccagaggaagacagattcaaatcccaaaagcatttgtgtctaatgagattaattctgatccacgaaacccacaaggaccctgcagctgtaaacaataaccaaatgagtttgagagccataaccttgttccaatctttcaaacgtcgaaaacccaacccgtcacactccttaggggaacaaactgtttcccaagcaatttttgctcctcaaacggagtttggagctgctttccataaaaaagcattacacatctgctctagctttgtgagacattgggtaggcagcaggaagatcgaaacccaaaagttaattgttgaataaattacagacttgagtaactgcaatctgcccgtaaaggaaagattcctagtagttcaagtagagaacttaaatttgatcctatccaaaagaggctgataatcatgtttttttcatcttttgggccattaggggcactcctaaatatctgactgggagggctccttgtttcatccgaaaggtagccgctaaagaagaagaccttgcatagtc

SEQ ID NO: 8887 - DNA, 1540 bp, Arabidopsis thaliana landsberg
gggacatatacgaggatgctatcaatctctgaccctattattcccggattctcacatattttgtatgaagaaaacagaattacacaagatatcacagctataaagaacacatttcaacaactacacaaaatcagaaatcgtaacaacttcacaatccacacctctctatttaaacagcgtttcccacattttttcatatattcatcaaacaaatctcaatcagttcaaaatcatcttccaacacaaaaaaaaaaaaacagagcaacacttaacgataacattctccatgatgatcaagcaatcaccattcttgcttttaacaacaatcttgttcacggttgctgtgtttgtagcagcgcttgatcctgcacctgaagaccccattttcgaactctacatgcacgatttacttggaggaagcagccccaccgcgaggcccatcacgggtttgctcgggaacatttacaacggtcaagttccatttgctaagcagattggtttcactcctcctgagaacggtatagccatacccaatgcaaacggcgcactaccaacggttaacggcatcaatggtgtacctcttgggaccggcttgtctggtacagcatactctggtcagaacctaaacggaattcagactcagttgggtcctgatggtctcagtctcgggtttggtaccattactgtgatcgacgatatactcacatctggtcctgacttgggttcacagccacttggtaaggctcaaggagtttatgttgcaagttctgcagatggaagcacacagatgatggctttcacagctatgcttgaaggaggagagtacaacgacaaccttaacttctacggaatttacaggatcggaagcgccatgtcttatctatcagtgactggaggaacaggtaggttcaagaacgcttgtgggtttgcagaggtcagaccattgattccatcaggtcagcatgaagtggatggagcagagtctttgcttaggatcattgtccatctgaagtactaaacaaaacccaaaagtagccttaccaaaagatttcaaatttctacatgtgtgcgtgtgtgtgaatgttcttttgttgttgtatgtaacagttattgatcgaaagcaaatcatcgaaagccatgaaacttctaagattgttaaaagtgtattttttgaacattgccttaaagtctaagatggtgactacaaaagctatataaccatgacactcctatctacctgaagctggacgatatactaatgatcaagaaaattgcagagatatcttaagaaactttattcaaagaagatgattcatgtacatcaacccaacctggtcacattcacacgtttaagcactgtggtttcatccaacccataaagacaatctatcaaatgcattctcaatgacgctggaccattcgccatcgcttcacccaactcacctgcaatgccaaagacagccatagcggaaaccgtagcttccagtacccgtgatgaatcaatagcaagaaacgctacaatcaaaccagctagagaaca

SEQ ID NO: 8888 - DNA, 1387 bp, Arabidopsis thaliana landsberg
  unsure (1)..(1387): unsure at all n locations
agtgaaacgaaaaggtttttaagttttgttggcttttgactattttttcccctctctgtttattaaaggttacagtggtgccactgagtttgctgcgacggtctgtttcttcaaaaagcaattttggggaggaagagaaaaccttaagagtcaaacggaaacaaaaaacacactnnnnnnnnnnnnnnnnnnnnnnnnnnncattgagaaaaaaaaaaggtctctgctttttattttccatggcttagactctcatttttattgggaatttggatggtctaaagtcaggatttgctttattttgcttgcaaggttttgtaaaagaacactttttctcggttcttcatccgtacacgtaacaaatccatttcttatgtgttttttcgatttctagaatctgtaaaacccacaaaaaagaggttttttttttgtttctgggttctttgaagaagcagagagaagataagctctttacagttttcttcataacaagtgatttccttttgttttcttattcgatttccagtttctatatgttacataaatttgatttttaactgtgaatcatatacattactcaaaaccttaaaaaggtttcttttttgtttgtctaggttgttcaaaacttgatctttcagtagctaaatatatggatcctctataatctcatttgtaaagctcttttattgcagctttaagatggagaaaaatcaacaaaagccggaatttctagctgagacctcagagatgaagaacaccaaaaacaacgacgactgttctgtacaacaacaacaacgatttgtgtggccatgggttggtctagtagccaacataccaacggaggtggaaccatcgggtcggagagtaggcaaaagcggttcaacgttacgtgatgagttcactatgaaagggtttaatccaacaagagtccaacccatttgggatttcaagggtcattctggttttgctttggttgaattcgctaaagactttgaaggattcgaaagcgccatgaatttcgaaaggagttttaatttagaccgtcatgggaagagagattgggaaaaaggtataacattgtttcagagtttttaaagtcatttgctttcttgacattgatgagttcactttctttgtaaaaggtcatcgcttgagagacaataagctctatggatgggttgccagagaggatgattataatcgaagtgatactgttgggaagaacgtcaagaagaagagagatttgaaaagtatctctcagattgtggaggaagacgagaggaaaatggttcatcttgttgagaatatgtctcaaaccattgagaagaagaagcaaagtaaacaagagcttgaacagaaagttgatgagacttctcgtttcttggag

SEQ ID NO: 8889 - DNA, 407 bp, Arabidopsis thaliana landsberg
  unsure (1)..(407): unsure at all n locations
aaatagtatgacaaccacgcttctatatatacgaagtagtatcatccaattaactatattaaagaatatgagaaaaccagagagagaaggggacctacaaacaaaaggtggggtagagatgacattagaaagaaagacattaaacttataataaagagaccagtgaggaacatgtgcagcatctatcttttgattctgaccatttcagctgtagaaacnnnnnnnnnnnnnnnnnnnnatgaatcaaaatctcacacttgcttctttatccagatacatgagaaaaggacgatgtgagtcacaaatctttcactactaggctacgatttgtaaaagcgcgctgtgtaaagttctttttacgaaaacagataacggtgtagctctgaaacagagatcttaggtgcata

SEQ ID NO: 8890 - DNA, 571 bp, Arabidopsis thaliana landsberg
ctttctgttcaagctgttgtttacgttgcttattcttctcaatggtttgacacatattctcaaatagatgatacagtttcctctggtcttcctctacaatctgagagatacttttcaaatccctcttcttcttgacattcttcccaacagtatcacttcgattataatcatcctctctcgcaagccatccataaagcttatcatctctcaagcgatgaccttttccaaacaaagaaagtgaactctatcaatgtcaataaaagcaaatgacttttaaaaacaatgttttaccttttttccaatctctcttcccatgacggtctaaatcaaaactcttttcgaattgcatggcgctttcgaatcctttaaagtctttagcgaattcaaccaaagcaaaaccagtatgtccccaggtattccaaatgggtttgactcttgttggattaaaccctttcagagtgaactcatcacgtaacgttgaaccgcttttgcctactctccgaccagatgggtccacctcagttggtacgttggctactagaccaacccatggccacacatatcgtttttg

SEQ ID NO: 8891 - DNA, 1432 bp, Arabidopsis thaliana landsberg
ttactggaatacctagctctagctcgaatacgttggagatcctattttatgattgcagattattgtatctttgattcactgttatgccttcctttttttgcgtctgttcgcgctgaaaactctttgattttgcttccatttcttaattggttgtgctgcggattaatggttgaaatcaacactatctttctttctttcatccacaacgttttctagactaatcggcatgtttgatgaatgaagccaagcaagtgttgttttatgtttatttttctgtaatggcgatgcgaggctgttcactgattgtattttgctgttagatagtaatcatcggtttcaatggtaaccttctatttatagtttctgcgtcagttgagcaattacgaatgtcatgggtttcaataactgtttttttttacccttgttagttagaacagtctaaggctgcaatgagtattcctcagtcgaaatcttcatcaaatggatttccactcaaaagaggtgaaacagaggaagttttacataagacaaatacatcaaatacaggttagctgttgatattctgtgatttatgtgcaacgtcatattctgagtcctcatgcatgttgatatgtattcagtattcaacggggaagctggaagcttgaagaggctttcacttgatcggttagtgtacttcacaacatgtaagatcgggcatcatgtggaagtgcatctaaggaatggatcagtgtataccggtatatttcatgctgccaatgtagagaaggattttggtaaggctctgaatcagaatttttttccttatagagctgcacatacaaattcacactactttttcttgcaatgtataaaattgctttaaacttccaggaatcattctaaagatggcatgcttgattaaagacggtactttacgaggacataaatcccgttccgaatttgtcaggaagccgccttccaagacattcattattccggccgatgaacttgtgcaagttatagctaaggtgtgcctgcttttataaactgaagggaaatatttattgttttaagtttatgtcaatgtgttatattgcagagagactactttgagttttgacattgtcattactttatatcattgattttggtgttaggatctctctgtatcctcgaacaacatgtcaaatgcggttcagggtgagaaaccatcggagctgttgacagactcttctatatcacagacttatcatgttgatcgggaaaggcagctgcaacgctgggtacctgatgagactattccacacggtgcagatttggagaatgtgtttgataacccttggaataggtaatatacgcacacacacacacacacgcacatatatatttaaattttttgtcaaaattatacttattgaatgtttggaatgttgatttgccaactagattt

SEQ ID NO: 8892 - DNA, 1653 bp, Arabidopsis thaliana landsberg
cagcagcataaccagcggcttgaccgcccataaactgaagaccattaccaaatccacagagaaatccagccaagaaagccaagcctcgaccgttccagtcatttaggtaagccttgaaagatgatcttgggagaccaagtataggccaatagagaaatatgatgtttagtatcagaccaaccccaaatgaagagatggagaagtagaagaaggctgtgtacacattgagttttggaactccatgtttcaaagtgtgccattgatcgtttgtcgctaagcttactgcaggtgagattagagagaaacagataccggcaaagaatgttatcgccagtccaattattgtgcttttcccaaaaacctgtcaacgcaaatcttgagtatcagtgaatatcagttatttctgtttaggaaaatgctgtgtgtattattattaacctttatggctctttgtttctcaacctcaataagaaaatctgcagtccctacttttgcttttccttcttttatagaacttgtttccatttggaaggaagaagtagtctctaaactgaaacaagatcagattaggttaaaaaccaaaccaaaagaaaacaaaacaaagacctagtatagtgaatctttttttaaccttttgaatccttggagtttggatttgttatcagctgcatttgatttatgaacagcagaaccgaaacaaacagcgatcaagaaacaagcgacccccgggaaaaggacctcagctctgttgattctatcatccaagaaatagttcaaagttgtgcctgttgttgaaaacaaaagagttaataagaacagaggaaaaaaatcagttaagagtagttgaagagaagagtttaccgataacaacggcgatactagctgtgatgacttcagtgacagataacccaacaaaagccaaagcatattgtgttgctaaggtcccaaggctaagaaatattcctccagccattgcaaacatcacagacggccaattatcctgtgacaaaaaaactttgcatttcaaaaaccaacaacaaatatgtgtatgaatgtatgtgtaactgacttgagaaagctgtgtggtgaaatttggtctgcttggacttatttcgcctagtgtaaacgctatgataactgcagctaacaggtttgtgagtgtgtagtcaagataagtatgttgaggaagtctaccgcgtctttcggttagagtcatgattgctggccatgtccctaagaagagcagagccaagagcatacaagtgattgttcctcctttgctctctatcacatacattttataaaatcaccaaatcccactgcatcaaagtaaagaagtgagattcttctgttatcatatcattgatctctcgtgataaaaatgaagctagttgtcttaagaaaggttctttagaacattaacacaagacacatgctgatacaagaagatctatataaaactcaaaccttatattccattaaatttccctattgactaggtttcttgaaagagattaccttattaaagcttttgtcttaactttgactttgaggaagaccagagaacaacagatacagaagaaaaaaaacttagtctctcatttgattggcagatccagattcaagaagaagttagtttcccattttctataa

SEQ ID NO: 8893 - DNA, 1477 bp, Arabidopsis thaliana landsberg
cttcttcatatatggagaaagagaatccctttaccggcattttaagtgataaagccgcggataatccaggtttcttgctaaagctcctctgtctttataaatatatatcactctgtatagtgtgtgttaatctccttttgaatatttgtttgtagacttttataactggaatagagtaaaagttcggtattgtgacggtggatcgtttagcggggatagcgaaaataaggttagcatttgtatagaatttgataactttcttgtgttacaacattgattgtttatttgaatttttttgctacaaattaggctgcacaacttcagtttagaggaaagagaatttggttagctgctatggaagatttgatggcaaaaggtatgcgtcaagctaagcaggctctgctctctggatgttctgcaggaggtcttgcggtgattttacgatgtgatgattttgggaaattgtttcctccttccaccagagtgaaatgtttgagtgatgctggtttcttccttgatgcgtgagtgatttgctagtttccttgagtaacaagtataggtaatgactttggtatacatagtgactgttttttgtgatttatggaagtgaagcatcgatgtgtctggaggtcgatctcttagacgattatacgccggtgtggtcaaattacaggttagaagtaaagaatgttgcatagtgttttacttggtgcaagaatactaatcgagatttgtgtaatgtttctacagaatctgcaaaccaaccttcctcagtattgtgtaaaccgtcttaatcccacttcggtacatattcttaacttcacaccaaataagaaagatgtagtgtgctaaatctcctcataagtgtactccatggtttcaatattgcagtgttttttcccacaaaacctaatcaaccaagtcaagactccactttttattcttaatgctgcatatgattcttggcaggtaagttatttctcttgttgatcatcagatttattaacaagattttgtgtttagttagtttttttttggtgcagattcaagagagtttagctccaaaatctgcagatccaagtggaagttggaatgattgtagacttaactacgccaagtgtagtgcatctcagatccaattcttgcaaggtgaaacataagctaataatgatgttcttgatttttttttccgacttatgttcttgattctgaataaccaaactaacaaatgtttttgaaatgtgtgttacaggttttaggacgcgtatggtgaatttggtaaaaggtttcgcgatgccaagtaagaacggtgtgttcctcaattcgtgctttgctcattgccaaacagagaggcatgacacttggttcgcccaaaactctccagctattaagaacaaggtaagacaaaataatggctagttgaaagttgataatgtttgtcaaactctagttcgatttgataatgtttttcgttgtt

SEQ ID NO: 8894 - DNA, 494 bp, Arabidopsis thaliana landsberg
gttttgaatgatgtattttggcataattaggatgtaacaatgaagataatctcgttttcgcaacaaggacctcgctctatttgtgttctgtcagcaaacggtgttatttcaagcgttacacttcgtcagccagattcctctggcggcacattgacatacgaagtatgtagatttcattctcatcgatcgatcaaatttttgttgaaagtgtaagatgatttatagtgttaattttcagggtcggtttgagatattatcattatccgggtcattcatgcctaatgattcaggcggaacacgaagtagaacgggaggaatgagtgtatcgttagcaagtcccgatggacgtgtagtaggcggtggcctcgccggtttactagtagccgcgagtccggttcaggtacgatatttgccagtccaaaaagctgcaaagtttgttaaccggaggatttaatttccttgtgtttgaaatcaacaggtggttgtaggaagtt

SEQ ID NO: 8895 - DNA, 653 bp, Arabidopsis thaliana landsberg
tgcatgcacgtcgactctagaggatccccagggttcttgctgatgctatcttcgatagccatgaagatcaggtatctttctttgttctctctttgatctactgtttttttttttgtaaatctgttgtaatcattgtctttgttattaccttgacattccatattgatttacttatataaaggctattcaagaaagcgaagaaaagaaggcagacgaagttaaagaggatgaaggctgtgtatgttttttccaaacaatcttccatttattagttcaatgttgctttattatccatgcttcactttgttgttgatccaatctttcaggccgcagaagttgacagaggaaagaaaaagctccatgaagtatggcaaactgaatatctttgctgtgttagagtaatgtatcttcatgttcttgtttattcagtttctgttgtgtaatatcagtctatcgaggatgacgaagatgttatggctgagtctgatcgccctttaaagaggctgcgacgcagaggtgaaggaggctctgctttggcaagccctagcttgggcagtccgactttagagggaccttcaattaatgacgaagaaaatgctccgatcctattgcatatcatcctgtaccaattgaaaatgaccatgatgctggtg

SEQ ID NO: 8896 - DNA, 359 bp, Arabidopsis thaliana landsberg
agcttgcgcttgtagtcggccagatcggctttgctcggcagctcgccgtacagcagcaggtcggcttatctttttcaaactcggcaccggcgggcaggtcacgcacatacataaccactagtaggtcagcccggcaccggtctggcccacggtcgacaacgcggtctggccggtcacttggccgcgcaggcctgcgccactgaatacttttgcttcggacatggtgtttctactttcttgaacttgttatggaaatcttgctggctaaacgggttttcctgtgccggcctcagtaatttttgggtttgtgatattgagaatgatgattgagttgtgaatatggttcttgatgattgttt

SEQ ID NO: 8897 - DNA, 1742 bp, Arabidopsis thaliana landsberg
tactagttacctctctacactttttttttcttacagttataaacttacataaaaacaaaattcgagtctaaatatttttcttttaataaaaaaacaaaaacaaaacaaaatcattgcagaattgtaagaaaacttgtaaaaatgattaactttcttaaccaataaaaaaggaaagttgaaagttgaaatttcgaaagtaaaatgtcaaacaacaataatggctttgttttcttcccacactgtaataaaaataaaataaaaatggggttggtagaaaaaaagaggtaaaaatgacaaggatgtgtttcacacgcgttcagaccctcacacgtgcgacgatcatgttataaacaaactctctcataatttccccaatcggaggcctctgacgaacaaaaaaagcccagcaaagtctgaagttaatctcagccgtccgatcaattcatctaccatcgtggtcagagatcttcttcttcgtctctctctcgtttctcaaaaatcaaaatcccttcctctctctctctcaccgagccggcgagcccgttctctcggtggtaagtgctcaatttttcgatttcaccattcagtttctgggttcggagattctcgagccgctcctacattacctgtttaatttccgatttaatattcaaaattttgttaatctgaattcgattgccacatagctgctgcttattttttctagggtttatacttattcaattatcgtgttcgtcttttaattcaatttttgttgggttttgtttttgattgaatcattgtagtttttaaagatgcttatgatgatgatggggagtaatatcagaaatcaagctttttcacaatctcagaaattgtagtagagtttggcgattttatcaacctccggaacaagcttcttcttcttcgttttactcttgtcatccgtaaatgggttgtttccattccacggctgccagagaatttcccgatcacgaaaaccctgtgaagcttgcttctgagactgcttgtaagtttacttgcactatacgtttcgttttctcttctttgctttattctccaagagcatgagcataaagatctctcttttatcaattgttaactgatatgagaatctgttttcgccatttattgaatccgaaaaatggttctttcattcataatctatttgatctacaactttgttaaatgatgcttgttgttacttaagtcatcacataaacctatttcaacagtttcttggatcattagtgtagtttacttctactttcaaatggaatcttaatcagagaaagttttcaagaaccatcactttcgatttttgttttgatgatatacatgattttgatgttaaatctcgcagtgtggctaactaatactttgtttttctagttagtgttagtgaagttgaagcattgtatgaattgttcaagagcataagcagctcggttgttgacgatggcttgataaacaaggtaatgataaatctcatcgttctttgattatttcgcacctcatgggagaatcttgaatgcgtgatgtacagtgacataataatattcattgcaccattatccatattccgtattatttgtcaactttcttgactttcacaaatttattattgaatctccatgctgagctgtgggctccttattgctcaccaagtctctgtgttgatgatagttgacttgaactttaattcattttttatattggtttgctcttaaaaattgatgttt

SEQ ID NO: 8898 - DNA, 1235 bp, Arabidopsis thaliana landsberg
tttaaccaccaggcacatctctctccagtctccacccatcatctttgaggacatacctctgtggtcaaactcatcatcatatccaattattcctacaagctggtacgttcgagacttggaaacatcagttttctttggacatattttggatatgatgtacaaattatttcccaaaaaatgcctttaacttgacacatgcgtttttaaagaacacttgtgatcatttgtattgtccaaagacttaaagggtaaaataaatttaaaatttacatagaaatttgaaaaatatcaaatataatgaaaaaaacattctatgtaatgaaacggaggaactagttatttaaacatgtcggatcttctcaacatcaacctttttttttttaacaacccaagtctcatattgataatcctctttacaatactcgatatagtgattaaggtagcagtaatagactggaattgaacctgagaaaaagaacaaatataagcattttagcaacatgaaattaattcaatattctatattaactgatcccttaccttatgcaacactaaatcaaactcagctagctagtctactgaatttaaaataccgaatgagcccgggagttcccccaaacacttcagtagaaaactatttgataaaaaattgtatctccaatgaagtgctcagaggaactctagaaaacatccgaccaacacgacgattgtttgaatatatagatattacattatcaatatattgtagatacattttggcgaattcggtttataagagtgttagggtttgaaaaagaatggagggactggcgttttatatatacaattggaagcattgtgaacttagacgtgaattcaggttaagggctttaggtgagggaatcaaattttttaagaaaagtgcataaattctttttcctttcagctttttgcaagataagaaagacgtttctataaacgcatagatgccaatgaatgtacactcatatacatgtcaatgaacatatgattttgtttttgcttttttacatgcatatcattttttttcctttgttttttttgcttcttttgtgtatacactactgcatgctacttcaaatttatgatgtattatttatagacagaaaaagacaatttagttttcgcgattatatttttcaccaaagtaaaaatatgtttctatttcatcctaacataaccttacgtaaactaattgataagacggacagagaaaa

SEQ ID NO: 8899 - DNA, 993 bp, Arabidopsis thaliana landsberg
cttacctaatacagaataaataattcttccttcataaacagaaacaaactctacagtttctctaaaaaacattgaatgaagtttgtatcactcacttcatcatggcagaaggaccaccagcatcaatctcatctagtataggtttcaactctggatcttctttcatccgcgccatacgctcagtaaagtgttctgctgtttcaggattcgagaaagcatccaaaaaaggagacatttgtggatcctgtaggcaaaaaaaataaaaaaaatcagataagacacagagatttcattcaaagccacacctcgattagatggaaaaagtcatcaattcctaacctgaactaaggcggtaccaagtttctcggccattgtcttaaactcagggttatgcataacctgttgcattgtgttgacatactgttgaggatcaaagttagggaaaccaccttcctggccagcgttaggaatagatctctgaagctgctcagccaattggttaaaggcaggatctttagctatttgctcagccatttctctgatgctaggatcctacaaaaaaaccattatcaattaaaaaaaaactcaaagaagataacttttcaattgtgctaacagcaaaggtaacttacgttgagaatactagccatattagagaaatcaaaagcattgaaattcaagccaggcatagctgatgaagttgaactcccagaagctgattccggcttagaactcttattctcctccgtcgatttgggtttctcatctacagtaaacaaattacaatgaaccaataaccaaatctgactagaaacgattcattatcgcagatcagattgtatactgagaagataataatcacctgaaagaagaggatttttctccgaattggaagccattaaatatgactaaatacctacaaaaaacacaattttgttttcaggagaaggtgtaacaagagattcacgacaataagcgaagaggtagcaaaga

SEQ ID NO: 8900 - DNA, 782 bp, Arabidopsis thaliana landsberg
acctcttattccttcaggtatttatagttttagattcgatttggttgttgtttcttcgagttatgtagagaaattgttttcaacagatgagaaaaacgataccaaggaagaaagtaagagtactactactaaaccagaatcaggctcaggagctccaccttcaccttcaccgactgatcctgggattgatttcaatgcttttgatttctccggcatggctgggatcctcaatgtaagttctcttttgtgggtttatgatcattcaatagtcaaaggttggattttttcttgtgtttgattggtttgtttaatcacaggatccaagtatcaaggaattggctgagcaaatagctaaagatccttcatttaaccagttagctgagcagcttcagagatctgtgccaaccggatctcatgaaggaggtctacctaactttgatccacaacagtatatgcagacaatgcagcaggttatggagaatcctgagtttagaacaatggctgagcgtcttggtaacgctttggtgcaggtacctttaatacaagctctttcggatcttcttgttattattagttagtcaatacttgaggtgtgatcatgacattgaaactctatttggtttttaggatccacaaatgtctccctttttggaggctcttggtaaccctgcagcatcagagcagtttgcagagcgtatggcgcaaatgaaagaagatcctgaattgaaacctatactagctgagattgatgctggtggtccttctgctatgatgaagtaagc

SEQ ID NO: 8901 - DNA, 1593 bp, Arabidopsis thaliana landsberg
cttaataaacattacagttttggcgataattttgacaatcacaccttgtattatgcactcgaatagtgacccaaatagtcaaatactacatgcaagtacccatcacaattaggatcttcaatatacctttcacttatgggcaaattcagtgtcttgttatcatcaattgtttagaactcgacaagacactgtcacaaccaatcagatcgttgagagatcagctcagaaatcagtggctagtctttcgcactgtcatgccttcagttctagatgatcaggacaacaaataacaggcagctggaatttcctttgaagatactctagatactgcaggagaacgaggatatgtatatttttccttgaacttctctttcttttgagatatcagcaatatcacttgacttctcaattgttgattcttatcgtttagtgatcttgacacacacacacaacaaattttttttttttttttttaaatgtgtgtgtgccccagtccatttagatgattgatcttcttagctctttgacctcgtgttaaatgacaacgttttacgcctgatcagaaccggcatgcagctattttccacacgatgtttcagggtgctgatcctctattcatctttggatttccatgacctgttcttgctttatgtccctgtcttagatcagcacaacttacaaacacatcataattcacatacaccaatggaggttcgcagactaataaatctgttaaaatccaaaggtttggtaaatagatcagctaactgatgttcagtacccacatgatcaatgactatcagtttcgcctcaacaagttcacgaatgaaatgatgcctaatgtcaatatgttttgtgtgtgagtgttgaacaggattcttagctatgcttattgcactttgattgtcacatagaataagtagagaatcagaaatcataccgtaatcttctgccatctgtgtcatccacatgagttgagtgcaacagctccctagggcaatatattctgcttcagcagttgacagtgagacactattctgtatcttgctatgccatgagaccatgttgttacccatgaagaagcatcctccacttgtgctccgtctatcctctagtgatccagcccagtcagcatcacaataccccatcaagctcctggtagtatccttggtgtagtacaaccctaaattcacagtcccattcatatacttgatgattctctttactgccagcatatgtgatgtctttggttttgcttgataccttgcacacactcctactgctaaacaaatgtcaggtctgcttgcagttagatagagtagactcccaatcatccctctgtaagtgcgctcatcaacatcttcccctgcttcatctcttgatagcttatcggtcacacccattggagttctagctgttttgctccctttcaaaccaaatctttcaaccagatttttggcatatgtgctttgagatatgaagataccatgctctatctgtttgatttgtaaccccaagaagtaagtcagctctccgcacatactcatctcaaactccttggtcatgctttcaacaaactcatcaacatactct

SEQ ID NO: 8902 - DNA, 505 bp, Arabidopsis thaliana landsberg
tttatcccttttccctttgagtgagtaattcttcttccaaagtttcttggttccatactttcatttttttgtcaaacgattttcaggtcaaaggcctaatgatccattttatttcatttgcagtcgaaaaatccagttttcattagtcatccttctccttggtgttggaattgcaaccgtaacagatctccagcttaatatgctgggttctgtcttgtcgctactggctgttatcacaacttgtgttgcccaaattgtatcctatgcttatattctctttcccctttccatatgtcttctattagccagtggttcagctaaatagtagtctttgttggagtcgttgctgttatcttaaccagttatatacagatgaccaatacgatccagaagaaatataaggtttcatccacccaacttctgtatcagtcttgcccatatcaagcaatcacactttttgttactggcccatttttagatggtctcttaaccaaccagaacgtgt

SEQ ID NO: 8903 - DNA, 1541 bp, Arabidopsis thaliana landsberg
tgaacaaactcctaatttactcgaattgctatcatcttagctatatgtatacttttatctcttcagaatcactcaaactacttcgtaccattctcccatctttttaatgtgcaggccgtatagataatcttaatgggttcaatcttcataagtcatgaataagatgtttccttccaatatacaaacgatgcagtgtgtaatttgcagtcggtgtcggatttcgcacacattcgactcgacaaaattaatgttttgaaaatttaaattggacatcgaaaatttatattcattggatatatgtgtgtcccaaataaaagtaaacaagaatgtagaacacatcaaaataattaatatcacttatcctgcaacaaaatgagaaaacaacaaaattagatcatacaatatattattcaaaattatacttagtaaatttaatggtaaaagatcaaatatgacttgcttttcaaaatgttaaaacagtctcgaatacgtaaaataatttgatcacaaaataaagtatatagataacaagattttctaatctatatcaaattggaaaatattttttcataacagtgaaaagattttttttttaaagtttgtacattgatttttgattcaaaaaccttagttaattaaaagatctcttaccaataaaagtttctgaatgggatttggtattgaactgtgtccttaaatccgggttttagttcaaccacgagtttaactacataaacgatttccggtcagcctggtcctgacgggccaccaattttcaaaacattgacgaaagcaagcccaataacatcaaatataattaacaaattttagtttgaatacggttactgttttggaaattgatacattccgatcttggactaatctataatccatgggctggctattatgcagtttcccgtagaaaaaattatgaaaacatgattgatttctcgttggtagaccatgacatcacaggacacgtcaacattccaagtataaaggacaaaactgtccatttagattccaccacgtgtcccgataacgtttccgtctgtatctctctcttccgtcttctactcttcttcttcttcttcttccactcacaatctatcgagctaaaacactgaagcagacattagcgttgagaaaaaaaaaaaaagtaagaacgagagagagaaagccatgtctgcgaaaacaatcctatcatcagtagttttggtggttctcgtcgccgcatcagcagcggctaatatcggattcgatgagtcaaacccgatccgaatggtctccgatggtctccgggaggtagaagaatctgtttcccagatcttaggtcaatctcgtcacgttctctctttcgctcgcttcactcaccggtaagtctcgtcctttcaccacccgtgctttctccgttgacttttgatcttagcttttgatcatcgtttgttggtgatgaagatatggtaaaaagtatcagaacgtggaggagatgaagcttcgattctcgattttcaaggagaatcttgattgatcagatccac

SEQ ID NO: 8904 - DNA, 1840 bp, Arabidopsis thaliana landsberg
ctccttgatgacgttctcagaagcattttttgagtttcaccgaggtccagaaattcacgtttacgtagagatcaaactcaggtaaagcatttttaccatcgtagtttccatacataaacgaagctctgatgagataaagattcccttttccatcggagggggttaaggtgtaacagttcctgtttccttgaggaaaagatcttacatcagcaagcgggaaaggcaaaaccgggtttttcgggtaaccgtattcttcagagacgttcagatttactccagcgttgatgaaaggtgcatcccaggtgtaactgataccagtatcagtgtctacatagttaatattagggggtgacccacaatctatgctgatgaaacctggaccagaagaaggtaagggttttgattaattctacaacgttgagaaaattttcatcaaaattccaatgcaggtttaaattttagaacctaaagcattcaatcatagaaacagacttggacctcacttatcatgtcaaaccaataatcagaacacggttttggccaaaatgcaaccacatatatcaaaacttcaaaaatctttggtctgaagattgctcattttcaaatcaaaacagactctaacagaggaaaataagcgagaatgagactcacgaacctgcttggccttggccatgtactacaatggcaatggcaatgacggaaaaaaggatgagaaaaacagagtgagctcccatgttcttcttattttgtaaagctcagctcatcatcgtcagaaaaacagacaacctgcgtttaagataacacaaaaacacaaaagactagaaagtacaaagtctatgcccatttcctcttctggtagcaacaaaattgacctggaggtgtataacataagtgctgctcacgactgaaaaaagcggccaagaaagaatataaaatggtaatacagctatcaagaagtaaccagtgggtcaacaactaacgcatgatatatatataactccaataaaatattataacaaaacatagccaagcttggacatagccgacagatacaaagaaaataaaaatcttttctgaccacagaatttgtaaccgagttttgacattagatgattgggtcacatagagaattacagactgttgcaacctttaaaaccagaaaacttaaaaggatagtgaaaagattttttacttaagctattgtttctttaactgttatgctggagagtattagaactaagcttcatcttgtactagctgctttgcggtatcagcttcatgggatgagctcaaagggaatgatgataactctatgtaatcaaagtcctcagtgattcccgcctgaaagttacccagctgatttagtctctccttcatgtatgagaatgtgaaatgtggaatttatagccttttgaagtgaaaagatctggaagatacctccgtgtatagatgttctagctgttccttggcctgggggaagttgtttgaacaccattgtcgcagtgtgaagatgttatctgagtaagtttgaaagaattataatctaggctgcagtgaaaattacgtaagtattaaaactgaaaacacattcccaagttttagaaatgaaatacctgtccatctgttagccgactggtgagcaacttcaattgcattccctgtcaaaattagaaggaatatacacattgatacagctagtaaagcacaagattgattcttatttctgctccacgaagaccgggaaaaccatataggagatctaacacataacataagtaacgtattatgcagaacttaactctttgcctccaaagtagctggatcgttgtcagcaaattgt

SEQ ID NO: 8905 - DNA, 1708 bp, Arabidopsis thaliana landsberg
acacaaaggtcgtcaggtaaaaaacaacgagagttgataagtagatttttgagggattaaagaaaaagacaatttagttagtcttcttttacatccacgtaattaaatagcacatcgttccaaacatcattatcaaagttcattagttatttagggaaattacaagttgcacggagaaaaagcagttcgtggaccaacattggacttttctttcagacaaaggccattagcgagcgagagtgataattgcgaaattgccaaaaaacgcaaagtctaccactagacaagaaaatcgaagcttttcactttctcttttttctgttctgttgtctttggttctactctccgcactgaatctttcgatcagcgataattgtttccttcttttgggattttctccttgggtacgaggttctttccttcttttatttgctctgtttttgagatttggaattgttatcaagtctgacaaaattggtcactaatctttctgggaaattgagcatgttcgtgttcttgcatccgtttgactctttttctatgcaaagtctcaacctttcaatagtggaatttattcttatccctaatttctctttaccagacctatttttagctaagtttggttgaatttagaaagtctttgattcatagttgaagagattctctccattaatctttctctgtaatgtgtcagatccactaaaagtaagtaagaaaaagattttgttgtaatgttattaaatgtgtctttgtagatggaaccagctcaattaatgagatgagatgagaatgttcagcttgcagaagatggctatggcttttactctcttgttttttgcctgtttatgctcatttgtgtctccagatgctcaaggtgatgccttttcttacttttcaactgctattttgttgctctcatttcttgtttcgtttctggtaatttctgagcttgttcaggttgaagatttaactctatgattctttgcttttccattttcaggggatgcactgtttgcgttgaggatctccttacgtgcattaccgaatcagctaagtgactggaatcagaaccaagttaatccttgcacttggtcccaagttatttgtgatgacaaaaactttgtcacttctctgtaagtttaatgacaactctgaattagtcaatgttgtttccatgtgagaacatttatattcatgtcatttgtgattgcagtacattgtcagatatgaacttctcgggaaccttgtcttcaagagtaggaatcctagaaaatctcaagactctgtaagtgctttagattgagtctctctttttgtctgaaatcctagaacatagatattaggttgtgagcatttcgctaccttctttttatatatagtactttaaagggaaatggaattacgggtgaaataccagaagactttggaaatctgactagcttgactagtttggatttggaggacaatcagctaactggtcgtataccatccactatcggtaatctcaagaaacttcagttcttgtaagtagttccgcctcacaatgctgttaaatcttgcacatgttttaaaacatttttaagacgtagaaaaggattactcatgtctttattcacttgtgtgttggctaaacaggaccttgagtaggacccaacttaatgggactattccggagtcactcactggtcttccagaacctgttaaacat

SEQ ID NO: 8906 - DNA, 2030 bp, Arabidopsis thaliana landsberg
taactcggatctgtaaatgaattactaaaagttaggaaagaaataaagataaccacgaacaagaaatcaaaatcaacttcacaagatctaaagaaagaaagtattggaacaagaaccctaaatcaatttcacaaatatacaaacatgaagaactctactactttcactcgcagcaatgtgacgataaaaaccagatcaaaactacttgtaattccaaaagaagtaaactcttcaaacagatttgcttgtacttctctaaaaacagatttcttgtgaaacaagaaatcaaaacacgagaaattgacgatcgtcatttccataaaaattattgagatacgcattatcccaaattcaccttcgtcgtcagcttcgtcgtcaccttcactttgttgtcccggtgtatccgatgaatccgacgaatccgatggttgttgttgttgcggtagttccgatggatcttgcattactttacttgagcctccgcctcctaaacagcataagaaacgattactcatcgcagcgattcaacgaagataaatctttcgtgagactttttttctttggattttcccgagaaactttttcccggaaaatgtaattagatagagagagactatctccgagaaaactagagcgagaaagagtgagagatagagagtcgaaagaataacactggaaagaactcgccgaaggatatatatttatgcgctctaacttctatgcgtcattttttgtattattataaaattaaataatacacaaattagattcgaaggaaaaaaaacaattttgaaaaattattaataaatgaatcaaaatccagagcaaatgaatgtttgtagaacataaatactatatagcaagtaatctttatagaattcagagtaaatgaatgtttgtacacaagttttacgtactaatactcatggcaataatctttatagaatttattatcaagataaatgaaaagaaaaattactaaaacagctatatccagtgaatataaattaaaggccattgaagagaatctcatgttagagagacagtgccactttgcgaaacaatctttttgttcctcagattttctaagtgattctttcttttatgccaaatttgttgctcaaatgtagtcactactcagacactcgtttcctgatttagaatcatccctctttaaagcaaaattactccatgtttaaggcgataacttgtgtcccaagaaacagagagcatatgcttgtttagagctaccatatataaaaagcttctcatggtatatatgatcaagagtcatgacctttcacaacttgactagtatagttgcagaatcatcgatccaatagaaatgattcttgcaccggaaacgaaagagataaatttgagcatctaacaaaattccaataagaacatttatgctctgcttttttcctctcctctcctattttaagaagtttccataacagagaatgaaaagaaaagatctcgagctgttgattaacaaaaccatctcaaaaagttcacaacctaacctgacctcgtctcaaaaacatctcaaaaagtaacaaaaccatccgttacacaaccaagtttctgaaaaaccaaacaccaaagaaaaaaaagaagccctacgtaaaaccgcctgagaaaacttcttatgttgaagccgaacgcctccttgtcacctggcgcggcacttggaccgggaaagctgcagcttcgagaaccatcgcttccacttcactcatggtaggccgttcaagtctctctgcctttatacacatcctcgcagtatcaaatatcttctttaaaccttcaaccgagtacctattaccgagcgcaacatcagctttcacaggcgcatcctcgatcctatcccatactctcaaaaactgcaaaaaaataagaacatccaaacaaaactcagctaatctactaacttccataacacgaaacgtgtaaaaggttcctagatacaaaagttttagtcatacccaatcagtgagattctttttcccagcaggattatccga

SEQ ID NO: 8907 - DNA, 2133 bp, Arabidopsis thaliana landsberg
atgaccttcctaaacagagatgattacttccattggtcttttctactgttgtaaatgtatgttcatttgtctatctatgtttgtgtttttagaaaccccatccatctgttggaacgtcttccatctctgtttaacatctaaaaagggaagaagcaatatgtcgttggttttgcttcctgctgcatattgtagactgattcctctaggcgatgcatattcaacatgaggtcctgatgatatatatgttaacaaatatttcctgaccaaggctgagttaatggagaagacgaggcaatggacgttggagtggaagtttgagttcaggtttagatggtctaacaaagattgagtgattttgtgtgtagatgttatactatcaaactatttttttggacatgtttttaatagtttagagacacttacactaaactttttcttgcaacatttgaaatgaccaagttaagtatctatttgggcctgattggtttaaacccagcggctgcggttgcggttgcgggaatttgcggaaacggccggttgcggtttcaagcgttatcaggcgttttgaacggctggttaagcggttgataatgggtgcgtttgtgggagttttatgactggtaaaatcagcgggtgcgatagtaattaaataaaaaataaccaaaataaatataatgtattactattaaaagaaataaaaatacaatatattatgataaattgataatattcgaaaacttgattttctgaccaaataaaaatacaatatatcatctcgtccgaccaaatgattttttaatcgagaaaacaaatcgaaacatgtgttcaatcaaaaaaactcaaaagaatacaaaataaaataaaaacaacgatgtcatgaaatagtcaaagaattacactagctaatgaatgaataaaaggatagatgatacttatgtttgattcttgattttgattttcatcggatgccataattgagacaacatggttacaatatattgattaaagttttctaataaaaataaaacatataaaagattagattattttaattatagtgattagagtttgggtggaagccacaattatttaatttaattaaaaaatattttttttttaacttaaccgctaccacccgcaaccgcaaacgcttgcgggaaggaacttttaaaaacggacgatttcgagcgatccaaagtggtatttagcggtttttatgattggtgtcaatcgttaccaaccgctaccacccacaaacgctgcgtttgcgggtggtagaaaaagaaccaatcaagcccttaatgttttcttctctaataaaacgaaaccaaaaacaaaagcttacccaactccctcactcaactttttaattatcttctccattattcgacttcaattgtcttctccgaaaacttaactaaaacgccgtttttcgaatttcgaaatagtagattaatttttccactcaaaagaaaaattaaattactagattaaccggttcgtttataaaccaaaccagacacgtgcaagtccagtgcgttaatgaaattaatgtttgctcgcctctttgtattgaaattcgttacgtgttttaatgatatttgagtgtcattatgtccaaaagcattttaagtgtaatttatgtttagattatgtttggataataataatatatatgtgaattatgttcattcaagtaattaagtaggaccccatcattcttgggatattacgttaaatattattttaaaatttatttgagatatataaaaaaaaattcgactttgtttcttgtcccaagtcatatttagattacttgaagacaacattatgcattaactagagaccctgcgtagttaattgacctcatatccttcattatgtcaactctattgtacatatatatgataattcaaaagtttataatactatttaattacaattagctattgaggatgggatcaagaagaataattccacaacttgactttgaattccaaatgagaatcaatcttgtatatatcttaccatcatcaaagcgcgtactgacatttttgtcccagtatagttaatatataagctacacaacttggtagatagtcaaaccaaaacacatcactacttcaccttaaa

SEQ ID NO: 8908 - DNA, 1324 bp, Arabidopsis thaliana landsberg
gaaactggacggaatttttacatgtttacgacaaaaaggctgattcaccaagggatccttcgaggttttctcatgaagatttggttcagtttctgacaacttttaagaagaaagaagatttgcaagtaagtgaaactgaagaaatacacaatgtgattgtaatctttggccactaaagttttgttcttttttgctgctaagcttctgaaatgtcacgccaatcatcttctgattgaaaatttgaagcaagaatcccaagatgaagacactcctgagcaggtgggagatgcttttgttatatctcgttctttgataggaatatgtttgcagtgaggtttaagatgttgttgtttggcaatacagatgctagttagattgacagttgagcatccgagttactcgttagactattctttcaagccatactcagaggttttgtttccttctcctaaacaatgagttcttgttacgtgttttatgcggttgtttaagagttgttgaattgcttaagcaggactggtttgtatccgatgttggaatgaagatgaaaaaggtgatggaatcaactaacatggtagctggtgattgtgagatggttctttgtgaagatgggactgagggtttagttagagttggtgttgtagaccgtgatttaaaggtatagcttagagagaatctttatgctttagtgattcgtcttttcgcaatggacctgctttcttgacgagggttatcaaatgttgaatggctttaggtgattcttgacgagtttgtgaaaccgaacaaacctgttgttgactataggacagacattacagggattactgctgaagatatcgaaaatgctagtctctctgtggtagatatacaggtaccatgtagagtctttctattggttttatcttcacagcagaaacgtatagttgttatgttgttaactttgtgaaaaatgtgcaggaaactttgcagccctttctttctacgggtacgattttggttggtcacagtttaaacagagatttggaaggtaagcataaagcttccagtagaggattttgtaattgtaagttttacgctaacaagtttatggttattttcatattttgatgccagtgttaaagatagatcatcctaaagtaatcgataccgcacttgtattcaagtatccgaatacacgaaagctcataagaccttcacttaacaacctttgcaaggtaagtctattacgtgtttctctactcttgagatgaacatcacaaaaagataacattttcaatactttttttcatttgttgaaatggttttcccagtctattttgggtta

SEQ ID NO: 8909 - DNA, 757 bp, Arabidopsis thaliana landsberg
taagagcgcagaggttgagctttcacaggctttaccttgcacagataattcaaagaaggtcttttaagtcttaaaggccttcttgtaccgtcatagttatacttaaacacaagtgaagtatcaattactctggcatgatccaccttcaatactagtatcaatcataagtaagtatggttctgaaacttatttcaaaaaaactaggcgcaactgaaccatttttactaaccttttagatcatggttcaaactttgaccaaccaaaattgtatcctcagagataaacatcagcaatttttcctgcaaaaatgattcaccaaatgtcatcagaacaataatttgaaaccgcaaaacaaaaaaaaacaagtcggtatacattatatacacaatgtacctgtatatctaccacagatagagtagccttttcaagatcttgagcagtaagtccagtaatgaaagtcctatagtcaacaaccggttgattcggtttcacaaactcatcaagaatcacctgatttattatcagcacagttctgtaaaaaacgaaaaggtatacatcgaaaataaagctgtaaagagacctttaaatcacggtcaactgcagcaactctaacaacagcttcactcccatcttcacaaagaaccatctcacaatcaatggcaatcatttcgatctttgtcggttccatcttttttttgccaagccctgttctaacccaatcctgttttttgcaactcaaagagttcagctttttttt

SEQ ID NO: 8910 - DNA, 1435 bp, Arabidopsis thaliana landsberg
aaacacccttaacattatctttatcacacacacacatacacaaaatctaaattttacagagagattccatgtcccttggcgtttatgcttttctctcaaacatggaattttcttttttcttgtatttaattaaatgtgaaaaaaatagagataatataagatagtgatgtgtgttattgataaacaaaataacatttgctttaaaacatgtgcatattctatctgaatttaagaaagcatatgcgataaatgaaccaacttatctacattcatttgttttagtaaatataacgtaaaatgacaaaaaaaacaagatcagtatttgtagtcgtcgctatgttatcacctgattaaaactacatgtacaaattgcatgttatttgaccaaaggaagaaaaaaaacataaaagcagaagcactagtagtaccttttgtctcccaaggacaggcccatcttgttggaaatacactctagcgcttccttccacttcatgatctgatctcctcgagaagttcttgcaagcgcccaaaacgtttcaccaaactcaccggtctgtcctctcacatctcttgccctaaccttgtagaagatgggaatgacttggagcattcctttatccgcacgtttcttcatcctcaccagtcattcatgcaccaactcgactccgcatacctacaggattatgaccatactgtcaataaaaaaactgtaaaaaatcaaacatgattcaccagcgaacaattaaaacatgcatctatatagatttttttacctttcttattgaagtagattgaataaagaagagatataaatattggttatcttcactcgtaagtcttagttaattaacagtacctactagagaagataactagtgcgatcttcgactctttaatccttacaaaaaggtttgtcatgttttccccccttagctcgtctttgtctacaaaacacaagattccatgtctctcaaaggcgtccagaaggtggctgacaaagctgtagcgcaactgatctcctcggaaactgaggaatactcgatggaagtcgtcattggcgagagacaaaatcgtcatcagggacgactctgatatttagtgttttgatagctaatgttaagaagtgatcctaattctggtttagttgcagaaacctgaagtcgacctggttaaaggactgaaatggatttagattggtattggagccggttaagctctaatgttcggttattgaaagaagactggtttgactctggtttacaatgagaaacagaagaatcttgatggcctagagggtttactaataagacttgtatatataaggtctctgtagtcgtctttctcattcattccgttagaaaaaacagactctgtaatcttcttcttcctcttgaagctccattgttgtgagctgagagaaacacttctttggtag

SEQ ID NO: 8911 - DNA, 1121 bp, Arabidopsis thaliana landsberg
gttagatgcatcggttggtacaggcaactcaatctcaacgttcgtgcgggtgctacaaaaagaatgttcgtgatcaaaggtttaaagaatctgatcaatcaggatctttgcatgacagtaagacaaaaaaggaaagtggcacaaataccatagaatatatttcccttcgttccctgaactgacttctagcttttatgagcatctcaacacgacttcttgaatgactttctatttgtgcttccacccatataagtggctttacctgaacataaaagaaacaaatcatgatatttacttgttgaagacgtggaacaattccagtagatgctatatcccacatgtcaaacctgagtgctgagtctatatgtcatcagatcaaaagccccatcaggtggtatgaaagatatcgtcctatcgttttcaaaacgggccaatcgaacacacctgcattaaataaatggttgttgaagaagagaatacataaaactcaagtatataatctttttgaacaaaaagaaaatagaagggttaagatcagtgaagactttccaagtttcaatataataaaaacttaaagacgtactgatgaaatttgatgtcctccaaatcaatggcttttcccttagttgctcgtccctgcgcttccagcaatactctatcattcagtcctaacttacactctggcattccactgcaatagaatggatcaaagagcaaaagagtcaaaaagggacgtgatttaacatgcaaaagggacgtgatttaacatgctttggctgattaggaactatatcgaaaatttgatgagctgacatacgtcaaggaagtccgcatattcagcgctccaacatcatcagacctgacaatttgaccattactggtgacaagaatatttacattctcaataacatccaagaaaacctggaaaaagaagcaggttgtcattatttgccaaccgaaacatcagaaacatattcctatcttgcgaaaacaaaggcactcacttcattcttcttgtactgcattccctcactcatccaggagacagcattcgtcacagccattggaggtctctgtgttacttccattctatatgcatcagtcttgatgaattcactgag

SEQ ID NO: 8912 - DNA, 769 bp, Arabidopsis thaliana landsberg
  unsure (1)..(769): unsure at all n locations
caacatctggtacttaccttgtgtccttgaattggcttctattttttacttgcatctcaacacgacttctggaagggctgtgtatatgcgcttccacccatataaaaggctttacctgaacaagtattatgcgaaaataagatatatcatgatataattcgtttaagaaggggacaaaaccatttctgcaatattacacattctaaaacctgagtactgagtctatacgtcataagatcaaaagatccatcaggtggtatgaatgatattgtcctgtcgttctcaaaacgggctaatcgaacacacctacattttgaagaaagagacgtgtaaaaactcaagtattcaataatttttcgagttagtaaaaaaattggcctcgatagagtgactgtcaaagaatgtttaaagttgcaagagattaacgtactgatgaaatttgatgtcctccaaatcaatggcttttccttttattgctcgtccctgtgcctccaacaatattctgtcattcaagcctagcttacactctggcattccactgtaataacatggataaagaagcagagagtcaaagaggagggacttttgattttaaatgcgttggttaactagggacactagagaacgcacctcaagtatgttcgcatcttcaaagctccaacgacatcagacctgacaatttgcccattactgttcacaaggatatttacactctctatcacatccaagaaaacctggaaaacaaaacatcagtctgcanacattagaa

SEQ ID NO: 8913 - DNA, 2271 bp, Arabidopsis thaliana landsberg
cgattcagacagcagaacggaagcttctgacggcggcttctttttcgccctcgtaaaggagacagattgacaacacgtgcataatctataatggtcacgtgacttcacacacacacacacaaaccacaattatgggccttgggcatctttttttataactaggtctatatgtcttttcgttgctttcacttatttatttaattattaaattttacacaagagatgttgaacaagcaagctatatacagcaagtagaaatgtggaatatgcatctttggacatttttacacaaaagaagaataccaaaaaagctataaaaaaaaccctaaaacttgggtcttgaatagataggatgacgacaaagaggacaagagcttttggtccgaatccagcgccaaagacagagtttatgaaaaacatgacaacaatcatgtgtctctatagattcttcgtcgtcgcataattcctcaaggcatatagtacattcgttgaccggagtaatagatttggccgggatacaagtagtccagcctttactttcttccatcaagtgatattcaacatcttctgcttcagctttgagctcgaaagctcttcctctgctttctccgatgagttgaatgccatacaaaaccagaatctcccgaatccttggctcaacatccgccaaaacaagagacacgtgtcgaagacatgtttctacgtcggaggctgctagaaactctgaagagatctcgaatttgagttgaagtggtcgacctagtgatgtctgtccgaaaagtcgttctttcccggtgatcggacggtagatgtctcgtcggaaagtcgctagtgtgatggaaaaatggctagcggaatttgaatggaaacgcggtgagaaagtgaccgggtagaaaaagactcgccggttgttttgcttttgcatgactttgtccacccaacaatctacttgtaattggacttatatttatagagatgacagtactcgatccaaaacatattcatgaaaaaggaaacaaaaatttattctaccgtgtcatctttatcttcattgaaaaggaaggaaaacaaaaagtttattactaatttaaaatttaattcaaaacaaatcaactttagttaatttttatttcttgatctatctccttcccaagaacaatccgcacatcaggtaatctctctctctaaaatttgcacagttttcaattccaaacaacaacctaaacaatgaaagctcctggaaacaaaacaaaagactccgccatgacactgtgagtgcaaagccaaaattaagatatcatcaaaagtagcattaagatgatgttgaaaatgtcatgaaaaatccagattttgctcgatcgtgttcttgtttcttcagtatgtggcagtagttgagctggcataagagatcacataacaaaagaagaacaatcaatatctgttaaaaggattgcaatttttttatgatccttgataagaaaagagaaacaagagaactaactaacctccatgcgaaatagactagttggtaccacgattcctgcaccaactgagcttctgaatgtctccaacaactttggagctgtgaagttcctatacttgttctctgataattccgccatattcccggcacatgcaaacacatgtccgtggattcctctgtctctgaaccatttcaatgggaaatcaaaagaaaggtctgcaaatgcagtaaccgcaacatctcctcccacaaaatcccgttcatatgtgtcaccactctcatcgtcctgtacttccctccttggttcgttaggacccaatcccctagtcttgaatccccataatgcagatggtcctcccaaagaacacacaggcgatatgtttccacctaagaagaacctctcaggtacacaagaagctctgctcttgtatccgcttccccatggaaatgtgattcccccagctataccaaagttcagagcagcacgataaaacccgagtggaacagcatatcgaaggtcgatgtcctgcagaaggacaagaaaccctcaacatgatgtatggcaaacataaaagaaccacatatgttataaaagggctaaccaatcttttcattcactgctacaataagtaaagagtgtcagatgtacttcggaagttatggataaatggtgcaaaagcataaacgaggaactaggtgccatggaagttttctgagtaatatatttgtgctacaactttccacactgtaatatataggtttatgtaaattctgacataagaatgaag

SEQ ID NO: 8914 - DNA, 1105 bp, Arabidopsis thaliana landsberg
agataaactagccattgtcaaagtcgcagaaaagaccatagaaaaggctgttagggatatgcaacctcatttactgcagattatagtccaatggtatatgagaggtatcatagagtcttgtgaagaagatgaagaagattttagttgagggatgttctgtctgatttttattgcattttgggtatagataatcaaccgattgatctcttgttgttaaccaaggtcttttccttcataaatgctttggcccatgttcttctagtctatgtttgtgggagtgggatgggatgggtaatatacgttgctattagatgtcctcaattatgctctgagaatcgaaaaggtattttcattatcatccaaaatcataaattcatattttgctgcttcattaaactgtgtcctgaaaaatacatctatgcaatttattctcttatacagacaatgcagaaatatggtgaatttccattagactataaaggtaatattatttctgcttctacttagaaaagcacagcaaaattggtaccaaagtccaaaatgtgtgaaatagttttcagtaaaatgtatttatagtaatttttggggtaaaatgttaagtattttatagggatttgatgaggtattcttcaattgtccagatttgtatagactcaaaatgtgagagaacgaaaaatatccataactaataagcatatgatgcttataattttgatttacttctaactttaaatggggcactttacttgacgtgataccaattcaaaggacaataagcatgcatgatgcgtatttcttatttgctttttacttgtaaatatctatctcttcaatttgtcaagcactataaacccacgatcttctcaaactttcatcaataattcaattggaaaacaaatagaatggccgagacgaaaaaaggctcagaatcgtatccgatcaaaaccatcgtcgttttggttcaagagaatcgttctttcgaccacacacttggctggttcaaagagctaaaccgggaaattgacggagtcatgaaatcggaacagaaattcaacccgggtttttcctctgaccaaaattcccacagggtcgtccttgcaaccag

SEQ ID NO: 8915 - DNA, 3030 bp, Arabidopsis thaliana landsberg
ggtttgactgactttggtctgttctaatctaatcttgttaatatcttaaaagcctaaaacttttctcttattgattgttttggttaattttgtttccccttttttttgttgtatttactcgattgattacttcaatatgattttctggtttgcttgaaatttaagctggaaggaactgattcgaatatttcttgcataagaagatgtttcaatctacctatctattgacttcatgattggcttttgcttttattgttgatatctcttactatcttgatttcacctttcgttaccatttgcgtacaaaaatttaacaaagcaatgaatgggaatttcttattttttgtatagtcgttttaactgctaaactatgttaagttggtccacacaattaggtgctgaaaataaagtgacatcctaataagtggaaacttgacttatggagcttttcgtctgcttaacattaatttttatcatcttatctatttgacaccttccaaacactattggggaaatggcttcttctcttttttccggtgtaggtttaaggttttagatttgaaggcgtatggtgagaagtttgtgttgatgaaatgggtgatttgaagttaaatcctttaagttcttttagcctgtcattacaatatatgtttcagttgtgatcttttggtgctctccaaggtcttagggaatctccgtgtcccctctggtttctttctttgtataaagtctctggaatttaaagatgattttgtcctgttttcttcgaagaatttggcgaagaaacatcaaaagttcactatttgctttacgtgttatgcttgtttgactttgtgtgatctaacttttggttgagaactaatgctcatcttttgttctttggaatgtcttgatctgcttgattttgaatgctttgtcacattgtttaaacaatttgttctttgttttcagttgaggaaaacatgaattcgacatcgacacattttgtgccaccgagaagagttggtatatacgaacctgtccatcaattcggtatgtggggggagagtttcaaaagcaatattagcaatgggactatgaacacaccaaaccacataataataccgaataatcagaaactagacaacaacgtggtacttttttacttcattgttcttcaacctcctgatgataaatttgtttggtctgttttcagaaatttaaactagctttcatttcttgacaatctttttttttttttttatagtcagaggatacttcccatggaacagcaggaactcctcacatgttcgatcaagaagcttcaacgtctagacatcccgataaggttagctattcaaatacttctctatcagtttcttaatcataaatttctacgcatcatatagactaaatcgttatatcgttacagatacaaagacggcttgctcaaaaccgcgaggctgctaggaaaagtcgcttgcgcaagaaggtatgacttcattttcttccccttggtaaactgtttctgtttgcctaatgagttgagagatttgattgtttttttttttttgcaggcttatgttcagcaactggaaacaagcaggttgaagctaattcaattagagcaagaactcgatcgtgctagacaacaggttaatgaaatgaaatctaaatatatattcgctttctttcgagttccaaaatataatgcaatttctgattgaatatgaatgttttcagggattctatgtaggaaacggaatagatactaattctctcggtttttcggaaaccatgaatccaggttttgaatcaagaacaatgagtcttttggaaaaaatatagaattcaagattttgattggtggaagcttatttgatttgcagggattgctgcatttgaaatggaatatggacattgggttgaagaacagaacagacagatatgtgaactaagaacagttttacacggacacattaacgatatcgagcttcgttcgctagtcgaaaacgccatgaaacattactttgagcttttccggatgaaatcgtctgctgccaaagccgatgtcttcttcgtcatgtcagggatgtggagaacttcagcagaacgattcttcttatggattggcggatttcgaccctccgatcttctcagggtataaaacaaataacaatctagcgtaatgtgtaatgaatagaaggaaacacgcaagattacaatgtttcaaatgtttttttttgtaggttgttttgccacattttgatgtcttgacggatcaacaacttctagatgtatgcaatctaaaacaatcgtgtcagcaagcagaagacgcgttgactcaaggtatggagaagctgcaacacacccttgcggactgcgttgcagcgggacaactcggtgaaggaagttacattcctcaggtgaattctgctatggatagattagaagctttggtcagtttcgtaaatcaggtaaaatatatatattcaaactcatttgaaaatactttagtatcagtttcttgattttgtttgttcattcttaggctgatcacttgagacatgaaacattgcaacaaatgtatcggatattgacaacgcgacaagcggctcgaggattattagctcttggtgagtattttcaacggcttagagccttgagctcaagttgggcaactcgacatcgtgaaccaacgtaggtttgagttattttgtaacaaccaaatgaagaaaatggaaagacctcaaaaaatgaagaatgagtgcatctgaaaacagaggactactctgaataaatagaggggttgctgctgatatttatttttactctgcggcggaattagaaaatttgaaaaacatcatgtattgataagttgtaaatatcagaaaaaggtgggggtgcaaaaatttgtactttttagcttttgaaagaggcaagtttttcgaatgtttgtttgatttgtaaacaatttcagaattatataaacttggttccaaatcccctgtaataatgtcgagcgatctgcaatttgaaaactataggggg

SEQ ID NO: 8916 - DNA, 1862 bp, Arabidopsis thaliana landsberg
gaaaactcttgggtttatatagtcacaatgatacaggcatgtaagtgccaggcacaatttcaaaagtgtgactaaagcatacatcataattaaagcaaacataatctctcaatcttaggtagaagcttaccactttatataaatgtttttagttgcacaatcagtatgttcaaatactatagttttgggtttacgcaacaaatttaaccctgtaagccaacgtgagaaaaagaaaaaatatagccctatcacttgtttttcttaaagaaccaccatacaaaatgaaaggcacacgtatagaggaaataatttgccgaccactcattccaataaaagaaaggtcaaaagtaaacacaagccaaactattcccaagtatataaagcaatgttcactagacaaaccatcatcaaccagtttaaccgtagacatcattccttattgtcccatccaaatagtaaaaaaaaaaagaaaaaaaaaagaaaatgaaaaagtcaacaagactcttatggctattatccatcattgttttggtggcagccgtttctaaggcagtcgcagaggtagacaacgatgatgatgacgataatacttcattggaaggcatgacgacggctaaacgtgaaaccctcgaagttgaggatcatacttcattggaaggcatggttaaacgtgaagccctcgaagtaaaaccaccaaaagctggcaaaggcaaaggcaaaggtaaaggtcgtggcacccgtgtcgcaggacctgagatgaattggcctggacaatgggagttattcatgaagaattctggtgtttcagccatgcacgcaattttgatgcctttgatcaataaagttcagttttacgacgcaaccatttggagaatttcacaaatcaaattgcctccaggcgtaccttgccatgtttttgacgccaaaaaaaataaagttgattgttgggctcactctgtcctcgtcgatattaacaccggagacatcaagcctcttgcggtaacaaaattactaattattactccctccgttccttttttatataacgttttagttaaaatcacgcagattaagaaattacaaatataattcattttacacattagtaattgttgatctgatggatttaatggaaacatgacagcttacaacagacacatggtgttcttctggaggtttaaccgtaaacggtactttggtaagtactggaggattccaaggaggagcaaacacggcaaggtacctatccacatgcgaaaactgtgtatggattgaatatccaaaggcactcgctgcaaggagatggtactcaacacaagccactcttcctgatggaactttcatcgttgttggaggccgtgacgctctcaactacgagtatatccttccggaaggacaaaacaacaagaaactctatgactcacaacttcttagacaaacagatgatccagaagaaaacaatctttacccttttgtttggcttaacactgatggtaacctcttcattttcgccaacaaccgatccattcttcttagcccgaaaacaaacaaagtgctcaaagagttccctcaacttcccggtggtgcccgtaactaccctggttccgcctcctcggctcttctccccatccgcctctacgtccaaaaccccgctatcatccccgctgatgtcctagtttgcggtggtgcaaaacaagacgcttacttccgtgcagagaggttaaagatttacgattgggccttgaaagattgtgcaaggttaaacatcaatagtgctaagcctgtatggaaaacagagaccatgccaacgtcacgtgtgatgagtgatactgtgatccttcctaatggagaaattcttatca

SEQ ID NO: 8917 - DNA, 1234 bp, Arabidopsis thaliana landsberg
cctctcaaatctttgatccttccctctgttttccttttgccttcttacaaaaaaatcttggtgtgccattaaatctttattattggcccaacttcctccgaaaatccaaaccatgacgacgcaaaattggcctgacttctcctcccagaacctcccttccaatcacgcaaacggcggcagccgcagcaaccgctggacctcaacaacaaaacccttcatggatggatgagtttctcgacttctcagcgactcgccgtgggactcaccgtcgttctataagcgactccattgctttccttgaaccaccttcctccggcgtcggaaaccaccacttcgataggtttgacgacgagcaattcatgtccatgttcaacgacgacgtacacaacaataaccacaatcatcatcatcatcacagcatcaacggcaatgtgggtcccacgcgttcatcctccaacacctccacgccgtccgatcataatagccttagcgacgacgacaacaacaaagaagcaccaccgtccgatcatgatcatcacatggacaataatgtagccaatcaaaacaacgccgccggtaacaattacaacgaatcagacgaggtccaaagccagtgcaagacggagccacaagatggtccgtcggcgaatcaaaactccggtggaagctccggtaatcgtattcacgaccctaaaagggtaaaaaggtaattaacatttttatttactatttcccaaaaccccaaggaaggtcatgcatgcacgtacagtttataatagtatctgataattcgatacaccgtttttataaaatagttaaattagtgtcacatcgataaaatctaatttttgtttttgctgaaattttctacagaattttagcaaataggcaatcagcacagagatcaagggtgaggaaattgcaatacatatcagagcttgaaaggagcgttacttcattgcaggtaattaatttacacacaaagatatactatgtttattaatgtaaaacaatctaaataaaaagtttaaatactgatcaacaaatcatttaaaattgtggaatgaagactgaagtgtcagtgttatcgccaagagttgcgtttttggatcatcagcgattgcttctcaacgtcgacaatagtgctatcaagcaacgaatcgcagctttagcacaagataagattttcaaagacggtaattttctattttgaactttttttcaattttctaac

SEQ ID NO: 8918 - DNA, 1362 bp, Arabidopsis thaliana landsberg
caggtcttattgtccgtcctgttatgaccagctactacgaagggtgttttttcagaaacagaccattcaacaagtacaacgtctacactagccctgaccagaccattctttgtcaagacagcaagcagagcatgtactgtcagcttttctgtggtctaatacagcgatctcatgatctaagagtcggagctgtctttgcctctgcctttcttcgagcagtcaagttcttggaggatcattacaaagagctttgcgctgacattagaaccggtactgtcactagctggatcactgactcattctgcagagactcggtcttgttgatccttaatggtccaaatcaagaattggttgataaaatgagagtgggtgcgctgaaaagtcgtgggaaggaattttgaggaggatattggcctaaggctaaatatgtggaggtgattgtgactggttcgatggctcaatacattccgacactagagttttatagcggaggtttaccgttggtttcaacgatgtatgcttcctctgagtgttactttggtatcaaccttaatccgttgtgtgatcctgccgatgtttcctacacgcttcttcctaacatggcttacttcgagttcttgcccgtcgacgacaaatcccacgaagagattcactttgcaactcactccaacaccgatgatgatgatgatgctctcaaggaagatctcatcgtcaatcttgttaatgtcgaagtcggtcaatactacgaaatcgtcatcactacattcacaggtcagtgactctctatacgaacacaatctaggtctgatgtggattctaaaacggatagtaacttgtagcacaagtaacctgttacatatgtttttgtcaataggtttgtacagatacagagtaggcgatattctaaaagtgacgggtttccacaacaaagcgcctcaattccgtttcgtgcagcgaagaaacgttgtactaagcatcgacactgacaaaacgagcgaagaagatctactaaacgcagtgacacaagctaaactaaaccatcttcaacatccttcaagcctcttgctcacggagtacacaagctacgcagacacgtcatcaatcccagggcattacgtgctcttctgggagctaaagccacgtcacagcaatgacccaccaaagcttgacgacaagacaatggaggattgttgctctgaggttgaggattgtttggattacgtctacaggagatgcaggaacagggacaagtcgattgggccattggagataagagtggtgagtttgggcacgtctgattcgttaatggatatttgtgtctccaaggatcatctttgaatcagtataagagtccaagatgtg

SEQ ID NO: 8919 - DNA, 1073 bp, Arabidopsis thaliana landsberg
acttcgcgcagccttcatgacataggacatgagcaagataggatctgattctacagaaggatcaatcattttacagttactgttaatctttgcatcaaatgtagcaatgacagaaacaggaagtgatccgcaacgttcgccatccctttgcaatgccgcccttaggtgacctcctagaggatgatcaactgaaagaaactgcaatggcaacaacttaaacgttaatgccaatagagagaaaaaccaaattaacttttggactatggacttgcttatgacctgtactaacctcatcagaaaatatatacttaatgcgttcaacgatattattccaagcttcatccacagttatatcaacatcatcatcatcctgagactgaattcctagctacaacatgaatagtattgtactttttcacataaacagtgttaagaagtctactaaacaataagagcagagagatgtgtcaaaagtataccttctcgagagccaattcagcagcagattgttcggaatccttttttctcttgaagacatttgatacaacagaaaattctggtagctgcaagtggcaacgatagaggcaatcattcgaagaaacatgaacttcctcaattctgtaaattgctttaacaccaaacttctgaagtatcatctactttggagtaagagtctgcttctcctcacccgccattacaaactcactgaggcttctttctacactgagacaaacaaaagaactatctatgattcatatagatacttcaaagatcatgaaagatggtaacttcagtgcaaactgtacggctgctcactgcacagaaccccaaaaaactagggtttttgaaagagatacaagatgatgacctaaattcggagacttcaggttttaagacagacaacagtaagatgaaacagaggaacatgagtcaaaagcagcgatttttcgcgcgaatgaagcagaaaaacaggtagaggttgaagtaacattacgaggaacgaattgtcataaacagaaatgatggtgtgatgaagtcgaatttcagaaagaacccataagtaacgaagcgga

SEQ ID NO: 8920 - DNA, 759 bp, Arabidopsis thaliana landsberg
ctccgaaggaaaaaaccgtatcctccagcaactattaaagcactggctactactcatgtgaaaagcataaaagctgaggctgtgcatttacaatgtaccgttggcggtgaagaggttgttaagccagtcactcttgatatttcatcaggtcggtattacttggatattattgctgacaagcttggattgaaggatggcagccaagtgatgatatcaaggtgagtattttgtcttctctgtcaataaatggagctttctcagttttaatcttactaaagctaattttggattttcatcaggactattggcaaaacttcctctggctatgagtgtagagtatatgctgccattcctaagttgaagtcttccgataattcatggaaagcccgtgaaaaacgtccaatcattgaatcatcacatcttgaaaagtctcggaatgcaaaagcaagttttgtttgtggtgtagatattcacggtgatgcgatcgtggcatctgttggttacccatggaggtcccatgatcttgaacatgatggtgtaaccttaaagtcgttttacaagtctcttacctctaccaacttttgctccgttttatgttttgtttttcctttgtatatcttttggtctagtgctgaagcactaaatatctcaccagttttttggcctctgtaggatatgttgcggtatttctcctaatggaatctataaattatcccgagaagcgataatagcggcgcaggtacctttttcattcactac

SEQ ID NO: 8921 - DNA, 768 bp, Arabidopsis thaliana landsberg
  unsure (1)..(768): unsure at all n locations
caatagctttccatagaaatcgctaagaacactttatcaaactcctctcctggcgaccgaacattctttccagtttgcagttcagtatttagctcatcgcggacaaaccgatacaatggataagaccgacattccttaatccggttagctatagccgatgttccttcctcgtattcaacccggacgcgttctacttctttagggnnnnnnnnnnnnnnnnnnnnnnnnnnnnntccgattttgtggaaaaccgatgtcgcggaattggcctcgcgttctggatccgctaaagcgtggtctacaagaatgtgtctaagtttctgcattagcgggtaagtgaggctgcagggatcgtctgcgtatgagaacacgtactctcggtcaaccacttggaggacatcacgttctgtgaaccttgacggatgtagctccccgttggcaccaacggttaagacccgtttcgccacctgactcactgctgatttaaccgccttcttcagattctcttcaagatgtcttagatcaacggcttggcaaagcgcgactaagtaggttgtggacattagcttgaggatatccactgcttctgcagttttcctgctagagattagccctagggaattaacgtcttggttatgctgctctgcgctttggacatggttggtcacgggattagccaggaactgaagctcggagcaataagaagccatggctatttccgcgcccttaaacccgtaatcaagactagggtttctcccaccagataga

SEQ ID NO: 8922 - DNA, 665 bp, Arabidopsis thaliana landsberg
gatacgatcgacacttcttgattcggttagccacattaaatgtaccgttctcgtactctgtcctgactcgttccacttctttagggaggagaaatttcagctcggcctcgaacgctccgattttccgaaaaaccgtgtcggtctcgccttccggttcagctaaagctttgtcgaagaggacatgtctcagcttctgcattaaagggttagtgaggctgcttgggtcatcaacataggagaagacgtattcgcggttgacaactccaagaatatcgtcgtgtttgcggaatggttcgattgctagaacgcttttggcagtgtggctcacaacctcattaaccgctttcttgagaatttcttcaaggtgtctcagatcaaaggcttggcacaaagctaccaagtaagtcgttgacatgagcttgaggataaccacagcttctgctgtagttcggctcgagatcagcccaagagagttaacatcttgattgtgttgagaagcgctttcgacatggttcgtcacaggatttgctaggaactgaagctctgagcaataagaagccatggcgacttctgcgccttttaacccgtaatcaagactagggtttctaccaccagatagattagagggtaacccgttgttgtagaaatcatttacgagttcagtc

SEQ ID NO: 8923 - DNA, 628 bp, Arabidopsis thaliana landsberg
  unsure (1)..(628): unsure at all n locations
tgaaactgcatacacaaattatgtgtccagaccaaaaactgtgtcttagactcaaattggtccaatcggcactataccaaccaacaccttcttagcaacaacactccattgcgactttttatcataatggatcaaaagaatagtaaaacgacactgcattcaacatacaaacaaacaacttataggttttcagatcttgacaatgttcattttcgtggaaatcaagaaatatataaaacacaaatcatgtaaagtagattaaaaagttggtaagaatcttggatgtagatctatcgaaaaagattttcaacagattgaaaccggagctccgttccactccttgagacattccaacaacggatcaataagctttccatcagaaatcgctaagaacactttatcaaactcctctcctggcgaccgaacattctctccagtaagcagttcagtatttagctcatcgcggacaaaccgatacaatggataagaccgacattccttaatccggttagctatagccgatgttccttcctcgtattcaaccggacgcgttctacttctttagggnnnnnnnnnnnnnnnnnnnnnnnnnnnnntccgattttgtggaaactgatgtcgcggaatt

SEQ ID NO: 8924 - DNA, 1580 bp, Arabidopsis thaliana landsberg
atccgaagatcgcaaactcacagcgacaaaggaagatatactgccacctatcattctagatttcgagaaaggacttggtgagaagtgtaaacaatcatctggttctggtatagacttttcggtctttgaggacgttgagctgttcaaggcggccgcagacacagagatctatccattagcggttaaggcagaagcagctccctcaggtggtgagaatgaagaagaagaaaggtcggggtcgaagaatgcgcagattactcaagcggtttatgagaaggataaaggagagattaagattagagtggtgaagcagatactatgggttaatggaacgagatatgagttgcaggagatttatgggattgggaatacagttgagggggatgatgattcagctgatgatgctaatgatcctggtaaagaatgtgttatatgtttgtctgaaccacgagacaccactgttcttccatgtcgacatatggtaagtgaaagctgatgatttactactattatgtgatgatggacatatatatagatgttaaaaattgtttgggtttggtggtgcagtgtatgtgtagcggatgtgctaaggttgtgaggtttcagacaaatcgatgccccatttgcaggcaacctgttgaaaggcttttggagataaaagttcacggtaacaacggaagcgggaataacaccggacagggagaaacagttgaacaagagtagctaaacacggccgagtatggattgaaatgccatcgaaatattagtagtatatgcatgtttgatccttgtatgttaacaacaaaatgtgtgattgtcaattcataaatatagagattacgaaatcatttggagtcataatgacacaatacttgaaacattcttcattagatacaacaacaaagcaggcagtttcttacttattttgttgctcaaccggaagttgcagtggcaggtgaagccattttagttgcaataagacagaaacttaaacatggaaaacacgagatatagtagcggcaacatgacattaaattatatagctgaccccttcgtttcttatttaaaaggggctatctccaacgttttgtggtcaaatgggcctgcatttctttttatccgcctctactattgggccctaagcccgagttttccggtttcgtaaacaataggttcatcatacatgtgtaatttcaatgttttggaaaattcggttcacagcttcgttaaaacatcaatcatctcatatctgtgactcgtagtttggttaaaatatgatcccaaaaaagagagagacagatccaaaaaatcatctcatatctgtgtctctctctttgtttaaatttaaaatgcttgccgtagacaaaacatacaaatacgaggctgtaataaacaagtatttaatataataataaggacaaataaacggaccaaatttaggccgagaaaatgggacattgtgatataatctcaaaaagaattgaaatttgtatgatcgatcagatatctcaatttcaggaacccagaaagagggacttgtcttttacctccaaagggttcctgccgtttcttttcacaga

SEQ ID NO: 8925 - DNA, 1679 bp, Arabidopsis thaliana landsberg
tttttgtagttcgtcacaaaacgatcaagctcccatagagtctcattgtcgacagcttctatatccagctcaatttcgtccccatcttgagctaaatgtccgtttctcttcctgagaatctgaagcaactgaccaagcttctcaggaggtaagtcttgtagattcataccaagttttgacttctcttccatcgtcatcaacctcttatttggatccttagccttaggcttcggcaacttccccttccttccttttgacacttcactcacatcaggaggtgcttctacttcaatttcaagctgtggaggtggtggttgaggctgcggaagttcaggctgtatcaccggaggagggggaggaggagaaggagattgaacgcgtgacggctcgactaattgaggaggcaatgtaggttgtggcggcttcactgaatcaagcttcttcgcaatagatatttgttcggttcctttcctaggattcgccaccattggcggattctgattccactgtctttgcttgaagtcaggtttgaagtctggttcaggacgagatgaagaaccagtgagtttaagctgctgagcctcaaacttcttaaaagcaggattgaacattccatcgaaatgatccaaaagcttatcagccataaaatacacatcttgtccctttggattatacgtcattgcattgtcgaatgtcaatctgacatcagtagcaaaatcaatcggcgaaacgtagaatcctttatcaagattcaatttcactgtacccagatccataggtttcttcacaacctgatgataatcatgaagccctaaaccaaccacatcaacaggagtgttgaacacccacgcccatttatgcttcattagcttcaccaagatctgactacaggtattcaacataccggccaataatttttccgactccggatccgacggaccaaattgattgcttcgcttgagacctgacacatttttcttctgtttcttcttcttcggtccaaggtcattcttttcaccggtgaagctattcaacggagctgatcgaacggcgggtacctctgggatagtataaccttgctgagtctcgaacgtccctgactcgatccgttctctcaggatccgaatctgctcgagctctgaggtaaagcgcttctttagctccctgagctgacttgaggtgtacccagcgagattaaaagtagcatagcttccaaattccgacgagtcatcgcactgcttgctcgaattgctcctttcgaaattagggttagggttagggttgaagagcggaaggttattggtgttttcggtgacggattggtttgtaaatttcctcataaaaacggcgccgcattgttcctggtacgacggttcgtttaaggtagcgaaaacagccggagccatacgaatcgcaaggtcatttctggggttttcactcttctcgagcttttagaagaaaaaaaaattcacctcccaaaaaaggcgcgggaaaattacatcaccggcgaaaattccggcgatcggggaactgaaaaattttagagcttcagaaaaagggatgaaaagagggttttttgggagatggtcgatgatgatgaggaacaagatgggaggcatcatctcttcataaaggaaattggaatctgaccgacataacgcttagtttaaatctaaccg

SEQ ID NO: 8926 - DNA, 1151 bp, Arabidopsis thaliana landsberg
atcgatcttcatactttgtcctcaatggtatggtttgaacaatctcttttcggaagatcatccatcctaaaattactttagccaagcacacttaactgtggagttctctcagcatgtttgaccgaaaagataaatgctatttggtgatataggtgtccaatttaattcttttgaacctaaccgcatgcaccaccatatttttgaaactaaggtgttatatttcaccctgactaacaaatcataacgtcttcgttgcaaaccaagaccgtcaccccaatgatgtgagctttcttgacttcatacacgtatgaatttggctccgatataacttgtaacgccctaaccgcccatactagtgggccctacatcttctctcggacccatggacccacccatgtccgatggtacgttgttacattcgaaatattttaaagagttgtttaccgaccctacaaatcatcagatgatctttcttcatgctttctcttcactcgcatagtttcgacaatcattttttggaaggtcactattctaaagttactccagcccaaatatgcttaactgtaaagttctcttagcatatttaaccgaaaaggtaaatatactttggtgacatagatgaccaaatattttcttttacatttaccgcatgcaccaccatattttaaaaaacagaatattataaaagcagagaacagtctcatccacctgagcacgagtaacattaattgttaggattcgaattttaacgttgttcttcagatcttaaaaataatatttaggcctagattattttttagacttgaattataacacaaacagaggataaattgtttgaatattttaaactaaaaccaagacgaaaaaaacttggataataagttgggttcgaacaatcaagatagttaaaactattattcaacctctaagctaaattaatataaaaaatgagtattttagataattttgaaatttatataattgtaggaaaaattgagatattatttaaaaagaagtagtgaaggattttttttaataatttgtgtatcttatgccatattgatatattaaaaaaaattcaaatagataattatataaatttgaaagggatgcaatgcaaaagttttggaagaacaattcttaaattcact

SEQ ID NO: 8927 - DNA, 764 bp, Arabidopsis thaliana landsberg
tgtggaattatctgacccaaaaaagacttggcaatgtgtacaccacttaaattctagggaaatttgggaaactaacgcaaaaaaaaactttaattaagaaactatcacttgccaaaaaagaaggtgatattttctgtattttctgtgtatatgacaattttgccctcatatatttttccatctcttttgtttctctcgtcttcttctcaaattattttttctttcacgttgacttctcctccgccatagtccgaaacagaggcatcacagcaacccaactcgaaccctcgatctcctcatcactctcaccaccaccaccaccgccactctttttcgactccctcttccacagaatcttcaaatcctaccgccggagctcgccgtaatccatttcggagatgtcgtatgggttgtagatcactagatctatcctgggtatgtcgtttcaattccatattctgatcatcctcaacatcaaaatccataatagagagctgcatgagaacacggcggcttgctcttcctctccaagcattagtagttgatttgttaccatgttcattcataacttcgtaatctccaaattcatcagctcatgtttcaataattcactcaattaatttatgatcaactttgagaacttgatttttttttttttcttattattgtctgtttcaaatctccactcatggcagcaatactatactattttataaatgcaaagtcttttgtttttattgaatttgatattttcttataccaat

SEQ ID NO: 8928 - DNA, 1117 bp, Arabidopsis thaliana landsberg
tctgatcatcctcaacatcaaaatccataagagagagctgcatttgaagcacggcggcttgctcttcctctgcaaggagttagtaatttattcgctactatgtccattcataacttcgtaatccccacattcgtcagcccatgtttcaataattcactcaatttaggatcaactttgagaacttgattttttttgtttcttattattgtctgtttcaaatctccactcatggcagcaatactatactatttcaatattttttagtcctttgtttttattgaatttgatattttcttataaatgttagcttcttattcttggttcaataattcagcttgagttattgaaactgtcgaactctctaatttcatgtttattatatagaacacaaaatcattagtagtttgaggataaaagaattagagtttaattgattggatcatgtctaaaattagtttctttggattttctaaattctcttagggtttagatttcttccatcaaaactctagtttaattcaatcaaaacatactataatatatgtttttggttatattttttgttgtccaatttattttttacaatacttcatgaatttgttatgaacaattaaagtgtataatatgatatatttttatgtataatagtccatttatattttttatacagctaaacactaaaattgtcttttccattgtctctcatgctagtttattaattgttacaattatgctgctatattcttaattcatttattaaatatggctattcttgcaaatcaccaaaagtaaaaatactcatctacataaacactcaaaaaaatgggatcaattacgaataaagcacttaaaattctatgtcgttgtcgatacaggcacaaaatgcatgtgcttatagaattaagtacttctatctcttgatattgacgattttacccttcgtcacccagacaaacctaataatttcctcttctctctttcttaattttttttagttgaattatctctcacccacacaaccataaggaatccaaaacccaggttcgaaacacacacaaaccatacagaagaatactcgtaattgctattgttcaatgactaccataattattcatct

SEQ ID NO: 8929 - DNA, 1642 bp, Arabidopsis thaliana landsberg
aatttgctggatcagctaagttgtggctttcaagagtttccattgaaataagatcactttcagagtatactcatctcctagtaaagcagattttcagacagtctttgagctcctttcaaatgctttgaggaaagtaccgatctcagaatctgagagcttgtggctaatggtatgtgactaatatattttctagacaatacactagtttgttaagactacactaataaaatgcttattgtattgcaggcttttaatttctttgctcatcagcgaacttatttggacaaacttgtagagatgtccatcctatcagcaaccaaaagccatgggagcgaccatgtgttttctcttgcttccacagtggtgaaatttgttcttgaaacaaaaggggcccacagtgcgaggaagatatacaagaggtgagtcactactcctacagtcccttgagtcacacatggactttattctcaccactgttaccgtaaaactgcatgtgctgggttctttctggtcccagtcttgttctatacaaaggttgcattgaaatagagaccaacctcatatcagtaggtgataaagatggtctcagtaatgcccggaagctgtatgattctgctgttgcaagttacagtcaagacttggagctgtggaagaattactactcattggagacaaaggtaaagtggattcttaataccctgaccaaaaccaatactatgacttagtgtcaagtatgctaactgacaatctttctgatgtttattgcagctgggaacatcagagacagccaatggagtgtattggcgtgcgagaaagactctgaatgaatccgcggatttcatagtttgatctctgatttataggtagtctagtatgtatgatgaaggaaacactatgtttgcctcgtatttgtggatgcaggtttcagttatgtgatccttaagatatgaattttggttgtaacagaacaggagtcgatgtactactttatgagtctagttatactctaaaacacttttttgatacaaaaacatgttgaagttcatacatgcctctacgtctttggtttcacgtttcacatgtttcacatgtttctgatgaatttattctcgtatcctctttacctggtgacgacttggtctttatgattctaatgtttgttgttgataataaaagtatacatcacttaagggatcccatatggttactgtgttcaaaacaagacgtcagggctttttgggtattaagaaaatgtctctttccatgtcccatctcctaaatggctaaatcacagaccgagtagctgtgccattgacaacttcgtctcacaaagctgtcaacagctaataaaataaagagtaacaacaaactattaataacacttttccctgccactagccaaaaatctagacatgcactaaactcaggcatgctcgtctgcatgttcttcttggaaatcaactttttctacttttttttcaattgctccattcacaacccatagataagataattaactgtttggagttttagaataagttattaaatgcaacgaacaaagtctgagacagacatttttttttcttttcttaatggactgccttcttcaagctttgacattgctggtgaagtcgacacaagt

SEQ ID NO: 8930 - DNA, 1819 bp, Arabidopsis thaliana landsberg
accttaaaccaatttaaaatgttgggataaatataaattctcgtaattatctgatgttatatttattcagatacaacttgagatttggtttccaagctattacaaattctcagatatttcagtcaattagggttttgttgccaaaagctatcaaaagaatcaatcgttctatttgcaatggagttcgaaaggtatctgggggaaggttcgtttggatcggtgagccttttcagttacaaaagacgatgcgacgttgagactctctacaccgccgtgaaacctctgacgatgctaagtctctctacgaagagtttcagatcctgtctaaattcaagggttgctcgagaatcgtccaatgctacggtagcggagtagaacagagacttaacgacaagggttacgtagagtacacgattcctatggagtacgcagccggaggaagcttgagcgatttcatggaccgattcaacgacaaaaaattgcctgatccgatgatcagaaagtttactcgtatgcttctcgagggtttagccacaattcacagacacggctatgttcactgcgatctcaaacccgagaacatccttgttttccctggttctgtctgcgatctcaaattgaagatttctgattttgggttgtcgaaaagagatggagacactacgtggtggcatcctcttaaatcgtatgcgggaacaccgatctatatgtcgccggagtctatctctcacggggagatagggaaaggacttgacttatggttgttgggatgtgttgtgttggagatgtacactgggaagagaccatggtggcatactaactatgaactagaagatctcatgaagtgttacgagccattgtttccgcctaatcttccttgtgatgcaaaactctttctcatgacctgctttgcgcctgaaccagatgagaggaaagacgcgttgacattgttgagacaaagcttctttcgtcgagatgtcaataagttgacaaagcttctgaaggtttataattgtaatgatttcaccctggaactgaagaaacttagacagatgctttcggaaattaggagtatgggttaatttgaagttgatgagctctgcaagtcatgagaaagagttttcagagtttgatacaacggtcgtcggtggggatgtgtctaacacagagaatcatgcctttgggttagagaattgaggtaatcttaatctacttatacatttttggtaaagcttttgtaaaaaatcctctatacaaatactatttagtttttaatctctacaaaaaatatctaaacaaaatattttaaaatacaaaacttacaaatcatcaatcaacattaaatacttacataaatactttcctttcttaacatccaatttgtgaataatcacaattgagttattgcataaaatatcctccagcaaaattttttgtccaaaagtgaatacgatttaatttttactccctacaaaatctattctacgaagattttattttaaatttatatcattaattaaattttatctttattgcactacattcaattaattgctaatttcttaaactctctttacctatattaaatataaatatataaattcttctttcacttttatttgttcttatttctaatttattttagttttatataaaaatatatatagttaataaatgttagatatttttctccatatgatgtaattcaaattttaaaaaacttacatacattactcaatcaaatttttaaaaacttcatttttttagtcattttcatttatactctctttttaaattttaatggccagtttacctggat

SEQ ID NO: 8931 - DNA, 2211 bp, Arabidopsis thaliana landsberg
gtaatcggataagattcaagattattaattcgaagatcttgtactcttggtttctcggattttttgttaagcagttcgaaaatgagaagatgaattcaactgatcattaagaaaagaaaaaaaagagttccatttcagcttttaagattaagacgtttttttgactaagaaacaaaaaacttacctacgtattttatatttggattaaaatgtattgttaaattcagttttgaagtactggtgaaccatgcgagtttgagtggtttcaatatttgtttaaagcaaagcattttgatttaaaataacgccagggtccaaaatgaacgaaacgatgaatccatgactcatagtacacttattttcttggttaatgagtcgaatcatcgaatgatcttctgacacctactttctcctttttcacatttctacacttgttgaatcacaacacgcaattgcctcagcccccacatgccacatcgcgacaatctagcggaatctttttgcttttggtcttttatggtcaatcatcaaatatctcatacatataccaaagttaaaagttattttctaaccataaatagtgactgtaacacccgaacttacttacattaacacatctactaaaacttccaaatttgttttggtagacaatagtgtcagtgtaataggttctgttcttgtggacatgatttaaaagacaataatgtttttttggtaatcgagtttcagaaaagctaaactagttttgagtatataatggctatttacgttaattgtgtattgtacaagtcatcttccacttcaacaaacataatccaaaacccatttgtttttttctgtcaagcaataaacgtttcaagtaataccatagttaaataaagtcttgtatctatgtgaaaacgtcactgatccaaatggtaaaataatggattagtatctctacaacgttatcaagacgaagagaacaaaacaacaaaattgccacacaacaactgcataatataaaagttggaaacatcaatgtttttcgagtcttcattggtcaagcaataactattaaaaaaagactgttcatatgagataaaaatggaaaatgaatggacatgctcttcgtggaaagagacgtggaaattttccatgagtttcttttgtcttctttcttactttttctattatttcttttccaattctcagatttttctaataatattgtggaaaaaacaaacacatccattgaataaagacaacaaaagattgtattaagacattgtgtgactaataatgtcttctaaccccaaatgaaaccttcttccttaaggttcttctcttcttctttatatatctctttcacctctcactttcactctccatctacatataacacagtgagaaaaaacagagcaaaaacagagagatattacgatgtttttctccaaggatcttccttctcctacttcggttttcacagcttacgcatcaatggcgggttacatgatgatgatacgatcaatggctcacgagctaatcccagctccactccaagatttcatctacaggactctccggtctctcttcttccgttcttcttcctccactttgactctaaccatcgacgacgacaacatgggtatgaacaacgagatctaccgagctgctcagacttatctctccaccaagatcagtcctgacgcagtcagactcagaatcagtaaaggccataaggataaacatgtcaatttgtatctcagcgacggagaaatcgtcaacgatgtgtacgaagatgtccagctagtatggaggtttgttactgacggtggagacaagaaaggaggcggcggaggagtaggaggaagaggaggaggaggaggaagaagaggtggtatggacgatgacggtaaaagcgagtacttcgagctgagtttcgacaagaaacataaagatttgatattgaactcttatgtgccttacatcgagagtaaagctaaagagataagagacgagagaagaatcttgatgctgcattctctcaacagtcttagatgggaatcagttattcttgaacacccttcgacctttgagacaatggctatggaagatgatctcaaacgtgacgtcatcgaggatcttgatcggttcataagaaggaaagagtttaacaagagagtagggaaagcttggaagaggggttacttggtgttggctcctcagggt

SEQ ID NO: 8932 - DNA, 572 bp, Arabidopsis thaliana landsberg
gtacacaccctatcggttattgctcttcttgtcagaattacaaagggcacctgtattcacttccattttcagctactaagcaaccaattcacatgtttctgcacaaaaacctgacaacacataattatttattggtgctgtaggttgagtagtcagccctgctctgataactttttcactataatctctacataaattaccaggaaaatagtgctgaatagaaaatttgctgtctacataaccttactactttgattatacatccaggttgaccttgaatcactgccagatacggctcctacagacagatttgttagtttacgaggcggttggagtttgttcggaaagggatctactggagaaatactactccggcttacatacaaagcatacgtggaggatgaagaagatgataaacgcatcgcacaagccatatatgcagatgcttccgatgatgaaatgtctgattcggaagaacctagctcatttgtgcagattgacaagattccttcagatgatattggtcaagagtcatttatgaacgtgttgtctgcattgattatgagcgagga

SEQ ID NO: 8933 - DNA, 1177 bp, Arabidopsis thaliana landsberg
tcatgcatgcaggtcgactctagaggatcccctttggttcttctactttctctactctatacattatgttgttagcttcggttacttgcacttaggatcctttggataaaaggccaaaattaaggtcaacgtcttttaagatagttttcgtttgttgagagcgtttaaatcctccaacattaacattcataaaaataaaaaaaaatattacattcaacaatgaagaggcgaagtggttgtaatgtgcacaaaaacgcccaaagcaagtaagcaacaataatacgttgacctttgaccaaaactgtatgatggccaaagggcacaagtaaccgaaaccaacagagtggagagagtagaaccacaagaagaaagaaaacagaggaggcaacttttttagtttaggtaatgaccgtttcaaagtaactgccattttctattttccttcacatgttgcatcataactaaaaaaattaatgaccgtttcttttgcgtcctcattgacgacaacacacacaaacctctctccctttttttctcctcttcacaacactcttttcttgatttttatacgcattggctcaattttgagtctgaatctcgtgatggagaagagtgtcatcatgtttgggaaaagcgagtccccgagattaccgactaggctgcagaggcaagctcccgcggctctgaatcttggtcgtgttcccgagaatccctttctgcagcagtctggtgatgaggttgcaggtgcacctattcctctgctttcacctctctttgtgtctccaaattcgcactcttctcttcctagagaagggcaagtaaatccaaactcgcaagcttctcccactagagaagggcacgattttacgtttccggtgagtcttactgaaaagaaaggatctcagccttcgatggaccacaaaatagagtggcaacattcggctaagggcgaccacagtgaccagatgagtctcttaaatatgtttcagaccaagttcctgcttgtagatcatccacagtgagggttttagcattaacccatggtctcttgatgtttttcaatagttttcttgttaacccattttctcaagatgctgttataagatattagctagatacaactgtaagcaagatccagtttttgggaagttaattttccattgcgtgaaagacaata

SEQ ID NO: 8934 - DNA, 934 bp, Arabidopsis thaliana landsberg
gcggatgacgaaccatctcaccatctctttttgtctctctcttgttttttttaatatcatcagcacggttacataaaattcgtgatccatgaagttggctttcttgtcgttttacttcatcaccccatttttttaaagtctccatctttatagttgttcaactctccaccaccaccattgtcaccaccacatttaaacacacactttcacttgtagtgggattcgaaagtgcgttttattcatttgttttactgtttttgataacctcaaaatttgcctaaattttattctctataaatccttatatgttttacttacattcctaaagttttcaactttcttgagcttcaaaaagtacctccaatggcttcttctgcatttgcttttccttcttacataataaccaaaggaggactttcaactgattcttgtaaatcaacttctttgtcttcttctagatctttggttacagatcttccatcaccatgtctgaaacccaacaacaattcccatgtaagttcacttctctcttctctgcttcatcatggaacttgatttaagaactatgagattttgtagcttgcccatttgctgaaatcttgaattaaataatgggtttactttgtttttgacaaaagtcaaacaaatttgactccttttcttagttactttattggaaatctgtggaaaatatagtgaaattagaccaataatattgcttctttggttctgatttctgggaactgattagagaaaatgacagcttttgcgatttgggttttgtgttgtggtacagtcaaacagaagagcaaaagtgtgtgcttcacttgcagagaagggtgaatattatttaaacagaccaccaactccattacttgacactattaactaccccatcacatgaaaaatctttcttgcaagtaaaagatctagc

SEQ ID NO: 8935 - DNA, 443 bp, Arabidopsis thaliana landsberg
cattgagcattaatcacttttctctccttattattctctttgtattatagtttgatgtggctcagtacaaaaaatttcattatggagcaaagggaaatcttaacatctgggaacccgaagtttcacctaatcaattcagtcttgcaagtatcactatctctgcaggatcaaatgaacagtttcaaggcattagagctggatggatagtaagtcataatcttgtgttttccctcgctttctctgaattgcactcatccatggtgaagatatagaaaatttaccaaatatacatattccaaaatatcgctcaggtgtaccaatggctaaacaagaatcacagccgcttatacacatattggacagtaagatcttaaacctctaaagagatttacaataatacatttgacctcttttttggtattttcatgttgtgtctcgccata

SEQ ID NO: 8936 - DNA, 1487 bp, Arabidopsis thaliana landsberg
cttacaaagtcacattacgataatcttacatcgttaagttcttaattaacaagaaaagaaaaacagagaaaaaccgttaacgttattattcataaactccgttacttattagtcacgtatcgcataaactcaccgtcagattcaatcccagccatagtctccggcgataaaaccacctccaaatcaacagtcccgtttccttccctccccggaaacgccgaaatcttcccatcaaacttattcgaccgtccacttctaaccgccaccggccttccccacccgaaatcattatcatacatcggaaacctcggagagcttcccatagtaaccgaagctccgtcggcatttccaagaggaaaacacctgggattcgcttcccaatccgccacaacgctacgaatcctcccgtcttgatgagccgcaacactctggttaagctgatcagcgcaccatttaagatcacgtgacaaaacctctgccgcagtcgcaaacgtaggaacgctttgaatcgcgtttccgaaatactccggattcagtttaggactcaaacggtgacgacaattcacagccatacgaaacgtagtcgttttcgaactcggaagcttcctcgcacgtgtgatcgcacgccaaagcaacgcgcatagagattgaaacgacgagatctcaaccgcgacgggtttcgaaacggcgtcgtttctcccaaacaaactctccaacatttccgttaaaataccgttttcttttccgttaagtttatcgttgctttgtttccctaacaactcaacaccgtctatttcgccgttatcaaccgtcaaccatttcttcttgttcaccacagctttaagctcttgaatcgattctctactgaaactgaatatccgttcacgtaacggcgcgttttcgtcaaatgtcacctttggaccaccttgagggactttgagcacagccggtgagattagcacagactcccgcgtaaaatcaggctgacgtgtcacattcttagcacctctagaaacctccgcgaaggtgttaatgaaattccacagcgaggttccgtcagtcacggcgtggttaacggagcatccgatgaaaacgccgtcgttcagttccgtcacttgaacggcgaggattggtctgttatgtccctcgtagctcacagctctgtcgtaggtgaaaaactctttgactacatcgggaacgtcgattccggcgatcacgtcgctcacgtggatggattttgcttgggcgaaaacaaaatcggcgccggcgtcattgcaggtgaggaaaacgtggccggaggaggaggttgagagacggccagcgagaggagggaagtgggtgagagtgattgagagagagtgtttgaggtgtgagataagcgcggggagaggaaggttagggcacgtgaaaagacaacctttttggatgtagtggcaagagagcatgggaagatcggagacggagagcttgaggtcgccgagggttga

SEQ ID NO: 8937 - DNA, 1759 bp, Arabidopsis thaliana landsberg
  unsure (1)..(1759): unsure at all n locations
aaaactttgctcaccgatcgattcatcaatttcgatttggtttcatctttttctctattgattcggatttcttatcgagcatgatctcctcgaagcgagctccattttctttgaatcaagctttaatccctttatttgttagcttggtttcttagatttgagttcttattcgtttgtttgaagcgttttattcatctcggactcagtcttctcatcttcttcgaagtttgacttcctggtctatgtcgcgcgcagacttcactgcgtaccatcttgtgtctcgtttctatctctttttatgagagtctgagtacgtacactcacatattgttgaactttatatgcgttagctttcaccagcttgtctgacagcgtcttaggatgcatcgttctgtgtcccgcttgcagagaacgctttgttcgatatggaattttaacttgactccaccaantgttttcattagtgtttattcaccttgtgttatttgatgtgcgtatagcacttgattttatgatgcactattgtgatggaaccatttcttagttttgttgagtctatggctccaccaggagagatttttgtcgatggcaatttatgtggactatatccatggttgaaatttgttgaatgagccaatgttttcgttctgatttctgctgcgaccaccagatttgcaatttaatgtggttagtccatgttttctgactttgctttttgagatatttgatatgtagatatgttcatcgataggagagctaaagttagaaaaatttaagagattttttcatatggaatcgataaaagctgatttgacttctttgaagctaattgtcatggatatatgcattcagtctcccttcgtttgtgagacaaagtttatgaggttgatgaactttgaaattttgtgagtgatacctgctcatgtagctgctcatattgaaggctctcatgttactacaagggctactatgttttgtcaattaagcctctatgtctagacaattatgattcagtttctttggttttgtttgatctctattgatatgcaactcaccattgccacaattgattttggctgttttatggcaaggtaattgttggtttcaaggtttcagagaatgagctaaaaagatatgcttcatcaacatttgtttcaagacagtgggagttaatagtgatgtttttgaactggttatgctgcaccgagacgggtacggggacggggacgaaaaacggcatatttaaaatttgtggatacgcggacggcatcgggacgacaataacaatagtattaaaaatatcgatagatccatagtataaagaaagtaactcataaatcctaacataaaagaaatttgagtataaaatattaaagaataataaaaataagttactcattgatcaattcattttcaaattaaggctcatctaatgaaaaagccgcaaactccaagaagccgacatcctccctagtatcatatgtatctccaccaacatcccacatcttgattttttcttcttcatattgaccacaatttcttgataaactaggttgactaagtatcttcaaagccaaagtctggagatatggagtttcagcaccaaagttagcctaccaactcttaggttccatagtactcatcgctacaatgcatgataaatctgcaaaaacaccattcctcatcgagaataatgcatacttatccagaactcttctatgctcatcagcattaggaaacatcttcgaaaacacttaat

SEQ ID NO: 8938 - DNA, 1804 bp, Arabidopsis thaliana landsberg
  unsure (1)..(1804): unsure at all n locations
atgatgatgacgcgtagattgcatcattgaacctcagtgtgacgaaacggcacggaaacgacatttgatcgtataatcccaaagattgttgatgatgttgctgaaactgttgttgttgacgagccatttcagagtaactcaagttgtatgattgcatcaannnnnnnnnnnnnnnnnnnnnnnnnaagcaggtcttatgggcaaaagggtagtcgttgaacccgagttccttgactgggtcggtctttgagcagcggtttggtgcacaggttgtgcttcggttgaagcaggtctaacgagtttgacgttttcagggaagttgagtttggctttgttgcctctaaaccgaagtgcagcttcgtcgtaagctcttgctgctgattcagcattgtcgaacgtaccgagccaaactctagctgctttaaatggatctcgaatctcagccgcccactttccccatggtctttgtctaactcctctgtatcttcgccgaggttggtccccactaaacgacgacgtttcgctactagcagttgccgtagttgtatactcgtatgttgggcccggacctgacatgttactcgaagcttctctcactgcaaataaacaaacaaacatgtaaaatttcacacttttgttgtcactcgtgaattaacactttcttacataagaaaaagaatcgataatattaatgtctccaataaagatattataaagttttttttttaagagcgagtatgagaaagtgatgaggcaaatgggtgacaaaaggaatgaacaagtagaaaaaaaaaggaagcggaaaacgactcttgatgcaattggagggagataaattcttttggcatatcatcatcatcatcattttcttaattaaatatccaacctttttacaacaattctaaagtatatgtcttaagataatcaagtacagtttcgttattatatttatttttgtcaacacttcgaaatatttatttacatctttacgctaattactattttttattcctcatttttctttatatttaaattattataaagtatatctaacttcgccatattttagaaaacgataaaagaaaagaataaaaaaactaaatatttgaactaaagtagatatgttttttttaggtagatatgttttggtttttcgatataagacatgttgctttgtagattgcgtgaggacaacaaaagtgcaactgtatttagattttgtgttacaaacatttgatgtgactcataccttgatgtatatactacatcataaaattattgaaaacatttatcaaatagaatgatcttataatttaaatgttttatgttttgtggatacacaaccgaaatatgtaaaattttatcaaaatggtgtgtactaatgtggtttaaatccgaaacagggtacgtgtgtttatagaggacaaaataaaaacccaacaaaactaacctttagaagtagagctaccaccggagaaatattgatcaaccgtcaaagtattagctgccttaaccgctttggcgccaccttcctccacctctcttctccttttctgccccgaggaagaagacgaattcgaagtcccttctccgctaccttcaccgcctccttgttgatgctgaggaacatttccagcaacaacgtgagtcaaagcagagacaatagcagacatctccatctctctactgaaacctgagataagagatgaggacgacgacgatggaggcggcagaagcgtagggaagctatgacggtggtggtcgtcttcggctgcgaataagtaaagccattgatcggagagca

SEQ ID NO: 8939 - DNA, 618 bp, Arabidopsis thaliana landsberg
acgtcggttattctggatttagattctaatatccatatggataattataaaattcggatcggtttcggttgagatatttcgaatttcggatcggtatgaatatgatatttaacatccgattgaacccgaataaccgatattaatccgaacttaaaccgaaaaaaacgaactatgcaaaaaatgagtagatgaaatgaaaccatagcaaagcaaaccataaagtttttgaaaccaaagtgaggcataaactatgccaatacatcaaagttttgaaagaaaagttaaccataacatcctaaagagtgaagaagtagcagaattcaattggaaagtagtaaaaaaaaaagtgaaagagagtgaaaacaagccaacaacagcaacctgaagcttgttctttgccgtattctcaaacttcaccatgttcttgaaccttgatacaacaaaatacttaacttcttaatctatgaaaaacatgaatcaaaaacatgatagttaaaacaagttaccttatagccgattaataagtttgacgattagagtcttctaagcagagttgccatgaaactttgtgatcaagataacaagaaatttaaactgtgaccatttaaactattaaga

SEQ ID NO: 8940 - DNA, 2007 bp, Arabidopsis thaliana landsberg
aaggccgatatgaaacaatataaagtagaaaaagattattttttttagcttcaactaatattctatcatataggggcggctgccagtgaccattttatttcaagtagatcacaaaataaagacaaatgtctcaaagttatatccattgatcgaaatccaatcaacacaactaataaaacaagagaaaaccaatgacgcaaagacaaattcctctaaccttaacaagatcatctcaacttctctttaccagagctcttcctagccgcagcattcataatcctctccaaatacccttcaataggtggagtaagcgtagccgtacctcgactcaccggaaacggagtcaaatcacgcactaaagccgccttcttcaaattctccggcaatgcctcaaccgcagcgttcctcatcttcatcaaactaatctccgctacacgtctcgctctatgctctctcataagcactctactatactctttcgcaagtctaatcccatcctccactgtaaccttatactttggtaactcatcttccgtaaaaatccctaacgaatatgtaatccaatcctggagtcccaatcctcatcggcgcagtagtaactcccatcgtataggatccacctttcttctgaaaatcaatctctttttgcctcgctttactgattagccctagcttctctcgtctcgcttctcgctctctttccttaggtctcaggtaacgaacaggacaaggagcgtttatgcattgatctgagattcttccttttcccttatccacctcatcaccacctctgccaccgccgtttccaccgccttttttgattgtgagtttgttgcgtttcaatgattggcctgtcttcagcttcgattttcctttgggggttccactagcgtaacatttctggagaagattgtaactcactgagtcaattataggttttggtctcgcgaatctgatcattttcagattctgatttcctcagagctctctctgtttgaaatgaaaatggtgattgaagttgatctgcaaggtttagggtttcaaggtacgccgtcgtttcatgaagtgtaatttaagttcaaatcgagggtaaatcggtaatatcaggtagtgtcatcaaactcacactcattttttagccttctctctggttcgtcgtctggttcaaaagctatagatcgatcctaggcttacctcaaacctcagtctccgttgactactgagactcgtcgacctctgatccgcttcttccactatacggatctacttccgatctgtaagaagcttaaatcttcggttgattttggaatccatccgtcgtagatgtgtaattgtattgatttggatgagtttatctgtttttttgagttttcttatgcagtgatgatggccggaggtaacgtacggtttctggttttgatactcgccgtagcaatttgcggtgctgcttctgttttccagccgatctcagactctcaccgatctgcggctctggatgtcttcgtaccagtcgatggatcatacaaaaggttggtttctctatcttaagtcggcattgctttgatgtaggggttttaaccacatttcaccgattacatattggttgctcgttaatgttcatgaatggtttttgtacggactaatctgatttttattacaatcagcttggaggaggcatatgaagcattaaagactttggagattcttggaattgataaaaagtctgatcttagctcaaagacttgtgagaatgtggttaaagttcttcagtcgtcttcttctactcttaaggatgcattttatgcgttaaacgttaatgggattctaaaatgtaaaattggtgaagctggtcctaaggtaaacaattgtctcctctcagtatcataattttaactattaagcggctaaaataaccttatcttttcctcttttgaaggacattgtttctcaacttcaagctggtgttaaagatgcgaagctattgcgtgatttccatttactgtcaag

SEQ ID NO: 8941 - DNA, 502 bp, Arabidopsis thaliana landsberg
ttgggaccaatgtatgattgattgtttcgaacaaccttaagtttggttctaagacattattttgattacatgattgagacttagtagctatcatcatacagtattccacattttacatcaattattgctcttttattacataaatttttgtgtatatacacacactcatgtgttcatatgtacatacatgtttatgtacttacagattcagatgtaattagagaaagaaattagtggacagaaacttgtaacatagtagttgactagttgtattaatgttgtcgctatgactccaatttggaagtatgcatgtgagaaaagacgaccaaagccgagcttaaaagtttaacaaaccaaagtgaagagtatgcgtttgtgtactaacaacagcatcaacatctaaaaggtggaagattgtcacacaacttgtatatcacatttgtacactattggaagatgatttgatctcttaaaaacccaataagggtcatagcttttcgac

SEQ ID NO: 8942 - DNA, 1375 bp, Arabidopsis thaliana landsberg
tgatgcatccatttggggagctcttctcagcgcttgtagagtccatgggaatgttgatcttggcaagatcgcatctgaacatttgttcgaggttgaacctgagcatgtcgggtatcatgttctattgtcaaacatgtatgctagtgctggaaaatgggaaggagttgatgaaatacgttcaatagcccatggcaaaggtttgaggaagacaccgggttggagctcaatggaagtagacaacaaagtcgaagtcttttacacgggaaaccaaacgcatccaatgtatgaagagatgtacagagaattaacggcattacaagcgaaactgaagatgattgggtatgtaccggaccatagatttgtgttgcaggatgttgaagacgacgagaaagagcatatcctcatgagtcatagtgaaagattagctattgcatttgcacttatcgccactcctgcaaagacaacgattcggatttttaagaatctaagggtatgcggcgattgccatagcgtaaccaagttcatatcgaaaatcactgagagagagatcattgtgagggattcaaaccggtttcatcatttcaagaatggagtctgctcttgcggtgattactggtgacggcatagaaaaccgattagtcaatatccaaaaaccggttccaattcaattgtgaaccggttaatcatggtctaggaagactttgggtgggaaaaagattccaactttgcttacgaaggttaagtcgcaacaaagaaagcttctttatttccgccatggacacagcctgtcgtagtcatgtggacagcttgtggtttactttagcagaaagtcactcgcaaaggacgagacgtgtgaacggtttcaatcgttgaatcctcaacgtttggttataatagtttattaagttacctaaaagaaggaactttgtttttcctctttaaaagaaaatatctttttgagagtaaacaatttagttgaaacaatgtaatcagtcttttttttattagtttgtcggaggtaataattacataaacacacatcgaagctggtggtaatcgtttaatgaacatccaatgatttatattcgaatgtaatcgattttcttcttgaaataatagacaccactttattattttagtagaaatgaacatgacaactccaatcgtttttattgaatttgtataatttcaactacaccaaccccaataataataattattgatagagaagagtatgagaaaacattagtattatgttagtttaatggccacgtttgttaaaaaatgttaccagctgtggaccgtaaccccatgacccaaattggttatttcagccagagactctttacctctctggtgacttccatttttactt

SEQ ID NO: 8943 - DNA, 1635 bp, Arabidopsis thaliana landsberg
aactactttggtttatactagaatttcaaaacccaaagagagtgaaattgaaacaaacccgtttaatacgttcctacaacccgtgtaaagcttcttctgcttactatgagataaactgtgtttataaaagaagagataaaacgacagattaaggacatactcaatttattccaatgtatttcgtcgctgttgttatgacattacatagcttgatgtgagaacataggttattttgtctaaagagtaacaatagttatgcctttttttcaggctcttcaccaatcaataccgagttgcttggagaggaatagattatcaagatacgtgattaatggtgccgatgaattgacatagctttgcatatgtatcttagccgccgcctctgtaacaacattcataaataaatgaaaaaaacaatatcgtcagcgaacataatgaagaagaaactcgatttatgaaatctcaaacagagatagtattggaaaattcaaaatctaatatcctactgccaaatgaacttaaaaccaatgtgaatctcaaagagttctctcttatgataccaggacttatacaggccaaatattgccgtgatatctacctaatcctgtgaagaccttgaaactaatctgactacttaaactactagtttatcaaacacaccatccactttgagcatattaactagttgatgaactcaccatcctctttgagcatattaagtaggtgagcccttgtgggaagagcatacatcccaagagaaacagctttccgtatagcccatccatggtggggagcaaacacttgagcataagacttagttgctggatccttcaaggagttatctcctctgcaaaagatatcaaactacatttcaatcttctaatcttgaccaaaaataaaagaaaattacaacaggactccattttttcatttacttcagtgtccatatttaaatcacacatcctacaaactggcacggctaatgcatttgatcaaaattttcacaagaactcaaataagagagagttcagaagaatcacttactcggaagctatgatctgttcaaagagaactttgaccatgtcaagaccacgcttaaccctcaaaaggtttctcgtatgactaccagctttccttacacaatctgcctcaatatctttgtccatcattaccactaatgtcgatatcgaactcgacgccctcacaagatcatcaacctatagtcacattcacaagttttaacatttcattttccaaaacattcatcctccagataaacaaacacaacatccatttccatcaaattagcaaaattcagtctgagtactacagaaactaaatcaattccaacatctcacaatatactcaatagtacatgaaagtgaacacaactagaaaaagattcggactttgattcaaatctactacataaacaaaccttggcaacatagtccatttccgcaaacttaaaagctattccaaggcaaccaaagagaggcgagaccagagagcaagcgtgagagaattgcgttacaggaacttccggattcggtgaattcacgatgattgctagctttttgaaagcggttgagatttttctcagtggcttatctgcttccgaatccgccatggaag

SEQ ID NO: 8944 - DNA, 1684 bp, Arabidopsis thaliana landsberg
tcatggttcgtgaaggaaacgcagactttaggtgtttccagaaatcccggtccattgaaaccggattggagtaaacaatctcatgaaacagatcttcctcgtcttcagttagtctagcagcaacttcctcccccatttcacaaagacctatatccagacacctgtcgtacccaatagttgcaaacaaatcttccctgttttccataatatgctgctgcacacatctgatggaacctttatccaggcaaatgcattcctttcttcctttaccaatcttgcagacctcggtttcacagtcaggcattggaattacgcacttccctgtcacttgttcttcatcgtaaccaacaccttgacccgactgatcatttgcctcttccttgacacattcaggaatatcagcctggtaatctgacccgattggaaccgtttttctaggagaaatcggacaccaatagccatcttcttccccagagcaaaccggtctccaaggtatatctgactcaggagattcatgagaaatggtagactgaatcgtagctccagactgagaatcctcctcagacaaaccagttgtgatccaagagaaaggcgcattggtctcaaaccccttgtcaacgttatcctcacatttatacccgtagagatcacttatatcatctcctgctaaatgataaagacagataatcattaagcgaactgcttaagtttatcatgtgaacccctctgcaagaaacaaggtgttattattacctacgacacctggcttctccagtgaaagacgatatggaactccttcatctagtttggccagcttattacagtaactaatctgtcttccattcttaacgttgagctcttgaacatcttcagcgtcaaacgttcgcttgaaacccattcttaaaaaacctgtaaaaggagaaccaaagccattagttacttggcgtgaaggttatctgtgtgaaccacactcacactgacaagtgacaactataagtctatttaaccagttcagtaattaaattagagtataaagaaaaaatatttaaccccaattaatttaagtaaattaaaaaaaaaatccccaaatttgaaaaccctaaccctagatttcaattcacggattaaatcgcgaaatcaagaatcgaaaatcaatgaatcggttaattatcatgaatacagacaaaagccctcgattaattgacagatctgacgaaccctagaacatcccaacctacgagcccagatcggataataaaattgggggaaactgaaattaagaacggatccgttcatacttttgaaggaaatcaacatcaaaaacaaacaattgatcagatctgttgttatcagatccagatctgactcaaaccctagatttgaccaaaacaaagggatgataacaaaacaggtatcaattggaagatcaaatcaagaggaagaagaaaattacaatagatctgaagatcgatctggaagaaggaagggatctgagctgaaattcgaagaaaatttggtaggggaaaaaaataaaattgggggaattttcgaaagcggctagggttgaaaattcgtgcttttcgattaggggaaagccccgattttcaaacccggatttaactcggaaaccgagacaacatcgaatgagctgtactttatttaaattctttgaattacgtgaatt

SEQ ID NO: 8945 - DNA, 1218 bp, Arabidopsis thaliana landsberg
tgcgataggatcagcattgttggtggaaggcaaagtagtactaggtgttatggcttgtcctaagcttccattggcatcaactggtggtaatgcactcaagtctttacctgaaaaagttggttgccttttctatggttcggttggcaatgggacttatgtccagtctctcagtgtcgactctcttcctgtgaaggtaaactacttgaaaccactctgtttccatgcatttactatcaaatcttttcatatattgctaaagaaatgatcaaatgcgctattaggtggaggttagcagcatagatgatcctgcgaaagcgagtttcttcgagtcataccacacacctgtccccatccataacaccattgctacggtaaaacatcttcctcacattctctatacgtatcttcttgcttactctaaattttactctgtttccgcggtgacagaaattggggataaaagaatctccaatcaagatcaacagccagactaagtatgcagctttatctagaggagatggagaggtttacttgaggtttactcgcaaagcaagacccgaatcaatatggaatcacgctgctggctcaatcattgtttcaggtaaacccatttagctcttacctacatagcttttggtctattatagttcatgaatgatcacacaacaaatccttgtatgaaactttcagaagcaggagggaaagtgactgatgcagcagggaatccattggacttttcgaaagggaagtatcttgattacaagagaggaatcgtcgttacgacgcagaaactgttgccaaggcttttaacagcagtaagagaatcaattaaagaagaagaagaggaagaagaaaaagctgcttctctaaaacttcactaacacgcaactgtaatatacttattattgttgtctttgggtatactctgttgtctctgtgtttttcacacagtctatttattgaaaaccagaaacaaaaaaaaaactcacctttgatatatataagaaacactaattctcttttgaatatagtttttgatgttacgaagctcgtttaaaatgtattttaaatagtttatgtctgtaatctgagatacgttaatcaattttgaaagtttttaggaaggttggtaaaactagggaaaaaaacaaaaaacgtacgtagctagtgcctagtgatggctatggggataattaaactcgacaatagaaaaaagac

SEQ ID NO: 8946 - DNA, 975 bp, Arabidopsis thaliana landsberg
tgcgagaatctatcaacgagaagagagatcgctggattatctgacatttgttttccgacttctttgagattgacaatcacaggaatgtcgaaatcattgagatgattctcgggccccagccgcaagtataacctcgcctctatgctgctcaacatgaactttgtagctcttacttgagttcccatcactctccataaacctaactccaactgcgcgagtcttgttagcatcaaagattatgctctttaccgttgcgtttagaagaacagtgatgcaatttggtttaccatatcccaaaagatctgcagatgtatgtcttttcccacactgatcgaatatgcttccaccgatctttgtcccttgcgtgtgctccaaactatatccgttatacggataaaaccctgcttcaagaaatccgaactgcacaatggattgccatcgagtcaactccggcatgaagacaaccttagactcaacccatttataagattcttgaaccagatccttgtcccaaccagctttcttcacaaactcatcgctagctcggctgtaaaatccgccattgatagcgctcgatcctccaagaacacgtcctctgtggtttttgattccatctacggaggtaaaactttgcgcaacggatgagtattcatctgtatttatcaatgagtatccatagtactttttatcttctactaatggatctccaaaaggcgagccaccgcgttcaatgaccagaacagagtatttctcagacagagtagcagctaaggaacaccccgcagttccgcctccaacaacgatgtaatcgaatgacttgccggaaacttctttcggatcagtagtcatgtaaggcatttgcgctcctgaaaacgtctaacaacagttaatgaaaaccttcactgcatataaactatagtattttcaaacaaggagatagtctacattattaataccttgtgacagattaatgaa

SEQ ID NO: 8947 - DNA, 1110 bp, Arabidopsis thaliana landsberg
aaaatatgtactaccaaccgtctatgtactgggattttatctgtgcctttttcaactatatatgtggatgatcgcttatgttcaccgtgtcatacattttaatatttattatcttcccaaatacatacaaagacactatacatttattccgtggtgtactttccttagtagttcagatcggtcccaccccgtactttgaatggcaaccaatcattgaattatgcaccctctcagttcgcctcctttcattccaacttccaccgtttaggattcccaataaacaaaccctttcactttctataaatcccttttgctatttcccctaaccaaagacagccccaccactaaccgtaaacctacatatttctccattatcatttgtaccacactcgtattcgcctctgttcattatggaaaactaccaccgtttgtacgagttgtctcccttaataactggttggacgatatgtgttatgattcttcggatttacaagaaaatgctaaatgatcactcctttgaattgcatcttatcttgcaagatgaagcggtaatagtttatttgtaatctttgatttcattttctgttgatttcgatgcgtaatataatacgagtgtttgttttattagggcaagaggatagaggtaacaattgggtctcggttttctgctttctattatgacaggctcatagagaatcaatggaaaatgatcagtacgttcctcatgcggcctaattcagaatccataagatccactccccatgagtttcgaattatttttttgtagcaaaccgttgttacttcatcacagccgaaggaaaccgttttacttaacaactttactccatttgattacattctcgaacactcggttcggaaagatactctggttggtaagtattaccctattttctcatgatatttctccaaatatttactttaatattgacttacacttaatatttgtctcagacttgcttggggcactcattgatttcgactggctgaccaatagtgcgccaaatgggtccgatatggacggattcaagcttcaattcaggttcatggatagcaagtacttttcttcactacctttttatagggttttct

SEQ ID NO: 8948 - DNA, 565 bp, Arabidopsis thaliana landsberg
aggcaaatcccgtgtgaagacgaatctgatgaagaggccctggtcaataagctgtatagattgtgtggaggtgaggagatggagcaagtgccaagaaatcctccatgggtataatgttgcctcttctcattctacaaacataaaatggatcaatggtcacagttttgttagttagaacaatctttttttgacccttgtctctgattacaatcccaagagttgcagtaactcttttgagagttgctttatcactagttctctccaattgatctttccttatgttacctctcagcaaggaaatggcaatagctaaagaaacttaaaagaaagactagaaagtctatacttaagaacagatcaaacgaaacaaaagaaagaagctcaataaagcactaaatcaaactccatctaaggagtcaacagcagcaacctgagacctcattgaacttgaagcatcaactattctcttggcttttttcaataactcatcccactttgcatcatcatttacaatcttgacccgatcttcaacgatcgtaaagctgtctctagtacacttgcttct

SEQ ID NO: 8949 - DNA, 2817 bp, Arabidopsis thaliana landsberg
  unsure (1)..(2817): unsure at all n locations
gcggtggcacttagatttggttaatgaacttgttgtctagggttaatttattgagcatgtcaatcacctgtaaactgaggaaacaaaactactcaattaccccatcctcgggaattctttatctgattgaattctttgtttactctactgttgtttactgcatcttgttatctttcgtttaatttcagcagttctttcttgttactcgacctcatactcgaccactcagttgtctggcaacagcttttgcagtcgagtatctgtgttttatttttctgtctgttactcgacctgtcactcgacctcacccagtgctctgcaaagagctgtgttggtcgagtgttttactgtttctgcttgaaattctcttttctgcatgttcacttagaactgctagaacacaccaaaacctgttattgcttggcttgacttagtgacttctgatcacatcttgattgttagtgttggggtcggatttgacccaggatagcgagccgacctatgagtcaccgcctcgggagccatcgatgaattatcccgaaccagactaaaacacctcggagttctcgtcaagaacccataccgaggtgatgtcgagaacgcttcggggcagtctcataaagtaatccccgacccgacctaggacgcctcggggataagacttggaaaatcatcccgaggcgggctccaaaacacctcgggagcttgccttcaagtaccgcagaccaagcatcccgatcatgacccgaggccagcttaatcacggctcggaaagatctcgttttagacagaaaaacttcgaaagacttagccgataatcttcgaagatatcaccagatacaaaaatcccagaatcttcggaggataaagacaaatctctttcaacgagataaagataaagagggattttccgagaatatcgcaagaggtgatattctcggaccctataaaaaagcacctcaaagaacaaacatgggaaacacaaaaaaaggctctcaacttcaggctattaaaacgctctgactttgaaggctaaaacacttatctttacctttctaaacacttgtacgatcgaatcatcatcttttcaataataatatcaagaacaccgtccgcgttaatcgaataattcttttgttctttgagagtcttgcaaagatctgttatttgaagaaaccctaaatacaatttcggttgtgtgagtttcgactctcacacatctcctcctcctaaacctcaagatttcatcaataagagcttaagatttcaaaaaactgttctacggttaagcaagctacgagtttctcgtcgagcgcttgttcgttcttttgatgattgtgcaggaaaaggagtattccacccatacttgagttccaccctgctgatgctcctctcttcctagatagacctaatacactaattgcttctacaccagtatggatgatgagaggtctttctccgcgatatttactgccaccttctgatcctcctgatccccaaactccaccaaagttaagctattgactcaaaacaagcgcttagtgggaggcaacccactagtttgatttttcattttccctttctttcttttcaaacatttttgatttatttttcccgctttctctggatttgaatgccactggggacagtaacgtttaagtatgagggaggcagttactaagtgcatttttctgtttgagtctttttcttatttatgagtcattttattgagtcaaagcttttgttcaaaattatgatctctccttcgagtttattgcctggattgcttaattactccatattcaaatcaattcgactaatggaaaatccagaaggccaaccaacaaacttaaggacattcgttcccaacataatccacaaaggctgaagctaatctcactgctcttccttttacctcatcaaaacggttagagttcataggacttgactccttgttcgtacctgataagtcgactaatgtgttaaaaagaaaatgttcatctcccaaaaaataaataataataataataataaaataaataatgagagattgagaagactttcagatagtgtataggggtagaaatgtttcctatgaccccattattataaaattatttggaacgataaattacaaaggttggaaaaatactgagggtgtcgatccaatatgcgagttcccatttctttactctctaaaaagaataagtctggggagagaaagaacaccaaataaataaatatatancgaatggtcgatctatcatggtataatacaggaatgagtctagaaggttcttaagcatttacttgattgatgagacccagtgatgatggcctagtagatatagttgagtgctttggtatggaatctaggatgttgtgtgggctagcggagaattacatggtgatcaggatttgattagaactatttagtgcatggatttggtttgtatgatcaaggtaataaactagagagattgggagtttctatgtttttcaaacctctttcacagattcaaccttttgttttgcttgagggcaagcaaaagctaagtctgggggagttgatatatccttgtttttactgatttctaacatagtttcagaatagtttttagagtctttctagtctttttcgtatgttttgagttatttcaggtacacttatacatttgggaactatggagcacaataaggaatattggaagcttttcagcaatgaagatattgacgggcgtttttcaaaagctggtgtcgatcgacactcttattgctgcaaagggaattcacgttttctccaagtcgttataagcc

SEQ ID NO: 8950 - DNA, 1458 bp, Arabidopsis thaliana landsberg
  unsure (1)..(1458): unsure at all n locations
aagtctcggactaaacgtcttcaaaaaagtaaccatggaataataatttatttttatagtatagtttgaaacaaagaaaaaaagaaacacgtttgtcagaaaagtaataagtggaagatgtcaaattgctggcttgcaccgtaagccaaaaaaacactgaaaaagtaaaatttcaatttaaggtggattggtgcccaagacttacaatatctatttcttcacgatatttacgataattttcaaagtcttagccgcaaagaaatctataaggaccaaaacatattgaaaaacaaatcctagcataccagaatctgcctannnnnnnnnnnnnnnnnnnnnnntgtagccgtacatttaattgtcgtaagcaccacgcgtgttctcttagacggtatctagacatgtgttcccaccttaatttctgaaggctctggtgaattctaggacaatctatgcagacaaaaatttatagtttattgtttggttttatgttcgaaatttaatagtgattgtactgcgctccgtaatattttctacagtttgtacgtgttgtgtttttccaatggaaaaggaagataacggatcgaaacagagctcctctgcttctgttgtatccttgagaagacgaagaagagtggttgagccagtggaagcgacgttacagagatgggaggaagaaggattggcgagagctcgtagggttcaagccaaaggttcgaagaaaggttgtatgagaggaaaaggtggaccagagaatcctgtttgtcggtttagaggtgttcgacaaagggtttgggggaaatgggttgctgagatacgtgaaccagtgagtcaccgtggtgcaaactctagtcgtagtaaacggctttggcttggcacgtttgctactgcagctgaagctgctttggcttacgacagagctgctagtgtcatgtacggaccctatgccaggttaaatttcccggaagatttgggtgggggaaggaagaaggacgaggaggcggaaagttcgggaggctattggttggaaactaacaaagccggtaatggcgtgattgaaacggaaggtggaaaagactatgtagtctacaatgaagacgctattgagcttggccatgacaagactcagaatcctatgactgataatgaaatagtgaacccagcagtgaaatcagaggaaggttacagctatgatcgattcaaattggataacggattgttgtataatgaacctcaaagctccagttatcaccagggaggtggattcgattcatattttgagtatttcagattctagcttaggatttatgctgcatcaatatactatgactatgagactatgttttttacattgttagtttactccattttcatttatcttaacataagagtcacgcatcataccgcagaaaaacagtgatccgcttcattctggcttctctggagcagaccatagcg

SEQ ID NO: 8951 - DNA, 1474 bp, Arabidopsis thaliana landsberg
aattcttttctcttttttcagtagtttggcagattacaaatttattgctaatttatcatctaaaagactaaaatatagtaatagaaaatataaaaaatcatctgcaaacctaaacaaaagaatgatttttgacaacaaactatattattactaacggcagttagagcggacaaatacgtcagcgatttagtccgctctatttttaaaacggacaataaaccgctacgaactaattatatttgtatgtaaaaacagtccgtagttaatctgcagtggttttttttttcttttttaaattcgcacctatacaaatatgaatgataaataaaaaatagttcaaaccgcaaacgaatttgtccgccttaaccgttgcaaccattcaaatcctatatagcaagtatgtgctacaatgataaagagagacatagaagaaaaagaaagtaataaaactcagtttacagattattcttcattgttatcattattattgtctcctccactttcagttttggctctgattcatgctctccgcatcaaaccctccaccaaactgtacataacaaaacacagtttcaaactttcagttatatgagaaatttggtcaatttaggtttcttatgttcttgtctgaattgagtttttcctttacctgatggtctctaaataaattacagaaagaacaaacacacattcaaaatagggcttcagatattgagaaactctatggcatatgctagaaacctcgagtactatactaacaagtatcccataccatactaatagaaccatttccagtgactgagtccctcaaaaaaaaaatgatagtcatcaagcacagagtgaaccaattagacaacaaaatgacagtcatcatctcgattcttatcgaaagacccgacgttgccgggataattctcatgtaacacttgcatcggtacatagtttactttctatcaaacagaagagaatgaaattctaaaacacttgaattttgtgaaaatctgagacacatttcataggccatagacgagatgttctgtagtagttaaaaacattatattccttatcatcgagttaataacaacgattaagaagtaaacctacaaccacactatatatttgtctcacttaacacaacgacaagagagaaacatagatttttgacccaagttcaaggattcaagagagggcttccttctttgataagcacaaagacacttccaccgtctcctctagagattcgaatgtctttgtctagataagtcgtgagtagccaagactgcgcattgtccgccggcaaagagaatttcaacggtggttggcttgatatggttctagccacagacgaggctgtgtcttgcaccgaggtaagtaaccctctgatcgggttaagatcaattttttgacccagaacctctacatattgcggtatctcaataaaatccgataaatgaggcgtcccgattacgccttg

SEQ ID NO: 8952 - DNA, 480 bp, Arabidopsis thaliana landsberg
gcaggtctacacgattcctatttatgagagtacttgttagtgttgtgaactattttatggtacttgtgactttgtgatctttgttatatatgtcgtgtgtttgatgtatgtgatgattatgtgatacatgtgatgtatatgtgatgattatgtgttatatattttgtttgtatggatggaataacaaaaacaaataaaaaggggtattctgatcactttgccgagtgtaacactcgacaaagaagacacacctgggaaccggtaaagcttctttgccgagtgttattgccgaggcacacaacaaacaagtcatctttgccgagtgtcacctaatacactcggcaaaggaactagcaaagggactcacttgtgctcctgttgcccagagctagtccagctggcactcggtaaagacggatcctttgacgagtgctcctaatacactcggcaaaagaactggcaaggggccactgaggcttc

SEQ ID NO: 8953 - DNA, 514 bp, Arabidopsis thaliana landsberg
  unsure (1)..(514): unsure at all n locations
gagtgtcaggggaggcactcggcaaaggatccatcaccgtcacttggcgccgtgacggtgacttttctttgccgagtgtcaaatagcactcggcaaattctttaccgagtgccggacaaaaagtactcggcaaagacaccgctgccgatgtacagttcgccgagcgttctttgccgagtgttacactcggcaaagactttaccgagtgtaaaagagcctttgccgtgtgtcggagaacacgaacagatagctaattccggtagtgatataagtattgtattataaatacagatgagggatatacactttgtatattacatcatgatatattttggttggtttctgttgtgaatgatctgcatatatagaaatgtgtatgaaacatgtgaattttgctatatgatttgttttggcaagaaaactgagaaccaaatttcatttgaatcttgtgaagcaaattgcatgcgtacatcataatatggtcgactgcaaannnnnnnnnnnnnnnnnnnnn

SEQ ID NO: 8954 - DNA, 570 bp, Arabidopsis thaliana landsberg
  unsure (1)..(570): unsure at all n locations
tagcatagtgcccaatctgactgcacttgaagcatgtagggccagtcttctgtcctataggtctcgccgtggtgccagtgggggcagcctgacgagtgggaggtgttcgtggagacccctctggagcatactgagctgggcgtggtcctcactaccagacatagctcctttgcctagtgtctcagacactcagcaaaggcaattttacactcggcaaagnnnnnnnnnnnnnnnnnnnnnnnnnnnnnncctctttgccgagtactttttgtcgggcactcgacaaagaatttgccgagtgccatttgacactcggcaaagaaaagtcaccgtcacggcgccaagtgacggtgacagatcctttgccgagtgtctgctatcacggccctcggcaaagacggctccagtgcgccccaccgccagtccctgtgccgagagctctcgtaggcactcggcaaaggaggcttttttgccgagtgtctagtggactggcactcggcaaagagtcctccagtgggcccttttgccagtccctttgccgagtgccttgacacagcactcggcaaagat

SEQ ID NO: 8955 - DNA, 1081 bp, Arabidopsis thaliana landsberg
catggttccttaagaaaaataagtggacagtcgaatactcaaggttccaagactttgaacagaaagatgatgcaaaaggactaaacacagagcttcgtaccgagcttcccggtcttggtatgagtgttgtggttgggaagtggtacgtcccttttatatttgtgaaggaaagagacgtagaggatcagatcaagagatcgatgtactacagcatgactcttgaacaaagatgggaagaagttttctcttatgagaaggataaaagccgaaactatgatgttttagttgatgtagagttagatactgaagttgttaaggttgatggacaagagatttcaagaggtgtggaagcaaatgggtttgtctggtttgcggttggagacaaaaagattggtttaggatcagttgttgttgagaggatgaaatgggaagaagagagattcgggtggactggcaaaggcgacaatgagcgatcaatggtagttaagagattggagaaatcaacagatggtagcttgttgaagaatcgtcattgttatgtcctggtagagagctttgtcttgaagagaatggatgagagtttggtcttaacatatgagtttacacacgtcgataagctcaaaaccaaatgggattaagcttatcacgcaacgaatctgcaaatgctttcttaatgataatgacgtgaacttccattggtcagtgtgattaatctacgtacaattgtagtatttggttattatcttaagcttttctataaaatattgagttttctatgtcttctaagaactcatccacagaagattctgtcaaacttcagattggttcaaagaaacaattatacttataaacaatagcttgcacgttcttatgatcttttctcttatataaacgatgacatgttgagcaacaaagaatcaaggagagatgtatgtgacaaagcgtttgtctgaatacaagagaaacccatcggagctaacattgcttccgacagaaggtccgaactccggagtattggtcattcaagacaaagaatcgcggcctacattgaaatgctgctttgtcaattgcctttgattgg

SEQ ID NO: 8956 - DNA, 771 bp, Arabidopsis thaliana landsberg
gaaagtttttgagatttggttgcgtgataagcttaatcccatttggttttgagcttatctacatgtgtaaactcatatgttaagaccaaactctcatccattctcttcaagacaaagctctctatcagaacataacaatgataatgcttccaaaggctaccatctgttgatttctccaatctcttaactgtcattgatcgctcattgtcgcctttgcctgtccacccgaatctctcttcttcccatttcatcctctcaacaacaactgatcctaaaccgatctttttgtctccaaccccaaaccagacaaacccatttgcttccagacctctttcaatcatttgtccctcaagcttaacaacttctgtttctacttctacatcaacgacaacatcacggttctcgcttttgtcgttctcatcagaaaaaagctctttccatctttgttcaagagtcatgctgtaatacatcgaattcttgatctgatcctttacctctctttctttcacgaatatgaaagggacataccacttcccaaccacagtgctcataccaagaagaggaagctcagtacgaagctctgtgatgagtccttttgcatcatctctcagttcaaagtcttggaacctcgagtattcaaccgtccactcttttttcctcagaaaccatggtgggaccccgtcaggagcgacagatgttgcgtagtaacaacgcgaggaaggctccttttgatggatcttgaattgttggtacatgtcaaaaggatctaac

SEQ ID NO: 8957 - DNA, 1867 bp, Arabidopsis thaliana landsberg
gacactctccgccacgaccccaccaaagatcgattcccacacaacgagtcgggacctcgagacatctccagcaccggaaactctactccgacgagaaactcgtctacaaatccttcctcttcggacccgaaaaactcgagaggcttaagatcatggcagagacgagatccacgacttttcaaaccctaaccgggtttctgtggagagctcgttgtcaagccttagggcttaaacctgatcaacggatcaagcttctctttgctgcagatggaaggtcgagattcgttccggaacttcctaaaggatattccggtaacgggattgtgttcacttattgcgttacaacggcaggtgaagtgactttaaaccctctttctcattcagtgtgtttggtcaaaagagccgttgaaatggtcaacgacggtttcatgaggtcagcgattgattactttgaggtgactcgagctaggccgacgtaacggcaacacttctgatcacgtcgtgggcaaaactgtcgtttcatactaaggatttcggttggggtgaaccggttgtatctggaccggtcggtttacctgagaaggaagtgattctgtttctgccatgtggtagtgacacgaagagtatcaatgtgctgcttggacttcctggctcggctatgaaagtgttccaagggattatggatatatgaatcattaaaattatttatggtttaatgtttgaatttaaattaactatgatttaaaaagcaaataatgatgatatatcaattacgtgtttgtggtcgtatgaaatattgttcgtcggtggagcaaaaatgtaactaagatgttaaagtatcaagtttaataaagaaagctattgtgtttactaaaatgttgtttggtaagagctcaaatctttgattttcttcttacaatactttttctgacatagagatcaattacaacctacaagtcacaccttacaaaataaacttatcacacatagcaaaaatattatcacgaaaattaaatcgttagaattgtctttttttgatcaacgatttgtctaaattctgaaattttatggttaaaagaaaaaaatcatttgtaagattatttttacataaaccaaaatagtaaagctttatattcgatcgtatttgagtaacaatttttaaatttcacacaaattccatgcttttgaaaagcaccaaatttaaacgtatcataatttaacccaatattttaaaataaattaaaatatttgacttgactttcgtattcgggtcggatccacccggatttgacaaataaaaacccggtggttggccatcgccttatcttgttgactcttcttcaatcataagcccacccacttcgattaccaactccgaccgccagagacagcgagtttcagatcaaagatgtcggcgacgcttacaggatcgggaactgctttggggttttcgtgttcctcgaagatctcgaaaagagtttcttcttcaccagcttctaaccgatgctgcatcaagatgtctgtttccgtcgacgagaagaagaaaagtttcagtcttcagaaatctgaggaagctttcaatgctgctaaggtaaattgatttcgtcccaccgatactttttgattctggttgaaaattttcggaaaagatcagattttgatggacttgactgaatcatgcctctgttttgcgcatagaaatgtgattctgaatgttgaacaaatggtgtctttttcatgatagaatctaatgcctggaggtgtgaattcccctgttcgagcattcaaatccgttggtggacaacctgttttgattgattctgttaaaggctcaaaaatgtgggacattgatggaaatgagtatata

SEQ ID NO: 8958 - DNA, 1642 bp, Arabidopsis thaliana landsberg
cctttttcttttaatctcttctttatttggtcacgtgcgccagaataagtaacaccatacactgatgtcatgacagtctgttttaccagctatctgtcaacctaaggaatttcaatagtagagacctgttgtcagataggatgtatacaaaacaagtattaatgtgactcatagtagcagtacatctgatccttatattgaagggataagaataggctatcacgtaacatgtttggcagaaaatggccaatataacaagtaagatatgcgaaaacctggtcgagcatgagtttggcatatgtggcatttggaaatgtttcgggatcttcctctgcatcttgctgcatgatcttgagaaccctgatttaattaaaccaagttaaaatcctgtctgattagagtgttactatagtcagagagataagggaatataaaaatagttaaagtacctagccgcaatttctgtataaacatcagccggcttttcacctgtaacaaggttgacggcatctgctcccaactataaacagaaccaatttgaaagaaatgaatcagagaaccttgaggagaaatacatttgcctatgcttgaaaggatgcatacaaaaaaagaaattataggtactgtaaaactaatggcataccttatccctcccaagagcagcatagtgttgtaaaccattacatgaaccatccttgcaatagaaattaatacaggaaagtaagattatctacttaaagagcatagatgatgataaattcgaagcaacaaaggcacctatatagctttcatttcgcaagaatgtcacaaaagttgctcatgtacaagtatggataaaatctagcgagtacctggtggatggggatatgggatattgcagcttcaggaaaggggcttctcaaggcttctgaaagattaatgcaagcagccaaacattgaaagggatcctctgcgttaagccaccatctttttccttcaagaggtctatcagaagaatcaaatatatcttccaagtgactctcagtaaacgcaatcctatcctcataagccagcttatcgactccaccagcatataagtttgctatatgtatcttcagccaacgcaaccctgatttcccaagaggctttccctcacaaaactcaaggatgcctcggcagagatcagacccgagatggttaagatatggatgtatgggatatgctcgcccacgaaaatcaacgttgtgagggtagtagaaaccttcctcatccttcattttacgtgccacctgatcaatcaattgaaagcacaacgatggttttatacatcacagcagcaaaaaagagtgcaaaaagaagtcttctcttacctcgagtttgagctctatatcacacctttgtgaatgtctctcattattttgcttaattgctcttttggattcccatctccaatttttaaatttttcttggtcttccctttccggctcttctggaatgggtacctttcgtagtttataaagaggtgagaaaaaatcaaaatttataaaagagaagttggaatcaaaattacttccttcttctgaagaagatggctagcggatgggtgaataagaactacaagtagatccgcatagaagagagggagagatcttacatcttcacg

SEQ ID NO: 8959 - DNA, 616 bp, Arabidopsis thaliana landsberg
  unsure (1)..(616): unsure at all n locations
gcaacattaagaccaatcaaatcaagtatagtactaattgttttaaaagaagtgacctttgtacaatcaccaaacgagactcttgatagctcttgcacaattaccaaaccaactcttgatagctcttgcagcttcaaacatcccttccaatgctttcaaagtgatctagaaacagaacaaataaagnnnnnnnnnnnnnnnnnnnnnnnnnnaaaattaattgtagactaaaatgtgtaaccatagaaagcatattgttgccaaatcaagcaagttagttatcatttccttacttttgctacataacacgatgcatgaaaagtcagtgaatcgtcctcaaaagtatcatgttcttttggttgacagcatctgatcccaactataaacataaccaatttgaaagaaatgaatcacagaaatgcaagtagccaagcattgaaaacgataaatctactcctttcttatcatttcctttaaccgatcaatttgcctattatggaataagcacaaaatataccaaagaatcaaacaattacaaacaaaagaggatcaatttaatcgacaatactcaaaacccataattcccttgaaccctaattctaaaactagatcacat

SEQ ID NO: 8960 - DNA, 1168 bp, Arabidopsis thaliana landsberg
gtgtggagtctataatgactgtagccctgactcgttttctaaagagtaaagataatgatatattttcttgcaagtggttttgagtgcttttcttgtagagttgcaattctgttttcttcttttcttttcttattgatgatgaaaagctactcatactcataatcaacaggaagagccttcgccgttgtacttgaaagtgttgtattcttctagcaaagttaccatgagatcaatagatcaagaaacctctggaaccaacaacttggaaaacaaacttacagtatggcttttacataatcaatcacgctcatgaaaactaaaaacactttttctcgttttggctaattgcttcaggtaaatgttgcaggttaatgatatatggcatatgcatgttatgaaaccagtcctcatgataaatatccatattgcaagatatatggaggaaacatacttggtaacccatggaaatgtgagacctgccgcttcgagacacatcagtactgtgtggagttggggcgaccatcaagacatcgatttcatcagaaccaccctttgacactcttgccaaagtatccttcacaggaaaagatgaaatgtgacatttgcagagagaatatatacgattccaatctcttctgccgtatgtgtaattttgttatccacatcaactgtgccttgaaaagtaaacatgttcttgaagctttaaggcagaaattcactggaacttggagaggatggtgcaagaaaggcgttcttaatagattggttcaagttatggtctcgaggtcatatccatccaagtactagtgttatttgggatgagaagttgtgtggaaaagctgtgtcatgtatgaagtgtgaagagatatatcatcctgagtgtattgagagctaccatagtttttggttctgtatcaggattcaacacatgttatttctctgtgttgatataagtttagatccttctggctttttaagaggacacagtttgatttggttcttaataaagagtctgaatgttaggcttccattgtttctcatagaagacttttattgaactagtttctactcaaaacatgtttttaacattacatgacttttaaaggaccgtatatgaacatatttacagagacctatcccggaccggtaccaccaagatccttttttt

SEQ ID NO: 8961 - DNA, 1351 bp, Arabidopsis thaliana landsberg
  unsure (1)..(1351): unsure at all n locations
tgatcaggttcaatccactcagtcactccttgaaacgtggaagaatcaatatcacaggtacttggaaatttggtttactgtctgcttgtggaatctacaacatttcacaagtagaatataggaaccttgcatttgtacaattaaggttgtctttaggcagttgagtaattcaatctctaggacaaatgatgtgatagtgtgcgtttaaccttttggcataagggtacttgagtcatcgttgtagtagtttgtaagaacgagaggaatgttatatatccttttcaatgatatatgagtgttttaaagtatttccttgaaattgagtttgatctcagttacttagaattctggtacaacaagagagtgagagtatgagttcagggaaagataaatgggtgaaactaatatgagttttgtcactgtgtttgtggtcagtttgagggtaaacttgagaagtgctaatttgcaagctaaggataacatgaggaaagcagctcaagaagaggtaaagtctcatggcttaagcattctctctctctgccactgtttttaccagccagctccttttgaaatttttgtgtaaagagtgctttcaatgattgtagagagagcttctcctcggtggtggaacagagtctacagttctcagacgtaaacgacagtatgtacatcttggaaactctgctatatttatcctacaaaatccagcaattcaattgggactcctcttggacatgtttaagttgtattatgcttttgtttattggtaaatgcatcatgcactaaaaaaagagttcagtgttagtttccagtgaatctaacatttgtggttgtttatagagcaaatgctgacgtgacatccgatgctgaaagcataactgaaagtctcaggcgttcacggcagctgatggttcaggtcagaaaaaaactagttatgaaatgattgtgcatttacacttgtttgcatattcggcttcttaatttataaacaatgtgtgatcaaaatattctcttgacttgggttacaggaggttgaacgaagtacaaacactctcgtggcttttggtatgtcattcataatatgccagataattaagtccttagtgaaaacagattaagacataaaactgacatattattattattatacatgttaacatttgtagatgaatctactggagtacttaaaaaagccgagagtgaatacaaaggtcatagatctctgttgtcgaggacccgtaatctactttaacaatgcagcgtcaagatgtaattgacaggtatttgaaagagaatagactttgttttacaaccattcatangtgatataatactactaactttgtttctg

SEQ ID NO: 8962 - DNA, 756 bp, Arabidopsis thaliana landsberg
gcactgggcttttcagccacgaccttagaagttagaagaattctggcaatatgagagagtaaaaacattggtttacgtaaaagtattgttcccagaagtaaagtttgagttttgcctatcctataactctgtcaaagtgtcaatcatttatcagaaacttggtataggaagtaatgctcatactgaatttggattgtttttgagaataaacctgagaagtgctaatttacaagctaaggataccatgaggaaaactgctcaataagaggtaagtctcatggtttaactagtcttcacaaatgaatcttctggaatacattaaaaagccgagagtacgaagggcatggacccggaatctagtttcgacaatgcagcgtcaagatgtaattgataggtatttgaaaagaacagataatgttttaaccaacaacacatttgcaaaggaaaagatttgtacaagaacattctagttcaagagcaataaccaacgagcaaaaatcactttgtaccatttcaatgtctatttcaagagcaataactctgtcaatgctgaagcttcaatcagtctttggcattgagcttctccagaggatcttgttcagtaaccctgggtttgccttgcctttcgacattttcataacctgaacaaagcatatacgagtttaaactgcttcaccaagtacaagttttcaagaaatgaggatcgtatctgccatacctggccagcaaaatagccttgaagctggttttcccact

SEQ ID NO: 8963 - DNA, 2531 bp, Arabidopsis thaliana landsberg
acacatataaaccaaataaaatacttcgagcctggactcattaagatcgtcgcggagccatcccgtgatgtcattaacaacctccacaagaaccgagctgaggaagaaacccattgcggtggagcaccaccctaacgcggtgctcatgctcctcatactcgctggagattctctaaagaagaactctaacattcctccaacagtcaacatatccgagagactcaacataacaaattgaagctctagccagaacacagagatcttgatgttgttgtgaaccgcttcatgttttcttttgacctctacgatggctgcaaccgccattgaaatagaggtgagagctaaaccgtatcctatacgtttcaaattgaagctggacgatctttcgctattggataagatccttttgccgaaaagctcgtataaagctaaagaagagagcatgcacagtagaggaatggcattgagggaagccacggggatctcaaaggaacgcgagagttttctgtttgtcaccatgccttgttgaacggagaaggttcccatttgtgcgacacaacagttcattataattgtgctcccaaatattggaaggagagctagaaacgttcttgtttcttcaacttgtgttgctgatatcttgttgttgagctttgctttattcaaaaacctggaaattatagtttacatgatacttaaatactaaccccaagactaaataaaaaaacgaggctctagttgtcactgaacataaataaaaactaggttttaaaaatatagtatacatgttataatgactttgaatatcacatatataataaataaaaagtcgcttttaaaaaataaattaacaacactatggcttccagaaaatattcagtttcttactagtcgaattttctatctatataccacatgaaaaattgttaaaacccctaaaatattaaagtccacaaaactttattttttatgtttattctatgttttgctttgttaattataaaggaactatgtatagggtcccaaacgatggtcgtggcacttctcaagaccgttcctgatattcatggagaaaaagaacaaaacaagaaaaagatgtgtttagaataattacttgaacttgttgtgatgaatgcttttgtcggtagagttatgattctgggtcaccacctctgcatccgttacaaacctatttcggtttcttgtggcagaaacaaacacattcacaattctggtcaaaggactccctgctgggcgcttgaatcgatacatcgggatcccgcaacgaaaatgaagatcgcagaggctaaaaccacggtagatatagtgaagctggagctccatcctttgttctcctcgatccaaaccataagtgttactgccaagaaaccaccaaggcagacagagaagaaataccaattgaagaatcctgagatcagcatctggtttctagtaccgatctggtcgcctccatgagcaggcaacgaccccttgacacctccaacaccaatagctattgcataaagtccagtgaatagaaccgttgattgaggagtcgaaggttttttacctccttgaggttgtaacttagtgatatgagcttggagtgtcaacatgatcaaaccctatcaaagaaaagagtaaacttttcatataaagaaaaaaaaaaactgtttaacacgatttaatagagtttattcattaccaggagttcaatggaaccaaagaggacgaaagcagcgaagcgagtgagaaaagagtccgcgacaaaaccaccgaaaatagtgagcaaaaacgatgtccctacgaaattagtcaccatggttgctgctttgggtgttgagtaattcattgatttcgtaaagtacatcatgaagttggttgaacatgctaagaacaccatattctccatcgtctctacaactatccattagaccacaccaaactcatgatgaatatctattgatattagtgattgttaaatgttttttttttagttttagaaagttaccacaagcaatgaaagcagctttaatcccaccatgtttgccagaaattgcctctttgcctctccaatcttcaaacttctcttccatctcaatctgcatctcttcgtattcttagattaaactatgaatgaaaataaatttgtgtgtttatatttggtttatacgttggatagaccttgaagttaccgatggtaggttgctttcttggtttgagtataaaaagacctaagaagaaacagcgtgagagatgtgaataaagagaagaaacggaaagcattactatctattgacctcattcagtagtgtccactgactttcaagtttgttttgttgttgtttggacggttgcaaataattacaatattgttttattactttatgaagcacgtatagtattatgacgagactgcacggcttgatatattgcacaaaaaaaaactttaacctaatgaattgtgaatttaaataagaacatgtatttgccgagggctcatataggaccctggaaagttggaggttcac

SEQ ID NO: 8964 - DNA, 2748 bp, Arabidopsis thaliana landsberg
accagtatgttatcagccaaagttctctaacatattcttttctttcacttttttcaggattgcagatgcaaaagaaaatttgggtgaaagtaaagttcgtgaagctcatcttgctaaggctctgtatttcatcaggattagtgataaggtatgtggcatatcaaagttgatagttatggtaacttccgtggatcgtggccattaaatttttgttttgtaatcctaggagaaagctttggagcagctaaaactcactgaagggaaaactgttgctgttggacaaaaaatggacgtggtgttttatacgttacaacttgcttttttctatatggactttgatctggtatcaaagagcattgacaaagcaaaaaagtaaatgtcaatttggctgtattttgactactcttcatggatagtgcaactgaaatccttgaattaacactttccgttttcccttgccagattgtttgaagagggtggtgactgggagaggaagaaccggctaaaggtctatgaaggtttgtactgcatgtccaccagaaattttaagaaggctgccagcttattcctggattctatatcaaccttcacaacatatgaaatttttccatatgagaccttcatattctacaccgtcctgacaagcatcataactttggacagagtttcccttaagcaaaaggtatttctcaatggctcagtcttccacttagagttgtctaaacttagataaaaactttttagtatgtcgacttattaaaatgatgtatatccatgtaatttgttgaaattcttatcaagtgctactaatttgacaggtcgttgatgcacctgacatcttaaccgtgcttgggaagattccattcctttctgagtttctgaactccttgtatgagtgccagtacaaggcgtttttctcagcatttggtaagttcattacaaggaccagaggtcatacatccgaatgcatgttgcttggcttttgtctgtatgtttactaacttcattgtcggcttatgttctcagctggaatggcggtgcagataaagtatgaccgttacttgtacccgcatttccggttctacatgagggaagtcagaacagtggtgtactctcagtttttggaatcttacaaaagtgtgacagttgaagcaatggcaaaggcctttggcgtttctgtcgatttcatagaccagtaagcacaataatgaacgctcttttgtatatttatgtttgccacctctctctttagaagcatacaaaaaaacgataatacaaacttaaatctgacttgaaatgtattttttttttttatccagggagttgtcgcgcttcattgctgctgggaagcttcactgtaagatagacaaggttgcaggtgttttggagacaaaccgtcctgatgcaaagaatgcactttaccaggcaacaatcaagcaaggggatttcttgctaaaccgaatccagaagctgtctcgtgtgatcgatctgtgagcatgctacatgtttctgtttcactctttcgtcaagctttgcaacttggaaactccgaacggtagaatcttaaggtctgagaaacgatatgaactttggattttgagatgaatggctgtagtttctttcatcaactctagttggtttgtcagtggtgaatttcccaagaacaaagagcaagtgtaatctccaatgttcattttattcttcctcgcatatggcttttgaatctgttgttttcatcgcatctatctagtatctatgagacaacgaccaccatacctcttacaaaataaagcttttgtttcacaaggtgtattagttgaccatatagatataccaagaaaaatgcattagtacacttcataatctgaatggttagaattgaacacaaattagatacatctaaaggacagtccttggttgaacttgtgagagatacatacacagtagttggtaacttggtattttgcagattcttcttccacggacgtctgtttagtgaattaggtgagattcttcaccatcacacttataggatttacaatttgtttcttactgtttagtaagttccttttttcctaaattttttgatatggtctggggttagtaacaagaccatcattgtaaactactttaagatttgaggagattagtaccttatcttctattgtctgcctaattataaccagtgactcacagtgagtgtgacataagacaaacggattttgtttcctttacaatttaacgacacagtaattaacactctcgaatggattcgtagagagcagcaaactccactctgacgccatacataaacaattcttaactttatcctctcatccttatcactcttcctcaaaacttcgaaaatgcatgcgatcgatttcaaagagattcaggagaagctctctgatggattccggccttggcaacgatcgtttcagttctgggctcgtgccactgatatctacaccggatacaaggtttctctttgattgatgggtactcctttcttcttcttcatgtttcgttttgtaatacatttttcttatgattttctgcaattttctttcaatctgtgtcttgttctgggcttttaggtatttcaacttcgtatgaacttcgtcaaggatgttaataagcacgaggagatgtgggagagacaacatgaacttgctgctcataaagtttattctatgtgctctgaccttggtggtttcttccttaaggtaatggtgtgttgagactgtt

SEQ ID NO: 8965 - DNA, 485 bp, Arabidopsis thaliana landsberg
tctcatactcatagcaaggtctacagacagggaaagcacattcattacatgccacaaaagactctccatcaacacttagctcaatctcatctccacagatttgacatgtttgtccacttagttcttccactgatctaatctgtatattgaaatcagcataagcagagaattatgagaaacacacatagattggatctcaattagaacacaagattcactagcaattaactcaaaatttgtttcttttaaagcaaagtattagatttggggattttttacacactaaaactcagaattcaatccccaccgacacaaactttcactgtacatgatgataaaagtaggtaagaattatggaatcgtgtaccctaattgataaattaacgatgaaatgtaaaacccagatccaaaataaaaaaaaggccaaacctttacacagagcaacgaaaattttaccatgtgggcaatggtgacccgaaaagatc

SEQ ID NO: 8966 - DNA, 2129 bp, Arabidopsis thaliana landsberg
aagctctttggttttggttcttattaacaaaacttcatcccaagaccaagaaactggttacatatataatttgaaaccataaaggaaatttcagaagatctatatatttctcatgtaaagatcaaattttattcatcaatgaagaagcataagacacataaaacacagcatatcgaataaagtaagaagatataaatctagatggatacacgcaccaaaaatggcgtctcagacaaactcgaagcgcataagaagccgtgtggagctgtatttcactcccttgcgattaaagagtggaacagcgcgtatgccttgtcttatctctgaaactggtaaacaagtttgacctccaaaatcatctttttcattcacgtcgtgctcatgaacttcaacacggagcagagcaagttcaggaactgctaaagggaatgtgaactccttattccaaataggtgtccatgtatcatactctatttttgttttctccatcacctcatcaacaggtgctccagcaatacccacctgtattgaccagttataattccatttcaatcaagataagggataaaggaaaaatcaagattgtcgttcacatactctaacgaagaaatctggaggagaataagaatcaaagtgagtttttttgaagtctaggagccatccatctcccatacagactttcacctgccattgttagatgttaagaaccgagaagcgtgggaggcatagatgaaggaaccaacgggtgtttaaatctaaagcctaacctttaaagttttctttggagacgaattatctttggggtaaaaatcttgtccattaggacttgcatccataagaaaatctggcttcttgacataaccgcaccctccatttgctcgaaacattccttccatcagccacaatgctctgccatacccctacatttacgttttcaatcattatttagtttcatgatcatagtaaaacctggatgacgatacacgaaatgaggatttgagacaaacctgcatgttgaatgcaatcatttgagctccgctcatccaaccgatctgaggtttatagtttgaagagttaaaccttgtgcctttgggatatatcctcagaaaattcttctgagtgaatctgctcacgtataagggttttaataaattaacttgaaatacaagaagcaaacactagctatacagtgcctatttagcatgtgatatttatatacctgataacatctgcaccatatgatgctacagctttctcaagtaattgctcactcagactaagtcgcctgattttatttggatcaacctttaaagccatccgtaaaccgccttttggcttcccggcatggatagcgataagacgcttgtattctggtgcttgtaattggcatgacgtatcagactcacaagaccccctttcttcatcatcttgattgagatcatttacactgcttgtcacctgaaagcaatcaaaagtggtatgatgctacaagtttttgcttcaattgttattttgatatacagttgcaaagctagaacaaaccttgtcaagatcagattgcgtagaaataaggtcttctggctctttgccccatacatcctcatccgaatccttacctttttctccattatctttctccttagtatcgttagcttctaagtactcttttggaggttttgttgaaattagaatcttttccttcaactcttccggtgaaggaaattcttgacaaccttgagaatcatggtaatacaacatatctccaaatgtctgagttatcatctgcagagcaaacactttacggtattcatatatacatagacggaaccatgaactactttaaggtctcaagactatagaggtgaaaagaaagaaaaccttagcaactttaaactgaagttttggcgtgagatggtcttcaagagtaataataacaggatactttgaaatagcaaaggcattagctttaatagattccaaacattttcccaacttcacttcctttgtcaatgtcctgtagtttcatcaaagtgagaaacataataataacagttccatggaaccaatacatacaaaagcaagaccacaccttccatgtttaacgcagacatcatcggtagcacttttag

SEQ ID NO: 8967 - DNA, 669 bp, Arabidopsis thaliana landsberg
  unsure (1)..(669): unsure at all n locations
tcccaacctgacaaataaaatacttcattctcaaattcaaagttaacctttatacctttatactgttgtaggctaggttgtcggcaagatcatccttcgacaaaattgaaagaccatcttccagcttcgggaatcccatgcttttgcctatctcccgacaaacagatatttctttgttgtccgggagatagtataagaagtcatcttcattgcttccgttaaaaactaaggctcctttcggatatttcagtttttgagcataatgccttgcttcagcgatttcatcttcggacaatttcttccccgaagcatgtcgaacgatgtagtcgatattttcaattggagcttcgggagcggcagtctcgaccttttcaggtgcagtctgccctgccatctcttcctcaggcgcgataggcttcgtcgcggcgggcgctaaaggcccagcttcggtttcagcccgagtttttgtagcttcgacttttgcttgcttagtatcagtttcggcttgcgccttggcagcttcagcaactttcattgtaggagcagggntcaaggcattcgtagtctccacacagcgtctagcacgttggccatcatctcatcttgggagttgcagcagaacctgaaagagcatagggctaaattttgtaaatgatttgggtggtgaat

SEQ ID NO: 8968 - DNA, 529 bp, Arabidopsis thaliana landsberg
tggcctgagctttgaaattagcttcgtattcctttactttgttcaccaaggaaattaagatttggtctttttccagaccttcgttcctcagttcaatcacttctaaacgaaggttattcagagccattgtatagccttcgtcttcaaaattcttctgtgccctcagggattactaagaatcaagccctgtaaaaaagaagaaagaaatgagtatgacaatgaaatacattggtttctactttaaaagttaacttttatacctttatactgttgtatgctaggcattcggcaagatcatccttcgacaaaattgaaaggccattttctagcttcgacaatcccatactcctagctatctcctggcaaacggatatttatttattgtccgggagacagtataggaaatcatcttcattactgccgttaaacactaaggctcctttcgaatatttcagtttttgagcataatgccttgcttccgcgatttcatcttcagacaatttcttcccgaagcatgtcgataaatgta

SEQ ID NO: 8969 - DNA, 490 bp, Arabidopsis thaliana landsberg
aataatgcaatttccaaaaaaaattgagccctccgatagaggcaacactgccgaagtacaaaaggcttctactgcaactcccaagaggagaaggatggcgaatgtgctggatgttgtgctggaaacgacaaaagccttgattcctgctcctacaaggaaagttgccaaagctgccaaagcgcaacccgaaactgatactaagcaggcataagtcgaagctacaaaaactcaggctgaaaccgaagctgggccttcaacgaccgccgcgacgaagcctatcgcacgtgaggaagagatgacaggacagactgcacctgaaaaggttgaagctcctgctcccgaagcttcgaacaaaaacactgactacattattcgtcatgcttcgggaaaagaactatccccagaagaaatgctagaagcacgacactacgcccagaaattgaaatattcgaagggggtattagtgttcaattggtagtgacgaagaaga

SEQ ID NO: 8970 - DNA, 541 bp, Arabidopsis thaliana landsberg
tgtgcgagcgcgcaattttctttagcttcggtcagctgtctcccaagatcttcaattttggttttttgggcttcgtcctgagcttaataattagcttcatcttcctttactttgtttaccaatgaaatcaaaattttatctttctctagaccttcatttcttagttcaatcacctcggaccgaaggttgttaagagccattatacaactctcatcttcagtattcttttgtgccctcaaggcattactaagaatcaagccctgtaaaaaagaagaaagaattgagtatgacaatgaaatacttcgtttccaactaaaaagataacttttatacctttatattgttgtatgctaggctgtcagcaagatcatccttcgacaaaatcgaaaggccatcttctagctttgggaatccatactcttagctatctcccggcaaacagatatttctttgttgtccgagagacagtataagaagtcatcatcgttggtgccgttaaacactaaagctcccttcggatattttaatttttgcgcatagt

SEQ ID NO: 8971 - DNA, 1384 bp, Arabidopsis thaliana landsberg
tactcactgtgaggagatcatccatactgtaatatttggggctaacgtggtagaagaatgagtttaacttgatcgtcaggtcttaactggtttagggttccgggtttaaggttttgaaaagcattgcctgttggtgcgaacaccgtcataccttcggatgaactattgacttgaatgttcacttgactaccgacttgagtgatgtttagaagatggatgaaagtagtgaattgaccacctttttcgaggatcgcagtgaggttgatgggaccagcaggctctggagcgggggctgccggctgagccgttgccttggttgcgagtagtacggctgcgatgaggaggagaggagctagagttagacgagtggtagccattattggtttgcttagttaaagtgtgaagagtgatttggaaagtgagatcggaagggaatggtttatatggaagttgaatgtttggagtgatgagttgtatcttgttggaatgagatggccaagtcaatacaaaacgtttgtagacaaataatgtctagactagagatatatcattaacataaatgttgtgtagatgaattcatatacgaatatatcagccgttaagattcgtttagtatttaaaattagcatatgagaaaaatattagattagaatatgaggttggtggaaccgtaggtagagcccacatcacatgtaatgggatcgagagagtcaataatttacataaaatatgtgtggaagataatgttcgacaacacaacttacggtgtaaggtggacgtaaatcgggataggaatttagggaatgaaatggagaaaattgaaaaatccttggacataaaaccttctacatttggtattgctacaagcctacacctagataggtcctattaaatcagaactttttttttatagatagtatcatcactatatcatcattagaagttaactgagaatagaatacaaaactttacagcataaatgacttacaaataatgtaattaacgtaatccgcaatatacatacaattgatgcattcatacatatagatgcgtagacatgtagcatgtaatgtatgttagaagaatatatgatgtgtgtgtttttgtaaaaaagaacaaaatgagtggacaggctgactaagtgacagctgggaacacacaagttggcatgtgggagagtggaagacccttaagtttatattgccttatcactaacaattgcatatttaagacaataaactaattaattggttcattaccaacaccatgaaatcccgtacatgaattcaacatagaaaatgtgtatacatttgttctagaatgcatgcatgacgtctctccctttcgttgatgtgaaaacggcagggacacgttactagagacc

SEQ ID NO: 8972 - DNA, 1759 bp, Arabidopsis thaliana landsberg
ttaatgccgtcggttctcacagtctgatgtctaagaaggttaaggcccagaagcttccgttgattgagcaattcgagattgaaggtagcggtgttagtgctagtgacgattgttgtcgttcggatgattataagttgcggattcagcgtcctgagattgttcgcgtctactatcgtcgccgtaagaggccgctacgggagtgtttactagatcaggcggtggctgtgaagactgaaagtgtggagcttgatgaaattgattgttttgaggagaagaagagaaggaagattggtaattgtgagttggtgaaatcgggtatggagtcgattggtttaagaaggtgtaaggaaaacaatgcgtttagtgggaataagcaaaatgggtcatcccggaggaaggggtcttctagcaagaatcaggacaaggcgactctggcttctcgttcagctaagaaatgggtcaggttagggtctacctatcatctctttaactgttgaaattcatggactttgaaactgttgcgctgttgttttgcactgatgattttcttagttcagactttgaagaccttttattgttagtgggcagactccttatgatggagttttgatgtggcaggttgagttatgatggtgtggatcctacaagtttcatagggctgcaatgcaaggcgagtgttttaactagacaattgtccactttaagctattgcattttccactttttttgtgaatgggacatcttaacaattggttgtcgtttaatccctaggttttctggccgctggacgctctttggtatgaaggttctattgttggatatagtgcagagagaaagcgttacactgtaagtaattctctactctacttgagttatgagttgggtagttctttgagctatgatatatgtaaaagcttgttcctctaaccatgattaaattcttccttaggtcaaatatagggatggatgtgatgaggatatagtttttgatcgtgaaatgatcaaatttttggtttctcgtgaagagatggagctattacatctgaagttttgtactagtaatgtgactgtcgatggccgtgattacgatgagatggttgtattggcagctactttggacgaatgccaagattttgagcctggagacattgtatgggcgaaactagctggtttgtcttaaactgatttccaccttttattcatatattaaaaaaatacctccttatgctatcagcaagttgatgctgttggaagcatgtagacaaagaaaactacctactgacttccatagaactgcatttgctttcctattcggacaggtcatgctatgtggccagcagttattgtagacgaatccattatcggagagcggaaaggtctaaacaacaaggtatctggaggaggatcactcttggtccaattttttggaactcatgattttgctaggttagtcagcgtttcctatatacttaaaaaatctcgtttttctactgagatgttgagatcaatgttacacattatcaagctgaagttaacatcctttggttttatagaataaaagtaaagcaagcaatctcatttatcaaagggcttctttcgccatctcacctgaagtgcaaacaaccttggtttgaagagggcatgcaggaagcaaaaatgcaagtccctctcgcttttctttggcattctgctttcttgactttccagtacatgttgcattaacaattagaccaatcatttcttcatgatgtttcatttt

SEQ ID NO: 8973 - DNA, 1323 bp, Arabidopsis thaliana landsberg
attcatgattgaataatatagaatttgttattttaacataaatcacttaaaatgtttgattgaatagttttaatagattttgtttaacaatttcaaacccacaaacaagtgcgtactttgaattgcttttacgttaaacattttttgtttgttatccaaggcatgttttttttttttactttgaatttcatcaagattttgtttgaatcaaataaacaaaataaaatctttcatcaagtttttgtttgttttgatttgtttaagattgaaatcttactttcaaacctaaaaaaaaaatcttattttaccgaccatggagtacatttcaatcgccgaacttcttagctcccgcacgtagcgagaattttcatgagaggtggctgagacatttaatggctgactaaatatctttccccagccaactacattaacccctccatgcatgcctcacctactttatcttctagttacttcgtttatattttatgattttgtccaatatgttttcccatattactgttttaataatgtaatagctataatattcatttttccccatattattgtttaattattgcaaatatataactgaacgctaggtccaaacctaagtaaaagccatgaccctttttttttggtgaaccaaagctatgacagtttttaacatgcattaataatgaaattctttattttgtgttggatgatatcaaagtaaacaaaaattactagttaaaacttctttttacatttcagagaaataaatattttgattatcttgttgaatattatttacaaattacaagtgtaaacaaatttttatatttgtttacatttagttttggtgcaaatgtttgttctgttttattccagtgatttattcatctaatgaatccagtatattcctataagtagttaccatttgtacattttgtaaattgaaaaaaaaactaaaatattaaggttttaaaatacaatttaacatatatatatatatataagaacaaaaaaaactttaaaatcaatcatattaaaaaggtatacatgtacacaccacataaaataattatccttagcaccacaaaactacaatcattcaattctcaaatatttgtggggtttaggcttacacatgttagctaaaaataaattaaaaacttatacaatttttttttttttttttacaaaatccatttaaccaccaattttttaatcttaaaaaggcttctaaaatgggttagggggttaccttctggggatttaaagcgggggcccaatataaaccttacccaaaaaacgcacaaattatattttctttttttccct

SEQ ID NO: 8974 - DNA, 810 bp, Arabidopsis thaliana landsberg
atgttttttttgtttctaacttttgagagttgatataagaattactttaatttgtcaagatctcgtcaagtgattatacttgatgaaaatctttttgggatcaaaacggtttgaagtaaagatcgtactgtcgtactggtgtctgtagattgatattaaactcgaacaacatgattattgtaatataccttaactaccatataatttttttcaattctttctggatacaattgtaagaaaacagaaaaatcggaaaaatgagaaaattcaccaaaactaatggggttgttttgaaattagtttgatacttgaggattgacaaacgaattctacttttccggggaaagaattagagagcgaaacagaacaaaacaaacaaaaagtcatgtctccgacgacgacatcgttacgatccctaagcttctcgctttacgcttcttctaattctactccgatttctacaccaattgaggcccgacagttactgagttcatgcaatagattctacggtctgtcctcttcgagctcttcttcctcccttactacttcatctttgatcggaaatcttgttttctcatcaaggaatcagtctctctccgtaaaggtatacaatttcgtaaatttttgtgatggatttcaactttacggcctaaattcgagaacccatgtttcacttattgagaaatctgcttaattcttatgtcacttgtagtcgattgggaaattagggatttctatatgtgccattgattgtgattactctttatgtggtccttttggtcccatttgagatgtttaagtaggtcttca

SEQ ID NO: 8975 - DNA, 1452 bp, Arabidopsis thaliana landsberg
agttcatccagtttcagctcacagttaatgtcgcagctcttgtcatcaatgtggtggctgccatatccgcgggtgaagttcctctaactgcagtacaggttcgaaatagtagttttatactctctctttctcatctgcacaaaagtattcacttcagaacttggtaaaaagtcttatcccttacctatgtagctcctttgggtcaatcttataatggatactcttggggctcttgctttagccactgagccaccaaccgatcacttaatggatcgagcgcctgttggcagaaggtaccacttcttatcagacttgagcatgcgtgttaagtcttgttcaactatagagtgctctcagtttctcttcaatttgcacaataattggatttatcttttgctctcagagaacctctcatcacaaatatcatgtggagaaacttgtttatacaagtaagttatcctcttcttctttttcttatctccctagcatctctaagaacacaatggttaagccttttctgctgctccaactgttttgcaaattattaggcgatgtaccaagtgacagtcttgttaatcctcaatttccgtggaataagtatcctgcatctgaagagtaagccaaatgctgagagagtgaagaatacagtcatcttcaatgcctttgtcatctgccaggtaaaagatactgacttctctgtataaaaaggctaggggacgacagaaaacaaactgattgttaaatttgttaggtattcaacgagttcaatgcacggaagccagatgaaataaacattttccgaggagttctcaggaatcacctttttgtgggcatcatctctatcaccattgtgctccaggtactgattctctctcacatgttcctgcaaagcaaatgtagtcacttaatacataagacataccgtttattgctttgttgttaactgtttaataggtagtcatcgtcgagttccttggaacatttgcctcaacgactaagcttgattgggagatgtggctcgtctgtatcggaatcggttctatcaggtttgtttgttaactttgtcatcaaagagttttgagttggtgaaaacaagatttagtagatgcttttttcgtaagcttaccagataaattctgttttatgttatgtaaccagttggcctttggcggtgatcggaaaattgataccggttccagaaactccggttagtcaatactttagaataaaccggtggagaaggaactcatcaggtactttagttaccttttcttcgctattagccaagccactaaacgcatctaaaactttgaatttttctgttgattttcagggtaataattagtttgaaaagagaaaacagtttaataccaaaggtggcttttagtgggacttgtgaatacgtttacctcttttctctcagtattttcgcaaacggcatcttcggtttaa

SEQ ID NO: 8976 - DNA, 1213 bp, Arabidopsis thaliana landsberg
tacccttacaaactccttgataaacttacctttaactatttagtgcatataaagtagttatgaggtgatggagtttaaagactactttagctttgagaatgatggcttatgaagagtcgatgctttaaaatgatagaggagaagtgtaagggtcgatgataatctaaaatctaaggagtaaagtcattgattattgaaagataaaacttagctttaaattttatatggacatgtgacactctcttacgtactaacgtgtcatttatatggagagaattgaccaattttcataaatataatttgtgtgtacttttttcattgagtttgggaatttcaaaaagatttcattacttgttgatgttaggttgttagattttggattttattattgttcttcaattatggttgttgtcaacgcttaatcgagatagattacctagattagattctgatcttatatttaattcatcgaggtaccaaaaatatattgttgaattttttgaaggaaaataggtgagtcaaacgtccttagcaaacaagaattgaagataagacattttgtgaacaaacgaaacttgaaattttaatgcttgcttgaattttaaaaatcaaacgagagtttaatttttagggatttgattgcgtagatagttaatattatgagagcgggttaactttatcttagtgactgaattcaaaaacaatgcttagtctcattcctttaattatggccatgttcgacagagagtcgccaacgacagatctaaatgacgttgacggcagccaccaacaaagcaaaacaaagacagcagatgcgaaacgatgatgacaacatatgttatcaatctattatatctcttgttaatacactacatgtgtttacctctttaactaataaaataaagttatagaacaaaacttgaatttaattttcatctaaagttaaaaactgactttttgtgaaatttaaaattaaatgttaaaacgataaatattatgaaatggataaagtaatataggtttatgatattaaaatgcacaataataccaaacaaattttacattgtcatgtactatatttattttattttataacatatcaatttatagggtgcaatttttataacccgaaagacaaatgtatgtttaaatattagtttattgatatctcgcattcttagctagatgtcctggactttggaggacgttctct

SEQ ID NO: 8977 - DNA, 568 bp, Arabidopsis thaliana landsberg
ccaatctcagaaagtcttgtcaccttaccactcttttttaatcttctagtatccaaccaactccacatattgttgaatctgcattgaggttttacctttcaataatcaatgactttaccaataatcaatgactttaggtttttagctttaaattctatgtgtactgacgtatcattaatatggaaagagttggccacatttcatatacatgatttgtgtgtagtttcttcatcgagtttcgggatttcaaatggatttcattatttgttgatgttaggttgttagattttggattttattatttttcttcatatatggttgttgacaacgcttaatccagaatgattacctagattctgatcttatatttaattcatcaagtcaccaaaaatattgttgaattgtttgaagaaatataggagagtcaaacgtccttagtcaacaagaattgaagataagacattttgtgaacaaatgaaacttgaaattttaatgcttgcttaaatttgaaaaatcaaacgagagtttagtttttagggatctgattgcttagatagttattggtata

SEQ ID NO: 8978 - DNA, 374 bp, Arabidopsis thaliana landsberg
gaacggtattaatattagtaaaagcaatgtagatttaaacattttaaataaccttacaaacttcttgataacttaggtttaaactatttgatgcatataaagctagctatgaggtgatggagtctaaaacctactttagccatgaaaatgatagttttatgaagagtcgatgctttaaaatgatagaggagaagtttaagggttgatgataatcttaaattgaagaagtatataaaagtcattgattattggaaggtaaaactcaattgtaagtttttagctttaaactctattcggacatgtgacattcttttaggtgtcgatgtgtcactcatacacagcgaggtggcccactatcctatatatgatataac

SEQ ID NO: 8979 - DNA, 677 bp, Arabidopsis thaliana landsberg
  unsure (1)..(677): unsure at all n locations
tggctatacactgtatggcatgagcttgctctacaatagagcgattatcagccatcttataatcatgaaagctctccatgatatacaggtcactgccnnnnnnnnnnnnnnnnnacttagtagtaagtgcatcctacaactctttcccgtctgtgtgctgaatattcgcatcaaccagacggtcaacaagggcgctaagaacgactcccgtaaagatactattggcatggtcgtactctttctcctgttcaggagtaagtggaccctcaggtctgcctttactaacatggaagacattcataacagtaagccagagcgtggccttaacttgccatctcttaaagtgcataccattaaacttttctggcttcagcgcgtcagcaaaagcagccatagaaaaactaggaaattgtctacaataaggtttttggattgttgaataattagacaaattccagattaatttccgaatataaatcatgaccaaatcagaagaactgaagtaaaaagcgaaatcagatgatgcatactgattagacatactgatagatggcgcgcgccggaatcagcagggtcggcgacgtcgaagcagcgaaatcagcagggacgacgaggtcagaagatcacgagcagtcgcgtgaagacgcttcccaaaaaccttattcgccctctcccgg

SEQ ID NO: 8980 - DNA, 684 bp, Arabidopsis thaliana landsberg
tgatagatggcgcgcccggaatcagcagggtcgacgatgtcgaagtagcaaaatcagcagggttgacgaggtcagcagatcacgagcagtcgcgtgaagacgcttcccaaaaaccttattcgccctctcccggtgcaggatctagaagatgaagggttccggagacctgctctcctgatcgcagatgcacctccgcggtcgggacgaagggaactaaaaggcggctcagatatgaagagaggcgaaacgaagctgggatctgggatgatctggaggctggctgccgggctccttttatagggccgagtccgcgaccccgtgcttatccgcccacgaaaatctcgcaatcagttgagattttatagcgatcggttaggataagcgtaacagccaagaaaccaaaaaatcaaacggcaaaaggtagccgcgcccccgcaaggcgaggggccggatttcggcggaccattcacgcgcatgccgtgcgcccgcgcccgttcgccccggcccggccaggcgaggcgagcgaacgccgcgtgtggctctccacactctctcctctcatccatgacttggtgagtgagtgtggcttccatatttaagctagctctactccactagagctagcaatatggtgctattggttccacctattccttagccatccacttatatgggcttttgtga

SEQ ID NO: 8981 - DNA, 521 bp, Arabidopsis thaliana landsberg
tgttcaggagtcagtggaccctcaggtctgcctttactaacatggaagacattcatagcagtaagccagagcgtggccttgacttgccatctcttaaagtgcataccattaaacttttctggcttcagcgcgtcggcaaaagcagccatagaaaaactaggaaattgtctacaataaggtttttggattgttgaataattagacaaattccaaatataaatcatgaccaaatcagaagaactgaaacaaaagccaaatcagatgatgcgtactgattagacttactgattgttggcgcgcgccaggatcagctgggtcgacgatgtcagaagatcacgagcagtcgcgtgaagacgcttcccaaaaaccttattcgccctctcccggtgcaggatctagaagacgaagggttccggagacctgctctcctgatcgcagatgcacctctgcggtcgggacgaagggaactaacaggcggctcagctatgaagagaggcgaacgaacctgggatctggggatg

SEQ ID NO: 8982 - DNA, 600 bp, Arabidopsis thaliana landsberg
gaatgtttcgaaaaagttgtgagacactatgtgtagaaacctagaagaaccacacatgaaatcatatagttttaatgtagttattcttttaggtttctacaaatagtgcgtcacaactttatcgaaacattcttaaatttttaacacagcctctacatatgatatcatgacacgtggacaagtttcatgattttttgacttttttgtgttttatacaatttttaaacaactggttggcaagttcacgaccatgtttagtgagcatgttgctcgaagtttctggtcctctcctgaaatcagttgtaacttgtgctaaatagcatgaatatcatttttgcatgcacggttttccaagtttcgagtgacttgcagttcaaatctgaattttccgaagaaattcaaataaacgaactaaatctactagttatagaaaacacttttataattgtcccaaaatgatacatgtaggtctacatagtgtataaacatgccataaaaagtttggtaaagaaaataaaaaatatactttgccgagtgccaccgtgtggactcgacaaagtttttttaaaaccctaagtcagtctttgcgagcgcagatcg

SEQ ID NO: 8983 - DNA, 397 bp, Arabidopsis thaliana landsberg
gatacccagtttctactaatagtgtatcacaactttctcgccatactctccaatttttatcataggctctacatatgatattatgatatgtggacaagtttcatgattttctgactttgtttgtgttttatacaatttttaaacagctggatggcaagttcacgatcatgtttagtgatcatggtgctcaaaaagtccagtttgctcctacaatttgtcgtaacttatgctaactcgcatgtatatcatccttgcattcaccttactatgtctcgagtgacatgaagttcaaatctgagttatccgactaaattcgcatatcagttcaaatctaactagttatatcctacgcatgagatcgttgtgcccagatgtatcatgtaagtctacatggtgt

SEQ ID NO: 8984 - DNA, 570 bp, Arabidopsis thaliana landsberg
atgatatcatatgtagagtctgtgataaaaaatttagaatatttggagaaagttgtgagatattatgtgtagaaacctaagagaactacacatgaaatcatagagtttcaatgtggatctcttaggtttgtacacatagtgcgttacagctttctcgaaactttttcaaatttttatcacagcctctacatatgatatcatgacacgtggacagatttcatgattttctgactttgtttgtgctttatacaatttttaaacacctggatggcaagttcacggtcatgttgagtgagcatggtcctcgaagtttctggtccgctcctgaaatcggtcgtaacttgtgctaagtagcatgtatatcatttttgcatgcacggttttccaagtttcaagtgacctgcagttcaaatctgaattttccgaagaaattcaaataaacaaactaaatgtactagctatagaaaacactgttataattgtccaaaatggtacatgtaggtctacatagtgtaggacatccacaaaaagtttgggagacaaataagaaatcgaatatctttgcgagtg

SEQ ID NO: 8985 - DNA, 418 bp, Arabidopsis thaliana landsberg
tcataagcgacgctgcacctacgcacaaactcaaaccccgtcgcgggttacatctctccctacacccaccaaactgcagcggcgctcgttaataatttcataacttaaaatttaggacagcagtgatgataaacaaaaacttcagagacaactacataaaattccccacaagttttgtatacaactcatgattgaattctaacatctacttacctctaaacggtcctcaaaataaaccctgcaatctgtttttttctgatttgagcagcgacatacgcggattcaaacagcgataacttttaaaatataattccgatttgagcgcataagtacttgttggaaagataagaaaaagccctacatgattctcatactgattaacactaattactcccgaaacatccccagaaactgctaa

SEQ ID NO: 8986 - DNA, 719 bp, Arabidopsis thaliana landsberg
tactcaatgacacggattaggatgcaacccaaacggtagcaaccaccactgatttacttgcctttacaggaagttcgggcaaatccctaagtacgatccggaagtccaccacctgtttttgacacacaacttagcgcaccaatttcacataatcaggctcataaacgacgccgcacctacgcacaaactcaaacctcgccgcgggttacatctctccccacacccaccaaactacagcggcgctgcttaataatttcataactttaaaattatgacagcagtggtaacaaacaaaaactccagaggcatctacataaaattccccacaagttttgtatacaatttataattaaattccaaaatctaattagcccaaaatagtccacaagatgaaccctgtaatctgtttctctttgtcttttggacagcgacatacccggattcaaacagcgatatcttttaaaatataattccaaatcaagcgcataagtactcattgaaaagataagacaaatccctacatgattatcatactgattaacactaattacccacccaaaaattcccagaaactgctaataccactgctgttcacccacctgaaaaatctgtttttttggacagcaacataaccggattcaaacaacgatatctcctaaattataactccgaatcgagcgcataagtacttgttggaaagataacataaatccctacat

SEQ ID NO: 8987 - DNA, 508 bp, Arabidopsis thaliana landsberg
ttgtggaccgttttggggtagttagatgttggaatttaatcataaattgtatacaaaacttatggggaattttatgtagttgtctctggagtttttgtttgtcatcactgctggcttaattttaaagttatggaattgttaagcagcgccgctgcagtttggtgagtgtggggagaattgttaccggcggcggggtttgagactgcgcgtaggtgcggcgttgtttttgaggcttattatgtgaatttggtgcactaagttgggtgtcaaaaacaggtgatggacttccggatcgtacttagggattttcccaaacttccggtaaaggcaagtaaaacagtgatggttattccgtctgtcgaatgaagagtcttatacttgattatgttgtgctattgtgttcgtattcatatttttaattgagtaccatcatttgaagatattcgtgttttattgattacatatgttgagtttgtggtttgatcatgttactcaagtggttattatg

SEQ ID NO: 8988 - DNA, 637 bp, Arabidopsis thaliana landsberg
tgaaaaatttgtttttttggacaacaacatatctggattcaaacaatgatatctcctaaattataactatgaatcgagcgcataagtacttgttggaaaggtatgacaaagctctatatgattatcccactgattcccactaattaacccacgaaaattcccagaaatccctagaactactgctgtccacccactcacaaaattcctggacaacacctctaccgattcgcaaagataaacacataatccaattgattgcagcacaaaaacaacaaaagttaaacatgaattcaccttgggttcttcccttcctcctttcttcttcctccctccaaactccaattgagatcgcagccacacgatggagaacacgcgggagggctgcaccttggaggggggaagagaaattgggggggggggcggcggctagggttttgggtggtgagtgctgcaaaggtttgaggagaaagaagatgggagagggggggaggggtgctgtccaagaggaaggggaggggaagggggcggctgcaaaaatcctaaggggaaaagggggcggctagggttaggggagactaatgggccggatcaaggttaaggccaaatccccttgtgaagctccgactgaaaggaaatg

SEQ ID NO: 8989 - DNA, 549 bp, Arabidopsis thaliana landsberg
tgcaacccaaacggtagcggccaccactgtatttacttgcctttaccggaagttcgggcaaatccctaagtacgatccggaagtccagcacctgtttttgacacacaacttagtgcaccaattttacataatcaggctcataaacaacgccgcacctacgcacaaactcaaaccccgccgcgggttacgtctctccccacacccaccaaactgcagcgacgctgcttaataatttcataactttaaaattatgacagcagtggtaacaaacaaaaactccagaggcatctacataaaattccccacaagttttgtatacaatttataattaaattccaacatctagttagcccaaaacagtccacaagatgaactctgtaatctgtttttttgtcttttggacagcgacatacctggattcaaacagtgatatcttttaaaatataattccaaatcaagtgcataagcactcattggaaagataagaacaaagccctacatgatatcatactggttaacaatacatacccatgaaaaattcccagaaac

SEQ ID NO: 8990 - DNA, 568 bp, Arabidopsis thaliana landsberg
cagtccacaagataaacccttcaatctgtttttggacagcaacctagccgggttcaaacagcgatatctcctaaaatataactccgaatcgagcgcataagtactcattggaaaggtatgacaaagctctatattattcgcccactgattaccactaattacccacgaaaaaaccccagaaagtactagaactgctgctgttcgcccacccacaaaatttctggacagcacctctaccgattcgcataggtaaacatataaccaattgaatttcagcgcaaaaacatagataacctcaagatcaccttgagttccacctttttcctccttccttcttcccaccaattctccacttgaaacttgcaccaacacgaagaagatccaaacgaggaaggacagcacttggagaagaggagatgggggtggcggctagggttgtaggggatggctgctgcaaaaacttgagaatgagggagagatgggggggcgggggcaaccaaggaagatgggaggggggaggctgcgaccacaggggattagggggaggggcggctagggttaagggggg

SEQ ID NO: 8991 - DNA, 1162 bp, Arabidopsis thaliana landsberg
  unsure (1)..(1162): unsure at all n locations
gctgattttttgttaaccttcaaatggttatggattgagagcttagcacactcgcatgatacatcaaacattgtattcactttcatagagaaaacaaaaggagatttcagcttagtatgtgagattcttatgatgaaacaaagaagtacgacgccctaacgatttaaacagtgctctacattaaaactcacactagctatagaaagtaaaggaacaaacctcatctctctgaggtttgataagcccaaaactctgtgaattatgtattaaactcattactcatcatcctcatcttctacaacttcaatctccaaattagagccataaacttagaaaaaaaacaaacgaacaaaaattagaaaagaagacacatatcataaagaaggcttaaatcacacatctcaaatctaagcaaaatatgtaagtaacacacacatgaaattagtacttgcaacatttcacaggcctaagaactagtcacaatcaataaaaacaacataatttcccttttagccaccaattctagcaaaacccagaaaattttcaaatgtccaatactttagcaaattgactacaattttgaatagaagcttaaagagattcacctgattttggagacaaaatagaatacggtgatcatctagaacgaaaggagtgtgggagcaaaggatgtcgatggcggtctcaatgtcaccagattaaacttgaatacacttttgctgacgtggctagggcgactctgaaagcgatttagggttgtgctgccgtgtgtcccaagacgctggttctggcggatccgccgccgttctcccnnnnnnnnnnnnnnnnnnnnnnnnnngaggtcactctgtcaagcccccgagattccccatctgctgctccgaagccatcatactcttcaattgttcaaaacaagccttctctcacgaagcatgatttctctgtcaccatggttgacggagatccgatagttcagattcctgatgaaattttcgaagattcagctccactttgggacgatttgctcataggcagattcccacaaaccgcacctcacgttgccaaagttcatgttatcgtgaacaagatttggccgcttggtgacaaaacagtgaagatcgatgctcatgtggttgatccaaaaacaattaagtttcgtatc

SEQ ID NO: 8992 - DNA, 1912 bp, Arabidopsis thaliana landsberg
taaagcctttgccaatatatataattacaatgactcgtcattgataacaaaaaatattatgtagttatcgatgacacgaacattttaaattcaggaagtgatcagagtttttttttttcccgtcaaattgatcagagttttattatataagaatacccatatatgtagatctacaaaacttatttttgtatatatattttcgttaacaacatcaacatgtaatatgcgaaattaaattttaagtagtgacacatctaaatactaatacaaatcactaaagtacatctcatggacgtcgatgtatagctacattaaccatgcatacttaagtctcgtttttcgtttttttttacttgtatttgatgttaaacctaggtaaccaaacagtatagatgtcccctccccctgtatatttaattttgagaagcaaaattttgtgcatacgtgttgaaaactggaatttaaagaacttctttcaccatatattttttaaaatagaaaaattaatgagttgcagtaataccaccaagagtctgactggagaactaaccagcacaaatagctgtaacattttgcggctgtaatcgaattcaaatcctcctaatgcttttttttgacaacaaatataggttgatcttatatttaataaatcaaagtaaaagaaatatatttttaaaaaacataacttcttatacatgaaaaaatatctacaattaaactgaataacatacataatcattatataacgtgaacacatgtttagtcatgatctactacttatacaacgaaaacacaattgaacacatcagaaaatgttgcacaacaacttgaattcgaattctggagcaatcaaagccgattatatagaaaaagaaaattctctaaaatagcatgaagtacaaatacttaggacacaattactttggatcaaaattatgaatcagattctttttggtaactttctcgtttaaaaatacaaatgtctcccaatgccctcccaaaaaaaactgatcgattcatccacaaatattaagtaaaataaaataaaacaactcaaaacaccgatcgatgtcagtcagtagcgacagtgacaacgtaaattaatggttccgataagtctccgttggtttgcgttgttgttattaccacatcaacgccttcagtacacgttagctttctggctctaattgcttctttctcccagtccgtagtagccacgacatatagcatcatggcagcacaacatatctgagcagctaaaagacctacccaaagtccgcaaaatccatatgcggcccaaaacgttagcccaacggctacaggcgttccaacgaggtaaaacgctcctaggtttatgttcgctgccatggacggccgagcagtgcctctaacaaccccgcaacctactgtttgcgggcagttcccgagctcgcaaagcccgagaatcggcaacgcggctgcggttaatttgatgatagcaacgtcgtttgtgaagatccatccccagacatcgtttacgccccaagcaaacgcagacgccgtcagacccattaccccagcaaaggaaaccgccactatggctgataacctagccttgtttgggcggtttgagccaagttcgttaccaactcgggtggagactgctaaccctagagacgatgggaaaatgtaaagcaaagacgtcgtttggataagaatgcccattgatgccactggagtactagggtctatgagtaaaccacatagaacggtcattatctcgtaccaccaccactctaggcataccccgatgcagctaggtatggctagggttacgactggtcccaatctttgaaacattctgagctggggcgggtcacgttggctggtgtagactgcgatccaacatgggcacaaggaaaatgacacaaga

SEQ ID NO: 8993 - DNA, 638 bp, Arabidopsis thaliana landsberg
tttgattagtttggttttgactaaaatcaaaaacactaggtaaatttaatcaatataacaagaggaataaattctctagtgacaataagtaaacaatgtatgagaaacaactacggtgattgaatacttgagaaacaatatgcaaaacacgaattacttgcaaagcaataagtaatgcaagaaggtagagacaccgaaatttatcctgtggtatcagtgatttgccgatcacccctaatccacgttgagggtggacttcaagctctcacttgctcctctatcaagtcacggcttgatctttgagctaagtggacaagaaatcactcaatacttcgattccactaatgtcacctttgccgctccggcgaggtaggcgtgaacccctcacaatcaacatcgtggcttcaccacaatcttcttggagagctcgacggagacaatcacccgagccgtttaggaggcggcaacctccaagagtaataagccaatgacgcttgctcggtgtaccacctagtgcctcaagaatcatcgaatgatgcaaatgcactaggaaccctcaatctctcactagaatgcaatctcaagcaaagagtgtgagagagtgagttggaggatcacaaatgagctcaatgtgtgca

SEQ ID NO: 8994 - DNA, 458 bp, Arabidopsis thaliana landsberg
  unsure (1)..(458): unsure at all n locations
acaacatccacaacactaatcaattgcaaggcaataagtaatgctagaaggaatagacaccgaaatttatcccgtggtatcggtgatttgccgatcacccctaatccacgttgaggtggacttcaagctctcacttgctcctctatcaagacacgacttgatctttgagccaagtggacaagaaatcactcaatacctcgattccactaatgtcacctttgccgctccggcgaggtaggcgcgaacccctcacaatcaacaccgcggcttctccacaatcttcttggagagctcgacggagacaatcacccgagccgtctaggatgcggcaaactccaagagtaacaaggcaaagaagcttgcnnnnnnnnnnnnnnnnnnnnnnngaatcaccaaatgatgcaaatgcactaggaacctcaatctctcactagaatggaatctcaagcaaagagtgt

SEQ ID NO: 8995 - DNA, 1059 bp, Arabidopsis thaliana landsberg
ttcaatagatcgctgtattttcttgttagatacgtataatatagacaaaattatgttgtaaattgctggaaaaaagttatatcattaaatgcaatttccaaactgacattgagacgctattaatacacaactaacttttggtctctttttgttcacacttaaattcaacctctatcaatttttaatttttgggggtaaattactcaacccccctatcaaactctatcagtctatctctttagtagtttctaattattcgtgttaatcgtaaaaaataattaatgaactctaattgagatttacatttaattattaggaccgggatgttcgtcggtagcgtacggtgcgtcggaggagattggaccattcaggataagcaaaggtggttccggtttgtatctcaacaagttcgcatggaactccatctccaatctcttgttcctcgaagctcccgccggcgtcggcttctcttacactaaccgctcctccgatctcttcaacaccggtgatcgccgtaccggtaattttaaattaaaccaactccatctacggtttatcttaaccgagtttcggttcttgaggctctgtttctctgtatattgcagccaaagattcacttcagtttcttattcaatggcttcaccggtttccgagatacaaccaccgggaaatctacatcaccggcgagagttacgccggacattacgttcctcagctggccaaagagatcatgaattacaacaaacgatcaaagaatccgttaaatctcaaaggaatcatggtaattaagaaaccaaaatcctctgtttttcattaccaaaagaatggtgtttgtaaccgctgcgtttttgtaggttggaaacgcggtgacggacaatcactatgataacctaggaacggtttcgtattggtggagccacgcgatgatctctgatcggacgtatcatcagttgataagcacttgcgattttaagtcgtcagaaggaatctgatgaatgcgaaaccctctattcttacgctattgagcaggagttttgtaacattgatcagttcaacatc

SEQ ID NO: 8996 - DNA, 860 bp, Arabidopsis thaliana landsberg
ttggtttcaataaaagagatgaaagttaaggcaaagagagaaattaaagcaagaatacctctctaggcatgagtgtcttgggaataactctgtggtcaaataacaacaaagataagaaaaaagacttattaagacacataactctgtgctcaaatcgtcattgtttccttaaatctatgatcaagtgattagatgaagagttacccaataacatggcgaccaccatcatgaacagcttgcgaaaccaaacccatcaaacctatgcttccacctccatagactagatcaatgttccttaaaacctgtgatagtaaacgaaacagagtaaataaaccatctttatcactacagatagtttgagaaattagctatgaaaagaaatcaaaaccaaagatactctatttgtactatcaaattagatacaaacattcccatgcggaatttgtgggctccaaatcataaaagatgaatatgataaaagggaaaaaaagaaagaatctttttgagtgatcaaaattacatatttaagagcgtttttcaaagtagaaaacagaggaaatgctctgcatttgcaaaaaaaaaaactcagaaacatattcacaaacatctggtgaacataaaactgtaagaactcaagaaacagagtaataactacacatagaaaaatccagaggtgtatgtaataataccaattcgttgcctagatccacagcagcatcttggtaactactcttcttgccttggctgcttccacaaaacacacagattcttccaaactttgacttttgcatggtttcattgttgacctccattgaatacgatgagagctcaagcttatgaataaatctttactttttacc

SEQ ID NO: 8997 - DNA, 2757 bp, Arabidopsis thaliana landsberg
ccttcacttggtctggaagattagtgattcataagggtgaggattataaaagaaatttcaattaatatcttaagatagtttgatatccggcctatatatttttcaaaaatgttatattattcattgaatatttgagagtggatattttattttggggctctggaggattcgttccaattaacacgaagattttagtgtctagctagctagttaggcctattgaaagctacgtgtatagaaaactcacattcttagacttttcaaagcataggtttagagagatattcatgaacggtgatttaatgtataacattccaaaactatgatgatatgacgcgatgactttgtttcatttcattgacttgaatccctccattccttctataaattagtgcaaaatgctacgattttagtatataaagttgcaagcttaacattaatcatgaagatgtgtaatggatccagtttcttagcctcattaccactgttattgcttcttctcagcttcataatagcttccttcttcgacacggcaggttcaatcttcttttaacctattgattataccacattggtctctttctgattcgttttcagaattttattcttttcactaatgattcttcttttgaattttaagttggacaaatcggagtgtgctacgggagaaatggaaacaacctgcgacccgcgtccgaagtcgtggcgctttaccaacaacggaacatccggcggatgcggctgtacgatcccaaccaggagactctcaacgctctccgcggctccaatatcgagctcgtgctcgatgttccaaaccctgatctccagcgtctcgcctccagccaagcggaagccgacacatgggtccgcaacaacgtccgcaactatgcaaacgtcacatttcgctacatctctgtcgggaacgaggtacagccctcagaccaagctgcgagctttgtcctccccgcgatgcagaacatagagagagcagtttcaagcctcgggatcaaggtctcgacggctatagacaccagaggcatttccgggtttccgccgtcaagtgggacgttcacaccggagtttaggagctttatcgcaccggtgataagtttcttgtcaagcaagcaatctcctctgctcgtgaataattacccttacttcagctacacgggaaacatgcgagacatccggttagactacattctgttcaccgcaccgtcaactgtagtcaatgacggacaaaaccaatatcgaaacctattccacgcaatcctagacactgtttacgcatcattagagaaagctggaggtggttcgttggagatcgtggtgtccgagagtggttggccgacagcgggaggagcagcgacgggtgtggataatgcgagaacttatgtgaacaatttgatacaaactgtgaaaaatggatctccgaggagaccagggagagctacagagacttatatatttgctatgttcgatgagaattcgaagcagggtcccgagactgagaagttttggggactgtttcttccaaatctacagcctaagtatgttgtcaatttcaactaatatccttgaagacacttcacgataaagcgatatgagataaatgacttgtatcgtaaaggtttcctaagagtatgggagcttattgtaatagtaaggaatagactaatgagaccagaaaaataagaaaagtcaagtacgtttttacttcatcagttcaatatagggctcttcaatattataactagcaatcaacttgtttagaaaacgcacattcttaaacttttcaaagcatatgatatgatgaaattaatcaatttcttgacttaaatcttcgtctcgttttatagacgagccgaaaatggtactatttagccttaccgcttctttgacaccataagtttaatcatctttaagtttcaggcacattgcatataataacgtgtaaggtatggagttttactttattagagaaaaaaatataataaattttgagatgttatttaagacacaatttattttagtgatataaatttaagttcaaaaacatatggtcttttgcatttttagacgaaaagaaagaaatctgtcaaaatagtccaaaaagtagagataattgaaagaatggacttttgaaaattgtccactttcatattctagagaatttgtagaatatatggatctaaaactagccttaaaatattcatagctcttaaaatattcgaatatctcagagaaagaacaattacctacgaataaaaaaggaagaagttaaaactctccatgcattttcggttttatgttttcaataattttaagacgacttcggttttaagttttctttggtaaacattttcgtctcgtcattattcctcatgaaccatgataatctacctgaagtatactaaggtctttttagttatttaagcgtcttacaatgttgtggctcttcattgtttacctcttgtgataacgggactgatatttaatcagctttcatgctgcaaactaactcacattttacaaattgatttggatgggaagctaaaatgcaacggaagggtgacaactttatgctaaaacacccatttcctttgatcatcaaactacatgcttaagcgccaaaccaaaggtctttgcacggagaaaaagttttaaaagttacaaagctggtgtttgatagatatggaatgcaaactgatcatgtttatgtttttattttcgcttatgcagaggcaaggtgacaca

SEQ ID NO: 8998 - DNA, 1924 bp, Arabidopsis thaliana landsberg
tgactatagtcctctttccaaagacaggaggttcctgtgtataacattaacatgaactatgacttaattaaggatcaagttaagggttaatcaaatggttgtaaaaaacaacatgatctaccacgtacgtcatattcttcaatttcttgctcctcaatgacaacgatggtaggctttacactaggagagggacgaagcaagtcctgagcttcttcccaagtgagtctcagctccatagattcttcactatgcaaaagaagtctcttattttttgcaccaatggttcgagttctcttcttctctttaactcgtgtaggatcatcacctatcctgcccccgttagtctcactgttcaaattctcaggcataccattcaactctttcggtattagtgaaatacacgaggaaccatttatggagggtgggttttctgttacaccagacgatgatgtgtcctcagttgatgttccgttggtgagcccacaaccctatttataaatattgtaaccggataagaatggagctaagcagaaaataaaaaccagcacattcctacagaaaccagttcatagaaaccccaacctgcatgtctccagcattagctgccttcctggaacccatgattagttttccgccaggatcaacccgactgaaagttactgtagaggtgaaaaacacagaaaaccaacaatagttttagaaaatggttcatgaaaatttgatgttaaaaccagcaaatgcttgaagctttagctaagacatgaactatattaaaagtacctgtatcaccagcctgtagcatcatggactgtatgcatggagtgacaccttctaaaacatacattctactattgttattgggccaatatctgaactggaacgtccactccctacccctcacatcttggattttcaaaggaatgccttcggattgactaatcggaggaaaatatgcctatataccaatgcagacatcagtcataactctacaaaatatttcaaggacaagaaaagacatcaccataggaatgggaaatttacctctgcacaggcttttggaagaactagacgaccaatgcgaccagcatcactggcactaagagttttctcaaagagaggtacaatgttcaaattcaaactagaattttttaagataaacaatgagtcaccagaagtctgtccagaataaaatatttggcaaaagtactagaagcaaataaaggatactttccagagatctgctgaacctctttatccgtatattttggccaataccgcggaagcaagtggcctctccctcgcccttcgacaggaggccttccaatccgcgcctgagcggatttactagccacaggaggagttgaaatagcaggtcttgatggcttttgcagtatattagaagcagagcaatggaccatgttggactgagaaggactgatgtgtttcattccctcgacagcctcggttgcaaaagatgggctaaacggattcacagccaaacccatatttaaagatggctgtaaaggtgatgattcatgcatttccccagcagcatccagcctatgcccggtggttgtactttctggactcattagcttaccaaacccacggtgaggcatgaactcttcccttttatctccgcccatgactagtggctgagaaaagagatcgccttcgtttcttcctccgctttcgccatttacatgttgcctatcagctaacgttttcattggcaatctgctaaaaacacctggattctcaccccttgtgttctgcaaaacgtgaagacagaatcattacaacaacaacttacatataatatactcgaatacgctgaaccgagtctagtaaaaactcaccaaattgagttgatggcagcaagcacatgtactacaaccaacaccaccatagtccattaactcaa

SEQ ID NO: 8999 - DNA, 2043 bp, Arabidopsis thaliana landsberg
ctagatctgacttctccattaatattcaccaatacttgtttctctctctcaagttttgaggatcttggtcctcatgggactggcagacacatggatcacatgttacctgagatcccaaggcaagatttcagaaagggtgcacaggtgaaaaactgttaacttaatctctcagttgtggattgttcttaagttgttgcttctctaagtctgtttggtaatggtattgttgaaattacgtaaatgtgtaattcccacttttctcttctggtggtagtggttcacaatgaagcgtcaacacgctgtaatagtgatggctgatggtctctactactcgaaattccgggagtattgcagagtaagttcggtattcctttataccaaagtttttgtttgcatgttacagcctaccatatatgactgagttccgttgtaagaaattgttcataaagacaccaagctttggttcatctcaagcatatctcttttgctaatatcaagagtcctcagggttttcaaaaacttgagaaaagtttcagttttgtcttactctgattctgatttgaaaatcctcagcctggagtagaagcaaacaagaactgcatcgcggatgaacattacctgccaacattctttcatgtgaggagattataacaactttctctcttttaaaagctttcactgtgattcttgtcccttaatgaaatctttgttccttaaagatgcttgatcctggaggaatctcgaactggtcagtcacatatgttgattggtctgagcgtagatggcatccaaagacatatagagcacgcgatgtctcactcaagctcttgaaaaatatcacggtaatgttacaacactttattcaacacatcaatcaagctcgtatgctatcacagagtaaagcaggatcatcatccggtttatcctgttagcccaaccagatggttgttactagtcacttagaagtggttaactaaatattttccttccattgtttattgcagtctgacgacatgagtgtacatgtaacaagcgttggcaaggtacattactcgtttactgcattagaaaacactccaaaatgtgaaatgcttttcttgatttatcttctgcgtttttcttatcttagcgcggagaagagctgcgttggccttgtacatggaagggaattagacgaccatgttatctatttgcaaggaagcttcactcagatgctctttacaaactggtcagactctttccaaattacacaagcacagtggtctaagccagagacaaattcttgaaactaaaccatacgattcttgaaaccggaactaaacacttccagatatgccgagattggatcgcaatttactgtaaatttttgctttctcttgctgagatttagtgtctctttacatggtactctacttttattaaggtttagtataagaagaaagttagaagcagaaattttttggtcaaggagagatttggttatcgtgattttagccattgttcggttagtgttaagcggtatatgttgttgtaaaagctataagtagtttagcacaacgggttaagaattttggctgtgttcagttctttgacatctaaacataatgataccaatatgaaaaatactttttgctcgtagtaaaaaatatatatatgttctttgacaaatgttaaaattgatttagtttacaattattttcttaatgtccggctttcaagcccgtaacgtaaaacagaattgaacgtcggtgccgtcatagtgacaacaccagtgactgacttatgaaccttattgtttttggattttttttccctgaattcaagcgtcggttatatatagataattctattgtttgttaaaagaattttatatctttacgaaacggtggtcaaatgtttgtatataagaaaagacaagagctttgcttcatcatgtcacacacaaagtcgcaaccacaaacgtgaaacgtgtaaaatatgactgtgctttggtttgtatcacttatcttactcatctctatccttctcgttgccgtcaaacac

SEQ ID NO: 9000 - DNA, 1359 bp, Arabidopsis thaliana landsberg
ggttgatcacaagagcgacgctgtattgttaccaatatacggcattatggttccattcaacgtgactacaataagaacaggcttaggcaatcaaaacaccatccgtgtaatcttcaatgtcccgggtacacacttaaaccctaatgactctttgacaaacaaggacgctatctacctcaaggaggtttcattccggaccaaggattcaaggcatagcagcgatgtagttcaacaggttaagagcctcagacggaaagtcatggcacgggagtcagagagagctgagagaacttcattggtgaaccaagaaaaacttcagattgcaaggaacaactccaaacctttaaggttgtccaatctgtggatccgtccgccttttagtggacgcaagaagaatcgtgggacacttgaagctcatgtcaatggttttaggtattcaacgaccaacgagcgcgtggatgtcctgtttgcaaacataaagcatgcgtttttccagccggcggagaaggagatgaccaccctcttacattttcatctccacaaccacatcatggtaggaaccaagaaaacaaaagacgtacagttttatgtggaggtaatggatgttgtgcagtctttaggaggtaggaggagatcatcagcctatgatcaagatgagattgttgaagaacagagagagcgcgataggaaaagatcaacatggatttcaatcactttgcaaataaggtcaacgatatgtggcaactaccccagtttgcaagtttgggcttagagtttgatcaacctctgagagagtttggtttcaatggtgtcccccacaagacatctgcgttcataatacctacctcaagctgcttagttgagctgacagaatccccgttcctggtggtaagtctaagtgagattgagattgtgaatcttgagagagttgggtttggtcagaagagctttgacatggctatcatcttcaagaacttgaagaaagatgttctcagggttgactcagttccaacaagttcgctagaggggataaaggaatggcttgacactacagatataaagtactacgagagcaaactgaatctgaactggagacggatcctgaagacgatcacggatgatccgcagagctttacagatgctggaggatgggagtttttgaatcaggacggaagcgattcagagtctggcggctctgaggactcacacaaagggtatgaaccatcagatgtggaggttgagtttgagtcaggggacgagacatcagagagtgagtcagccgatgaagaagaagaaacgcacccagagcaagagtcagaggtagagaatagtaaatcttgggctgagctggagagagaa

SEQ ID NO: 9001 - DNA, 1220 bp, Arabidopsis thaliana landsberg
caactccatgctctctgtctgcattacgtagcttctctctccagttcatcccaagtcttacctttctctttctctgactcttgctctgagtcctcttcttcatcatcgtctgactccaccagtgactcactctctgaagcctcgtcctctgactcagactcaacctctacatctgatggttcgtatcctttgtctgactcctcagacccgccagattctgaatcgcttccgtccaggttcagaaactcccatcctccatcatctataaagctctgcggatcatctgtgatcgtctttaggatctgtctccagttcagattcagtttgctctcgtagtactttatatctgtggtgtctagccactcctttatcccctctagggagcttgtgggaactgagtcaaccctgagaacatcttttttgaagtccttgaagatgatggccatgtcaaagttcttctgcccaaacccaactctctcaagattcacaatctcaatctcactcagactcaccacgaggaacgggtattctatcagctcaactaagcagctggaggtcggtattatgaatgcagatgtcttgtgcggaacaccatggaaaccaagctctctcagaggttgatcaaactcaaggtccagacttgcaaactggggtagttgccacatatcattcacccggtttgcaaaatgattgaaatccatgttgatcttgttcttcctatcgcgctccctctgttcttcgtcaatctcatctggatcataggctgatctcctcccaccacctaaagactgcacaacatccattacctccacatagaattgaacgtcctttgtcttcttagttcctaccatgatgtggttgtgcaaatgaaaatgaaggagagtgatcatctccttctcagcaggctggaaaaacgcatgctttatgtttgcaaacaggacatccacgcgctcgtcaggcctggtagttgaatacctgaaaccatttgcatgagcttcgagtgtcccaggaatcttcttgcgcccactaaaaggcggacggatccacagctcggacaacctgaggggtttgaacttgttccctgcaagctgaagtttctcttgggtcaccaatgtcgccctttcagctctctctgactccctggccatgacttgccgtctaagggtcttaaatctgtgagttacttcgctgctatgccttgaatcctggtccgggatgaa

SEQ ID NO: 9002 - DNA, 1046 bp, Arabidopsis thaliana landsberg
ctatcttggtggacatgcattgcgagtagctcactttgataatgtttatcgaaatctaaaccagtaacgaagcattgagaaaatcatttagtaaaccaatctctagttaagtaaaacaattttgttaataaaaattcatgaggtacaagtaaaacaagttctagttgaagtaagaaacttttaaagaaaaattccctaaggacattcgatccttacaccaaacagcataaaccctcctttgttctcctctgatttggtttctttatcttctaacatggagctaaccaagttttctgttttctttacttgcactgaactgtcatgaaccgtcatacttacttcctcagctaccacggaaccgttgtctgaaaagcaatgaacatcgatcatcaagaagttctttctttgaccttctaatgtcttcacattgttcgggacatcgcaagtgtagaaggcaataacatccttctccttgagattcttctccttcacgaaactattccatcctctggtgaagacaaagctctggctacttttccagtaacaatacctaaacttccattgtctcattgctctgtcgtaaaacacaacctccacatcttccacagatcctactatttcaccctcttctttctcgctttgatcagcgcttatgaaaggcatatacttcactgcatactttttaggtatcacaagcctatttagtttccctacatcgctcggtgtcaattccttctgaaaaagctgtgtgcaagaaaaacacttgtctgattcttgattcacttctcctcgggcttgttttggtcccccgatgttgatactcgcaacaatctgagatctgattctgagaaaatctctgaatttgtgttggtacgaaccgtctctgatcatgttcaacacagtctctgttgtgtagcaattttgaaagtctggttcgttgagagtgattgtagaccaagggaagttccggtgcgagttagcgtcaaagcttcggagtttgatagatgcactatcgtaagccgtggcggcttcatcagcggatttga

SEQ ID NO: 9003 - DNA, 510 bp, Arabidopsis thaliana landsberg
cggcatacctccacaagcccgccgtcctctaacggcttaggggcacacgcgccatcgtccatacttgctatgcaacgacgggcggcgcgggcctgcgcaacgtccagccgctttttgcggaactcgccgatggcggcttcgccgtcgcccataacggcaacatcaccaatgcgctgaccatccagcgcgcgctgcagaagcagggctccatcttttcctccacttccgacaccgaaaccatcctccaccttgtggcgacgagccgcgaaaaggacttcatttcccgtttcatcgaaggcatccggcaactggaaggcgccttttcgctggtggcgctctcctccaagaagatgatcggctgccgcgacccgctcggcatccgcccgctcgtcctcggcgatctcgacggttcctacatactggcctcggaaacctgcgcgctcgacatcatcggcgcccgtttcgtgcgcgacatcaagcccggcgaactgatcgtcgtcgatggaaagg

SEQ ID NO: 9004 - DNA, 586 bp, Arabidopsis thaliana landsberg
  unsure (1)..(586): unsure at all n locations
ttctatactttgtctttgaattgtacctacactgatgatttattaagntgtgcgactctgaactttatgcataaaactactaaatacgaatccaaaacatgagaaatctttgatagctttgtagtctatgcatgtcaacttgtcaagagtttgaaaccatcgcctgcaacattgtgcatagtttgaaactatttaccttgttgtgaatttgtgatttttcatatctaaatttcatatttttttctaagttaagttatggaaaatgtcacagtagtttacagtagaacctccataaattaaatactttataaattaataacctctgtaaattaataaattctttcggtcccaagttaggaccagtgtaaaaagttacacaaatcgataaattaataagataataatttttttgaaaattctatgtaaatatatggtctcatttatatcataaattaataattgtataaatataccaaatatatatatatatatatattatatggaaaaaaattctgaaaatatatttataataaatttttgcttaattcatatttattctttggttgactatagttttcatatttta

SEQ ID NO: 9005 - DNA, 684 bp, Arabidopsis thaliana landsberg
taccttcgaggtaaagagggtttctgttttcatctcttcatcagaaatctcatgaaccgtcttgtttacttcctcgggaaccacgaaaccgttgcctgaaaagtgatgaacatcaatcatcaagaaggtcttgctttggccttctaatgtcttcacattgttggggacatcgcaagtgtaaaagacaataatatctttctccttgagattcttctccttcacgaaaccattccatcctctggtgaagacaaagctctggctacttctccagtaacaatacctaaacttccattgtctcattgctctgtcgtaaaagacaacctccacatcttctactccttcactcgtctctttctcgctttgatcatcgcttatgaaaggcatatacttcactgcatacttcttaggtatcacaagcctattcagtttccctacatcgctcggtgtcagttctttctgaaaaagctgcgtgcacgagaaacacttgttcgattcttgaccaccttctcctcctcctaagacttgttttgatcccacgatgttgatattcgcaacaatctgagaccggattctgagaaaatctctgaacttgtgttgataagaaccgtctctgatcatgttcaacacagcttctgtcgtgtagcactcttgaaagtccggttcatggagggtaaaatcagacca

SEQ ID NO: 9006 - DNA, 1801 bp, Arabidopsis thaliana landsberg
gcattcgagtactatttagaaacataatgggacaagaaatttctgtcctacagatcatatataattgtctattaggtaccatacaatatcaatatgttaaattgataatattcaaaataaaatagagttcttatggtctaatgaatttatatatgcaaaacacagatgcatatgtggggacatggatctgagttcagaaaaggggctgactcgttgaaaggcacaacccaaccggcagccatcctgcggctgccatgctattgctgtgccgagggatgcaagaacaacatcaaccatccgcggtccaagcccctgaaagatttccgtacacttcagacacattacaaacgtaagcatggctccaagcccttttcttgcggaaaatgtggcaaagccttggctgtgaaaggcgactggaggacccatgagaaaaactgcggaaagctttggtattgtacatgtggatcagatttcaagcataagaggtctctcaaggaccacattaggtcctttggcagtggacattctcctcacccgtctcttttgtttgacggttttgaggaggatacagaatgcgtcaccacagagtgagaatgttgttagatacaccggggagactgtggaaggtaagatcctaattttctaatgttgcttcaaactgtgcaccacaaaacatctcaagtctaccaaagaatttctatcttgaaaaggtagaaattctttgttagactcgaaatcaaaatatataaagttaccacataaaatgaagcaacattttaaaatttagatctttttcctttggatacggttacgattaagtctacatgaaacccggtgtcatctgtctgtttttattttattttgctttagtttgagacatagatttgagtatttgtgtgttacgtaatatgcatgtgatattagggttcttggtttggtaggggatttttgctactaaataagtaaccttaagaaaaaaaggaggtttaattatgctcactaacaaaaacttctctttgtccgagggatgtatttgtcggagagcattttgtggctcgagtaaacccctatttatcttagtgattagtagtaagtatgatttcaatcttaattagggttttcttcttaataaagatggtttctctctttaaaattttgtgaagcacgtgaattttctgtttctctcatgtatttgtattagaagagaaaattggtgtgcttcacttcattattgtacgataatcctcaattaaagactcttcctattatattgtctctcttttcattacatataatagctttcgatcttcttgttgttacaaggattcacgcttttgtgttttgcatgaataaacgtactactcaaacgtattaaacttgcgtgtgggattaactttttcgatcgacacgtcaatctgaatgattttgatttatattgatgtgagaatatcgtccaaatataccatatatatatttcaatatgtgtgacaacacaaatctaaaaattgtaaagagtactcttaccattgggaaagtgttgcatcttcactgcccaatctgaagcaaaatctttgggacttggacaaaacgacactcttgccaacaagcttcttcgcttgaacaacaataactacatgacaaaactcttgatggtatatatgtatattcaatggtaaacttgtaccaaagggatcttgaattcttttggtaagaatggaatggccctgggactgttttccaggtctcgatacaatctatactctgcttcatagtcatgaagcttcagtctgctttctgatta

SEQ ID NO: 9007 - DNA, 511 bp, Arabidopsis thaliana landsberg
tccagttcacagagtactgaatcttgaaaagcttgtttcgatgtggaaacggcttcgcgttaaccgcaacctccgccattttccctccatacggattgaaaacaagcccgattttccctaactcaatcatcttcttgaacaaagactcaatccctttcttcggaatcgcagtcgcgacgtaatccgatttcctcttaccgaaactcgaggtatcgagattccgatcaagaaacactttaggatcaacctgagtagcattaagacgattgtcccaccataaagcagactgaaaccaagtcatctccgaacaattctccttctttaaacccaattcaggaaactccttactaagcaaagcaacaacttcatctgctctgcctaaaaacagagcaaccacagaagctctcacagtctttaccttcttcctcgtcactggttgaatcacacattctcataaacagattcggatcagttttcggaccaaccgattgccatttgtgaaacatatcac

SEQ ID NO: 9008 - DNA, 1162 bp, Arabidopsis thaliana landsberg
aattaatagtaattacttaaaatctagtgtaaagtgataatgtatttggaaatgacattagaaatggtagaattttacctcttcacatttaatttaaagtacctttttttgtcatcgattttaagtatttattacttttaattttcgtacatgtgatagcattaccatatgttatattctaccgctttttgtaaggaccaatatatatatatacatatttttataatgaaatgattgtcgcttttttattcacaactgattgaaaaagacattaaaaaatcatctttcaatagtaatttgtaatataaagaaagtacattgttgaaagtattatatatatttttttgccctttttaatccgatttgtaccaaatattttttttgtcatcgatttgtaacatatattaaaatgtgtttcatgcaacctgaattattgaaaaaataatattttaaacaattatctcaaattgaaccggaccctgaatttgggaaaaaagaaaagagtacaggaaccgaaacttcaaccacaaatgcaatcatatcaccgcatcagtaactccggtgacacaatccaacagagtcaaaacgcggtcgtctcaactgcctacaacttcatctcaccctcgtcaaaagctctctacgcgcacagaaagcatgacattctcttcataacttgctataatgctatgttaaatatacacagattcaccttttgtaatacgtccaaaaccattgagacgacgttcaatgagtaaagcaaatcgaaacatagtccctcattcattaaaagaaatgtcattgatcatttaatgttcaaaaactagatacatcaaatatctttaatgtctatcatctatacatgcaatacacttgtctagaatcaagcaatgtgctcttccttctctctgtacacgcagatcacttttgaagtttgtgcttcaccctagcttttcggatagagttgccacgagatcttcccgagctttctctaaggcacttgggagattttcaggctttctgccgcctgcctgagcaaaattgggctttccaccacctcctccgccacacagcttagctatggggccaatgaatttccctgcttgaacacctagggagactactccaggactaaatgcagcaactaaactaaccttgtcttttt

SEQ ID NO: 9009 - DNA, 808 bp, Arabidopsis thaliana landsberg
  unsure (1)..(808): unsure at all n locations
caaaataatatattaaaccgagttttatgcaatctgaaattattgaaaaataacgttttaaacaattactttaaattgaatcggaaccgaaacttcaaccacatatcattagtccttacaatcatatcaccgcatcagtaactccggtgacataacccaacacagtcaaagcgcggtcgtctcaactgccaacaacttcacctcaccctcatcaaaagctctctacgcgcatagcaagcatgacattcaccttcataacttgctatatattatgctatgttaaaaatacacaaatttataaattcacgttttgtaatacgtccaaaaccgttgggacgacgttcaatgagtaaagcaaatcgaaacatagtccttcattcattaaaagaaatgtcattgatcatttaatgttcaaaaactagatacatcaaatatctttaatgtccatcatctatacatgcaatacacttgtctagaatcaagctttgtgctcttccttctctctgtacatgcagttcacttttgaagttgtgcttcaccctagcttttcggatagagttgccacgagatcttcccgagctttctctaaggcacttgagagattttcgggctttctttccaccacctcctccgccacacagcttagctatgggggcaatgaattttcctacttgaactcctagggagactattccaggactaaatgcagcaactaaactaaccttgtctttctctggagatgaacctagtaccacagagactggatctaccaatgtgctnatcaaatgctcaactgcactctttaatg

SEQ ID NO: 9010 - DNA, 942 bp, Arabidopsis thaliana landsberg
ctctccggagtgatctggatattggaattagatgaaaatgtaaaagattggatgaaggagaaattaccaaaagagcaaaagaagaagagagtagatctcttggaggtacatccagttaggagatttgctcgcatcaaagatcataagctcatcttgtctgattcattagatggccctcagaatcctattactttgaaaggttgctttgttgacgctgtttcaggctctggaccaacaaggaaatggtaagactctcaaaaagcgtattaatcggatccattttcgataatgtttcgagtttcgtattcatactcctttgttttatgttatcttagggctaaaagatttcctatacaagtagaaagcaaaacttctgtcttgtataaaggaaacagagtgttttacattttcttagagacttcttgggagaaggagtcatggtgtaaagctcttcgtcttgctgcttgcgagaatcaggaaaggtttatttggtccaccaaattgaaagaagatttccggaactatctggcttcccttaatgctgcctatccttcttttatgaaaccatcagctgggtttagttttgagtcattggacaaggggcttaaagcagatggtccttcatcaaaggttcgtttgatccggaagaaattttcgaaaaagtgctcaagtaaagtgaattttcccccgtcgattcgtgacgacaagaagacttcatcccgttcttaccaagattcacaatctactggtagctctggaaagagtaccccagcaaggaggatgcaagataacatcccggaggaaactgatgtccaagttatctcacgttcttggagccatagcagtcatgcatcagatgtagattcagaagacaagtcttttgatgaaggaacattggcattgaacgtagtaatttctcgcctgctcctttgatgttaaaca

SEQ ID NO: 9011 - DNA, 851 bp, Arabidopsis thaliana landsberg
aagggaaaagtgttggtagattgatcagagctggaggagaatctcatgaggatcatcatcaggtttcagatgatgcttccccaattggggaaagaaggtatagaatttgatttggtagaattaggttcaatgaaggttatgctcgatgaaatcatcaactatgttcagtcattgcaacaacaagttgagggtaagaatatcccaacaatgcaagttacttgaaacgctcaagttagtttggtcacaagcatggtctgaaagaggttttcattcttgacaagctgcttttattttcttcagtttttgtctatgaaacttgcgacggtgaatccagaaatcaacattgatatagacaggattctagccaaagatgtaagagctcaaatatcccccataacttcgcattgaaataatagtttgcaagttatgactaagtactaaacctctgccgttatctctttttttgcttctgcaatcaagagacagaaacaatcactcgggctgaatatactgaacctatcctatacacgagttgatagtttttttcctataagagtttaatgtgtactcttttcctatattttcagactgaaaacaaagtcaccatctcttctgttgtaagatcctccaacgaagaacaatagccatcgaccaaactgttttgttttccttctaatacctcaattatcttctcttcaatagttccttttgatatgaacttcaccatcctgcaccacaaaaaagaatcagaacagttttttaagttgtcaaaagcaaaatcataacattaggaaagtctacctcgtcggcttgttctgtcggaggctttgaactcgagcgtgggcctggcc

SEQ ID NO: 9012 - DNA, 581 bp, Arabidopsis thaliana landsberg
  unsure (1)..(581): unsure at all n locations
ggattggacttagaggttactttagcagttaatttttacaaaattttgctgaagttttcattgggggggattgttcaactagatcaccggaaaagcggttatgctcgatgaaataatcaactatgttcagtcattgcaacagcaagttgaggtaagattatcccagtaatgcgagattcttgaaactctcaagttagtttggtgtgaaagaggttttcattcttgaaaaactgcttttattttcttcagtttttgtctatgaaacttgcgactgtgaatccagagatcaacattgatatagacaggattctcgccaaagatgtaagagctcaaaatcccccataacttcacactgaaataatagtttgcaagttttgaataagagtactaaacttgccatttttctcattttagcttctgcagtcaagagacagaaacactcctacactcgggctgaatccttttgccggttttcaagggaacataccaaacctttctgccaccacanatccacaatacaacccactacctcagggttagcacagcttagaagaaataaacacatattatgtcaatgtttg

SEQ ID NO: 9013 - DNA, 944 bp, Arabidopsis thaliana landsberg
ccggacttgaatacatgagcatcactgattaccaatctgagagcttcataatacataatatatctccttgtgcaaaggtgaacatcgatgttgtctttgatgcggaggatgaagattctgttatccatgattttatcaccgccatatccactgtccgtgaattgacaatctctgctcgaactctagaggtacacatgattcatttgagtcaataccaattcattttatacaattttcttatggacagttgatatctttctaacagatgattcatgattacgttgaatcggaaacggaactagtacctcagttctcgaacctgttttgcttgcatgcttcgttctctgaatcttcttgggaaatgtttccgacatttcttggttgttgcccgaatctacattccctcttcttggtgcgcatcattttcctattatcctataatagcattttgaaagccctaactaaagaacgaaattttcgtttggttgtatcatcaggaatttgactgcttgccagagaaggaggagattaaactgtcattggttcctcattgcttcgaatcatctctcgagtatgttcaattgaaggtaccaatcacagtgagtgagacatcaagcaagatggaactagctatatactttgtaaggaactgttctgttttgaagaaactgatgttaaatgaaagtttcggaaacgtcatcaacaaagtcagaaagattcctaaacggtctgaagggtgtaaaattgccatgccaaagccattgcacgagaatgtttctcatggatccagtttactacctttgatctgcgggttcattcccaaaatacttgatcagtaatcaagtggaagatttcttagattttttgtggacatggatcatgggtctgaccaaacatttgttttttttgtaagttgaatctataatttgatcgacttttgttat

SEQ ID NO: 9014 - DNA, 670 bp, Arabidopsis thaliana landsberg
tttcttgatgatgttactgcccacttaaaagcattttcgtcaagcgtgtacacttcttcctaaaatatgtcgctagtttcattttacttggtgtcgatggtgccttcaactgaagaaagtcgagagaggataagacacattgaggcactggtgagagtttaatctcctccatctctggaacacagtcaagttcctagtaacataaaacttttgataagttttcttgggatatgaatctcaatgtaactacgtgaaatatagacaaataaatgaaactcactatgacgagcgaatctagattcatgcagcaactaagaaaggctggtaaaacttcccaagaagattcgactaacgaagcatccaagcgaaacaagttagagaatggagggaatggtcccaccttggagtagtcatggatggactgtgtatagccaaaaaaaagtaaatcaacaccatatacaaaattgcacaagctaaatgttatatttaatcaaccaatcatgtgtacctctagagttcgagcagagatggtcagttcgtgaaatgtggataacccgacgagaaatttacgtatcttacttatctccaatggatcatcatcctcaacatcaaactcaacatcaacggttacctccgcaaaaggaccaattctatgtattttaaggcttgg

SEQ ID NO: 9015 - DNA, 1871 bp, Arabidopsis thaliana landsberg
agcttcacttcctcttctagggatactattgatcttagaataagcatcaactttgaaactagctgcacaaagaacaccttcactatcaatcctcggcattgccttcatcatattagtcggatggtcaaagctcttaagccctgtctcactatgaaacatacatcctgcaataacaaaaacacaaaacacacatcaagatctaaactcaaaagtatgtttctttctttatagggctaatgaaaaacttaagttttggtttaccattagggaaaggagcaaacgatttagcacagccttgctttatgatctgaatatcatcagacattacaacagatccgtctccagaaattccccagtaaagactctctcctccatcagaactcagagctgagaaaacagaggaagtttgagtatcgtagacaacgaaagcgaagcttccctcaagacctctaagaacttgatctgctgggtaaggaccacgatcacgaagtgttcgataagcttcgatcacaaacattgcctcgtttgagttcttcccagataaaccgtattgtcgattcaatgtacagagattattcaatctccctagaaacatacagtagatcccatctagtccacagaacaacctgagcaaaacaacaaaaccattatgaatctatgaattggatttagagatttgacttgtatatatgtgttttatgtatattagtatatacctttgacgaagagaggtttcttggcgagcgtaagctaagacggcggagtcgccgaagttcatagagaaagcattgttttggtgatgagagaggaagtcggagagagtttcgccgggaagtttaggagttttgccggagaaatgagaagccggactgttgagttcttccggtgggtgagcaaaagctttctgaaatattgccaacattttcgttttctttgtctttgattaatccaatgcttgaaatgtgttatgtttttgttgaagacaatgaggggttttataaaggtacgagattattattacacgagatgctgacttggattttaagataagactgacatgtcttacgtgttcttatccgtttctttttagacaaaattattctgtagttaatctttttttttaaagtgtctggtaggtaaataaacaaattgtgaatccaatgatgattagatatttaatctgacgagtaaatctttttggaatgatatgattttttaaacgtgccacgatagaaaagtagtatgttttttttttgtcatgttggaaaagtggtaggatattttttgacagcgaaatagttaagtgaaatatgattttgaatatatgagatattttattaatacaatcatataagatattttaaatatcggaatatctatttatggttcatcgaaccttaacgatatgtatgaatgttaacttttgtagttatgatcaatctaatttaatgaagaattcctattgtaactatttcctaaaatctcgtattcaatcccaacaattactcattcctggttacaattttcctttcacacaaatattttttatacactctcatagcttgaaaaacctaactctctcttaacttctttttttcccatcattgcatagagattatggagtgtattgtggatgatgtatcggatagtacatgtatggtgacgccaatctattattcgaaagaaacaactcaagatcgtcagacttttttgtttgattttgaagttgtctacacaaaagtgcctgagccaaatagtgatggagaatctgactacatgtccagtaaggttaaaacaaggactacaaatcaacttcaaagatatggtcgagaaaagttcattggtcaagatgaagaacaaatcaaagccac

SEQ ID NO: 9016 - DNA, 255 bp, Arabidopsis thaliana landsberg
ggtttgtgtcgagaaatggaccgccaatgacgagtttgtctagcttaaacttgcctcacgcatacccttatcgttatgcccgtcaatcaccaaagcctaaaggaaaagagccatgactccaaaatagatattaatttagctcttcatgtctgaccaaggtttactgatttgagctgtatgtacagctttctgttgcatagatccttctccactcatgagggggtctgcaggcttatactgctaacaaacagatgg

SEQ ID NO: 9017 - DNA, 845 bp, Arabidopsis thaliana landsberg
  unsure (1)..(845): unsure at all n locations
ataattagaaatattcatctcacaaattactccaaacgaatagtgtgtgtaaatcaaaagacatgcttattgtatatgtatgtgcctatccttttttcttgccaaaatgagatctctttgagatttggttttgatttttatgttgaaaacaagatgtataaaaactttaatcactaataaaattagtaaagttaagtaaaggtaaatcccaacatgtgagatcgtgtgnnnnnnnnnnnnnnnnnnnnnnnnnnnnnntaggcaccctggatttggtctacacgaaattcagactaaatgatattggaatctacttcaaaaaaataaaactatctacttagaaaaaagaaaaaaaacattctaaactagttttttggtacttctctctctaaaacctctcccttctctctaaaagtagatctagatctcagtttgcgttgcctggctctggtggcttccatagcgccggagttatgcctctcttgctctgctgtaaagtttatgttgcttttgcttagtttatgtgcgttgtggtgtagggattttcgaatggttcttagatggcttatgttgtttttgtgggttggtctctgttgctaatagcgcctcttgatccggtcatgttttagccttcttctcgtttagccttttaccagggttggtggttgctttcgtttctgtccggttcgatctcctcccgtttttgtttatcggtgtggtccagattgatttggttctctccttgtctctactctaaagatctgatcgagatctcatctgttcattggctggtttccttcgggcgctaaacaatcatattctttgattcgccgcttccgggagtg

SEQ ID NO: 9018 - DNA, 996 bp, Arabidopsis thaliana landsberg
acccccacgtaaaggggattacctttaccttgcagctccagcatttcacaactctccaacatatctttgaagggtaagaaagcagaatctccccttctaggaccacctctcttctctccattatgcagaatgacattgaagtcccctagcatacataaaagtttttaaacaaaagttttcactaccttttctctctctaaaagctctcttttctctctaaaagtaaatctagatctcagtttgcgttggttggctccggtggcttccatagcgccggagctatgcctctcttgctctcctgtaaactttatggttcttttgtttggtttatgtgcgttttagtgtagtgatttaaggtggttcttagatagctcatgttgtttttgtgggttggtcgtctctgttgcttgtagcgcctcttgatccgatttggtttaaccttcttctcgtttagcctattaccaggtatggtggttgctttcgcttctgtccggttcgatctcctaccgtttatcttcttcggtgtggttcggattgatttggttctctccttgtctctactctaaagatcttatcgagatctcatatgttcattggttggtttcctttaaggcgctaaacaatcatattctttgattttgccgctccgggagtgtaggtgtgacttgtcgtctttggtctagttcttctcgccggtatggattccttggaacccttctatgtaaggtagtcttcattcgaataggtggcaccgctgtccgtttggttgggagttccttatcccctactgagtggcttgatgtaaagctctgccttttcttttgtttggtaatgtgggtgacgaaaattattgtgtttaaaccattggggtggttttgggttgcttttttttgttttcagctctttaaaaaatttttttctttttggcaatggtaaagggtttttggtttttctggccctttggttttgcgtttcccccctttttcctcttttggg

SEQ ID NO: 9019 - DNA, 1801 bp, Arabidopsis thaliana landsberg
ttcctgatcttaacaattttgttgtgtatcatcagattccagacatttttcctctattggctgctgctcagatagcacttatctccaaatcacgcgattccttatcaaccagaactcttcattctgagcttgtctacaattactcaggatctaagcacgtaagtacaatcttttcttgtccttcttaaacctattcctgtctacttctgataaacaatgggtctagttctgttgttccacccttagctataggtcgactataactagattagacttaatgcatcagattctagctgttttgagttggttagagagcagttagttagctagtgaccagttagtgtgtctagttcagttgttcaagccttagctacaggtctgctataactagatggtgatttaatgcagtagattttagctgttgtgagttggtttaagatgagatagttagttgagtattgagattctctcatttatcaagtttctctggtttggtaaattgtaataagaatagcagttcactcaacttctctaatgttgtttttcctcttcaactagattacagaatcattgaaacgatgtgggatttctgagaacactacttacattctagctgcccggttcaatgcttctcccgttgaggttataatcttttcaaccatctaagagctgactatccatgttgttgctctttttagtggtttttttttatcaaccatgacatgatttgagatcaaaaccagatggaggaggtggcgaaattgatcaacgggaaggagattgatttggaggaattgaagacacatgcaaatcaagccaatatactaaaggtaatgttttggtaacagttgataacccttttatttcgcttccaatgttacagaaataaactcaaatacattcatgttttcagcattacaagataactagccaagagctcggaatttcctctctgggagatgccattgtttgtcgaatagctgcacgtgatgctttgtaggagtagacatcttttctttatgtcttttgtcaccaattatagttttctcctttataaacaacgttgacacttacgtttataattcagaccaatgttgggtttcttaacctctttatttactctctcctcagataggtttaactcagattttatatgagataaacatagaattgaccacaaacaaaagaatgagactactaattacatgctttcttgttcttgttcactttaaacaagccacagtgtcaatctcttcttgcacttaactccaaaaaacgccaacaagaaagagctcatttatcactggaacatatcagcaattgtatttcctgaatctgaagaatctccattcccaaaatccatcatcatcatcatattcatccactcctccatattgcaatcctctcctcctccgttccattgctctgcttcaactgaatctgtggcgctcacactggcgcttgcacttgcatttgctcctatatcatcagcagcaacaggagatgaaactgaagacgtgtaatccacaaaggggaagttgagtttagcccttggcccacggaatccaatcgggctcgatcataagctcgagccgcatcttcggcggtttcgaaagtaccaagccaaacacgtgtggctcttttaggatctctgatctcagctgcaaattttccccaaggtctttgcctaactcctctgtaaccattcttcttgttcttcctcttcctgattttcccgccaccttccgctttcttcgccacgggagagctctctcttcttctgctactactactagtaatc

SEQ ID NO: 9020 - DNA, 646 bp, Arabidopsis thaliana landsberg
aaaccacaatttaactattctgtttcactaaaagtatgaggaaaacatcatgtgcaacatgtttataccttctttcaacaggggttctatgcataagatgatcggttggtggctctgtagctagtgcaagtgctccaagagtatccatgataaggttgacccaaagcagctgcatcaaagaacaccattatatcttttatccttgtcttaaaagttcaaccattcaaataagcatcaaggtactaacctgtacagcctttagagggacgtcaccagaagacattgctgctacaacattgattataagtgcggcaacattcacagtaagctggaattgtatgaatttctgaatgttagcatacacagaacggccccaacgaacaacctggaagagtaaacagagtttattgattagaaaagcataaagatgaaggataatgtagaagatcacatgtttctatatttgatgtagtagactaacctttactactgaagcaaaattgtcatccaaaataatgatgtcagaactctcttttgcaacttcagttcctgatatacccatagagagacctatatctgcctatagttcaaagcaacaaagaaaaatcagatttggagatgacacacaacacataatacataacct

SEQ ID NO: 9021 - DNA, 1878 bp, Arabidopsis thaliana landsberg
ccaacgacaatcactaaagacgcattaaacgtccttattgcatggagaagcagctttaaatttaaaaatgataccatattagaaatcttgtagttcatagcataaatgttagttcacaaaaaaacaagagaaaaagatgctaaaatgaccgcatagccttcacgaacgataaatcccatagtgtcaatcaccatcccagaagctctagattcagcgtttgcggaaaactcttcttttaattctctggcaagttcttccacaagggttctgtacagtctaaggtttacactgaaggtacaagaaacgaaaattaggttatattaaaccctaaagaatcagaatttgaagtcaatcaccttggatttgtgagaccaaagtagtgaataagagccttatcaagaggaaacccttcaacaggatccacaagcattttgataggagcagcagcgatagttcctggtatggtaatcgagctttgaccgacattaagatcaacaaatgtcggtttccaaccatcttttacagcccaattcagaagcattttagccaatgtgctcttcccagagtctatatcccctacaatgataacccttggtccctccttcaaacaaaaccgcaattcaagttactacaagaactggaaattaatgttctttagtaagaaaaaaatttacctgtgaagatgcagaatctcttgttgaggaagtaacacgatgtctttatacttgtagagagttgtgcagtccaagatagttcaccataggcgtctataacaaagatatatttagtaaacattatattatctgaactaagagtgagtggaaccaaaaacttacctcacatgatatatattcatttcctgtgataccatctatttcaatagttgcaccataccatgtaaaaacctgaatagtagagcaatataaatcatcaagagtataactttctatgttatctcaattcataacatcattcattacctaaagcttagatctttaaactaacccacaagtccacaagatgaattttgaagttgcgtaagtaaaaagcataccgcaaatgtcatgagaggtggaaatgtgatccaaacttcatgtggaagttcatagccgaaaatctcagccttgccatcgagcaaacggagtctgagaggtgaagtaggttgtaattcgattctgagttcgctctgtttctccaacttcactcgtcttatttgaggaccaaacatgttttgtctctatcagatttctcaagaagacaaaaagtttgatgggacttaagttcggatttaaagagttcaatttctggagaggaagatgaaaaatttctaactttgaattccatattccgatgtatcgagaattacgaagcgtcgcattcaaggaagaaagaatttatttagatagctgctgcacaaaactccattctttcgtctctctcatgtaaacggcgtcgttttagccttatgaagcaacggcgtcgttttggtatctctaatcatcatcttcatttgcttctcaaattgagaacttaagggtttaacggatttattttggtgatgaatcagagtctttgcaatagtcgttgacgttagaattcgataagtaggatcaaagttcggaattttgagtgtgtaatgagcttgaatttggcaaatcctgtatgggttcctgtaaaagctttgttatgtagaacaatcaggagaaggagaattttcactgccactgctataactagtttagccgaccaggtaaaaacttcgcttagtaatttatagcagtttctgttctttgtttgttttgttttgtctgaattgttgttgggttcttaaaaaagggggaaaaggatgagagtgagcttttggttgttgttggtggc

SEQ ID NO: 9022 - DNA, 1781 bp, Arabidopsis thaliana landsberg
ctgtccattatcacaaaaagaaacagataccggagattatgagattcagcagaatgcgcggattttgcgagcagaagttctcaaaacctctacaagtatatctttcatacagtccaaatagataacgggtgaagacccagataagtatcaccacttgttcgagagtctaatgtttgttgctaaactctggagattcgaaaggttccatctcaagaccgattcaacaatgaggtgagttactatatgatcttaaatactttggtgaggtccaatattgttttccacttgctcatagcaatatctcattttgaaaaacttaaactcataattaaagggaatattctaagaattggaagatgaaatgtttagtacctgtaacactgagaagagcaccgagagaatgtagctgtggagaaccattgatacctatatggtaccaaccatggtatccatgaaacccttggttgaaggaagcctctggagaagtagacaagatattcaaaagagaggaaggaaatcactcttggatttaaggcatgacagacacacaatagaacagtgtaacatacctccatcgaagacatgtgtgcgagctgatttttagggccacgaagtgcgaagaaggatccaatgatgaatccacatccaagggtgaaacaaatggcaaatttctgtggcataagcaccatgactggaagaaacattgtgaaggcaatgaagatgaagaaaacaccacttgcgagaagtaaaccgaaatacatgagcgcttttcctgaaggcatactacttgttgctgactgcaagctccctggaatatctctaactccttttgaaaccctgtagtcatcaaattcaggtacattgcaaaaacaacagaagaacaagaattttatcagagaaacaaaagaagattcctgaaaacaactacaaatataaataactcaatagacttattcactaactctaaatccattggtatgcaaaactcataaatgcatttcccaaactatcaaatctcacaatcaacaaagtaaatctcaatagctcagattcactaacacccacttctcactaccactaataaacctcatcttcttagattcagtcacggaataaacattatgagatgactaattgcaacctacttacacactgaaggtgcccgaaacagtgtcattggcagatctaacggcggattcgatatcaaagccgaagcttccgccgctttcctcgaaatctctagaggctgcgtaagaattccaatccgcaagcagagacgaacccgattgctgctgctgatctacggtgctactcccgcccatcgaaaaccatccttgtgacattttttgggtttcgggatcttcaaggaaagcaaacaatgatagaccagaacgccggcgatcggatatttttcgttgacgttttaaggttttttggtaaacgccgcagctaaagaattacttactcgggaagaagaagacgggagaaccgatgctgtaacgtcgatagaagtcaacggcgtcgtttcttaagtaacttagctttaccatttttttccccgagtaaaacgagtaatttggaaacttcttgagtgaatttaaaaatactggtatggtaattcccttattaatccaagccttaaagcagaactcatcaagatatgtagttccaagcagttgttgttacagatttacaatagaaaataaataatctcacagccaaaatacttcattaacagtcagtgacaggacaaatatcataatactttcaagagctggatt

SEQ ID NO: 9023 - DNA, 757 bp, Arabidopsis thaliana landsberg
  unsure (1)..(757): unsure at all n locations
tcatactaacccaacttgtattttaaaacagcaataagaaagtctacatgttttttactaaacacattatgtttcgacgaggcaagagcttactagatgaaacatgcagggtaaaaaagaacttcataggtaagatttgtgaaatggggaagaggaaaattttaacatatgaaaaacagaggatataaacaccaacaagagtcgggaaggaagatgaaatttaagtacctgtaatgcagagaaaatcacagagagaatgtagctatggagcaccatcgagacatatatggtgccaaccatggtggcaatgaaacctaaagttagtggaagcctctggagaagccagcaaacaagaaattaaaattccaaagagaaaaatgtaaacgaaatacagcagatataagaagctgcacaacacaaggttttgttattagttattacctctgccgatgacatgtgagcgagttgattttgcgggccacgaagagcgaagaaagatccgatgataaatccacatccaagggtaaaacaaattgcaaacttctgtggcataagcaccatgactggaagaaacatggtgaaggcaatgaagatgaagaatacaccacttgctagaagtaaaccgaaatacatcaaagcttttcctgaaggcatactacttgttgcagactgcangttatctctaactcctttcaaacactgttaacaatgcagatttgagtacaacaaaattcaggatcaaaaagttagtaacact

SEQ ID NO: 9024 - DNA, 644 bp, Arabidopsis thaliana landsberg
tctgaacttcataaaatgcttctttcttcgaatggtcatcttcttctttacaagaaattcagcttctatatccatatcctctgcaagtcatacaacctcaaactttcaatctcaaatcttgtctctctatatttttgaagatatgaaacgagtcctttcagttcgataatagcaacatcaatatcaatgtcagccgattgtaaagtcttgctcactcggttgacaacagctagaagatcataccaaagaatcataccaaaaagaatctcaaacactccaataccatgtgtttcactctctgcaaggcattcacatcacttcgtgtttttggatcgtcggtcttttctgccaaataaagtaaagcatctctgatttcaagagtttgaaaacgtatggctttgacaccttcgagatgactctctcaacgaatttgagatgaagatttaagtgttggaccttttaccatctctttaaatatatcccacctgtttgttgaagatacaaacaaacagtatactcgctgtaaactcccaaaaaaagacattgcctttgtcgaagaagatgctatatcgcaaagcacaaggttgaggctatgaaaaccacatggtgtgtagaatgctcttggattaatttcaacaatcttc

SEQ ID NO: 9025 - DNA, 1610 bp, Arabidopsis thaliana landsberg
  unsure (1)..(1610): unsure at all n locations
atgcagatagaaatcagtgaagatttgtacatcccttatgttttttttggtacttgttgttatgtcacggattcggattctggtttgattaatcttaaacggcttatgtaaaattttgcagctggcgattcttttggttgtgtttgtatttatgttgggagcgtggtcaggattttggactgtcaagaaatttgttgtgacaaaaaatggttctgttgacattagtacatcaatctttgtctcttggtccatccgagcttttgctgtggctctgatccttcaggtacttcgttttttctctgcttttgcttttgattcatctttgattataaccaaaccttttggtgattgaagtcttgatcttgtgttaattaacagagctctttagatccattacttgctggaggagcgttgataactggaattctcatctcattgattctaaagagtattagcagaaagctgttagctcaaagaatatatgagcaagatgatgaaactgagagttgtagccccggcttgatccatgctacctcgtttgcttctcctcttcctagaggtttcgattttttctctttgtgtctctagtggtctgatttctttatactagtccctttatctcgtaatgttgttcttgaagaaccggtttttcttctgtaaatggtttttgcaggttccaacaagaagttgaggacagtaccattatctgagtcagatatctttccttcttcattccacaaaacaccagaagggagaaggaagctaacgaaggaagagttgcaaaaattcactaaagagagcacggaaaatgcattgaaggaattggtttcttcacctggttttggcgaatgggcggtgaaaaatgctaaaagaatcactgtaaatccgataaaggaatcgtcaagtaaatagggtgatactgttaagcgcagaagaaggttcctctggttctgaaaagcaagcagctaggggaacttctgaaccagtcggagaggtagtaggttgctgtgaacaaagcaacaagccttgcttatatatagtcttctggaaaagaactaatgagcaaggcgaaaaagttgagagattaacttctaaatcaacaaaatgtaacctttgacataaattgatattgaccaagaagatcatacgtttccatgtgtgtagtcatcaatgatgtgaaactcaatactatagtgtattttatttgaatggacgatgatagttggtataataaaggaggaaataaataaagtcatctttttgttatttaacggctgaaatttcaatagcaatttaatttgaatgattccagttccacaaatatgagttggtcatctatatcacatgtaagttttcttagttatatttaaaaatcattaaaatctaagattagtccttggagagaacatgtctcttgtctcctaaacctcctttattatccatcatcattgtcactaaccctattattattccattcacagcgaagaaaaagaagcatagagttcgttataaagaaagaaataaaccctcagataagagcataacagagaagaagaagaagaagatgtcttatcaagacccacaacatctngttagtgctcctcctcctc

SEQ ID NO: 9026 - DNA, 1045 bp, Arabidopsis thaliana landsberg
  unsure (1)..(1045): unsure at all n locations
tatcataatttaagaataattcttaagcatccattctaaaataatccagtataatatgaatctagtggtgtttgtttttcttaaacatagaatctcgttgaaattcgtctctaattatcttattgcatcaaagaataatggtgttatcnnnnnnnnnnnnnnnnnnnnnnnnnnnaaagtatttgacgcggtaatttcttccttatatgtcactatttccaaagattctacattatcgtcttcaattttttcaccaacattatagatataagctacaatttcttctaaactctaagcatgcttcatttgcactcagatggtcgagtagactatttacatctattctattctaataactaggattgttaatcacaacttcaagttcaacttctattctaataaccaaaatttaacataattgaatatgcaaacaataaagcatagaaaatctaaataaagaaaattctataaaaaaaatagtattatattttgcataaatatttctttaaattaataaatattcatttattcgataaattaataaatataaaattataagatctatattaatatcattataaattaataaaattttatgatcccaatattattaatttctagagtttatagtgtctattgtacatctaatttttttattttattttagttttcttttcgtgccaatggtaaatgttgctttgtaatgtcagtttagggttgagaggtgtgagagtgttggccgatgtagtcatatttgtgtcattacttaaagggttcaacgaattgaggcattaaccttgatttaaccatgtgcactgccttaagcactgtacttcaataggatatacataaacttaatacacaaaacatacatccaaatgcctatgctctactgtctcctttgtcaatctatatacataacttagtatcttcgtatgaaagaagaatcaccacagaccaagatcaaaagatggtgcatctttctccataccatcacttctctgcatgcctggattaggtataaccgntgcgtcttctttctctt

SEQ ID NO: 9027 - DNA, 838 bp, Arabidopsis thaliana landsberg
  unsure (1)..(838): unsure at all n locations
taaaaatcacaaggtatccttccacaggcgttctcttctcagccagtcaccatttctcggcgagatttcgtgatttagccgcatcaagtctgagtccttattctgctggacccttgacgagaataaatgagagcagaagcgactcagataaatcattgtcttctcttcgaacaccaaaaacaacaaactctgagtcaaaccaagatgcaatgatgataggaaacctttcggtagtacaaatctcgtcagatagccggaaaaggaaatttagcttatgcaactcggcgaatgcccccgtgattaacttagaaagcaagtttgcagctcatgcacaagccacggagaaggaaagccatgaaggcgtgagaagcaatgcaggtgcgttagagtacaatgatgatgatgatgnnnnnnnnnnnnnnnnnnnnnnnnnnnnnnnnnnnnnnnnnnnnnnnnnnnnnnnnnnnnnnnnnnnnnnnnnnnnnnnnnaagagaaagaagacgcaacggttatacctaatcaggcatgcgnnnnnnnnnnnnnnnnnnnnnnnnnnnnnnnnnnnnnnnnnnnnnnnnnntttatacagatctagtatgatatgatgacaagaacagtgagctagcattgagatgttggataagtagaatctatgagcggctagaggccagtaaaagtaagctatgtgacctagagccaatgatctgcaattaacttactacgatcagacatctgcgagactataaaaatggccacctactaaaaatgaannggncaaattttttaataaattttttttttttttttaaattttttaaattcacaaacctttctttt

SEQ ID NO: 9028 - DNA, 605 bp, Arabidopsis thaliana landsberg
  unsure (1)..(605): unsure at all n locations
tttggatcatcagagtctgcacaaattggaggcaccggttctgatctgtttttgtagcactcatttgattttggctttctgtaagtagcaacacctactccattgatagtgtccttgttaatggatacgagttcccaacacatcttcttaatgagttcactcatagctgcaaaagtcgccaacatgacgtgtgagaaaacctgatccaatgcaattagataaagaaggataatgttttttcacaacctttccaaatttcaacatcttcggtcttcttctgataaacaggagtagcagaccacacaaagaacccaccgggtctcaatacacggttaagctccaggagaagtttaccacctgcccatgtattgtgcacacaaacatcagaaacagataccaaaaagtttgacggatcactcgaaagagactgttaagacttaagatccaggaggagtttccattcaaagactctatatctattgtggctatgttgctaaccttcaatgtgccatggcactctacagcgagcacaatgaaactatgtcaaaactctgncagggaaaggtagcctgtcgtgcccatacttgagaaatggcggaatgccc

SEQ ID NO: 9029 - DNA, 1819 bp, Arabidopsis thaliana landsberg
gggttaaactcaaaccatactcatgatacaccaacaaatgaacaaattattgtggataaatctggattgaacataataatactgtcattaatgttcatattattgagttgaaggaaaaaaaacacgacttaaacagaaagaaacaactgagcctaatctcctaggtgggtttggatacttagcttattgataaaatcgtgcttgacagctttactctgtaaaaattcgtttactacgagctaaatgagacactatataatctgtcatcaaatttttacttaacaaattattagaattcaaaacaaacacaaaaaaagtttctagatttctctttctttcttaagctttttcacaagactagattttagcttatcgttctagagagaggaagaagatgagggagaattgggcggtggtggctctgtttacactatgcattgtagggtttgagcttagattcatccatggagctacagatgcatcagacagtgagtttcttcttcttctgagaatcttcttcacttttttttcgcttttgattgattttaagctgagtgggttgttcaaagtctcaatctttttcgtatatccttcaattgattctcttcatccacagtttcaatctttacctttctcaaaaatatgtactttgcgtaatggcttttctccaaatctcaaatatgttcagtctttttgggctaaagcttgaacctttcacttctctgtgtgtttcctaatcttgagaacaaaacattatagagtttatatataatcttgatgatctcaagtggactttaaagcaggaactgatttgtggttaaatttgtgttgattggattgtggtttaatggtctctgttttctaatttgtgcagcttcagcattgaacacattgttcagtggtatgcattctccagctcagctaacacaatggactgcagcagctggtgatccttgtggccagaattggagaggcgtcacttgttccggctcacgagttactcaaatgtttgtgatttttgtaatcaatattcttgtttcctgctttgatttatatctaacataagttgtgttatatttacttggcagaaagttgtcaggtcttgagctctctggaactcttggaggatacatgcttgataaattgacttctcttaccgagctgtaagatcaccctctgtctaatcctccaaactattacttgaagtcgtgtttagagataatgagttttctaatttgtaatctttgatggaacttgcagtgatctaagcagcaataatcttggaggtgatttaccatatcagtttcctccaaatctgcaacgattgtacggtccatcaattctcctttgttttggtttctaatgtaatatctgtgctctcgagtttataaccgtcggtgtttcaggaaccttgcgaataatcaattcactggagctgcttcgtactcactttctcagattacaccacttaagtatctgtaagtaattgccttacttcacatttctctcgaaatctctcataaagatgtgaatattaatgttttgtcttgtgcaaacaattcagcaatcttggtcacaatcagtttaaggggcagatagctatcgacttctccaagctcgactctctcacaaccttgtaagatcttagtaaagatactcaagggtttttatcacattaagatatttgacaagattacatgtgtttcagggacttctctttcaattctttcacgaactctttaccaaaaacgttttcctctctaacaagtttaaaatcactgtaagttttcaggaaggtcttactgaactgaaagtttac

SEQ ID NO: 9030 - DNA, 1830 bp, Arabidopsis thaliana landsberg
agaggaactccgatagagacgagaagagaaagaagaagaaagtgttaggaagattcgaaaatgaatcaactctcaagaacaatgggataactatttgtggggttctttctcaatctctctgcaatccttttgagttcaaccgatatgtcgatatgtataaaactcagaatatttattccactttatacagctcttttgcactacttgtctctgtgactttctgtgtttcccttctttcaagtttgcgcaattgagaaaccctagaagcttcagtgtagtatgtccaccactgtcgctaaatctctaggcatagatgacgctgcatctgtttcccccatggctcaattgcagtgtgttgagcaattcctagctagaaattgtaatgagttgatagggctatattgatcgatctgttcccaaaaggcagataatgtgatgtatgtctcttgttgttcaaggtcaactctttgggatttgccactgcagcatattgtccgttcgatttctgcctgataatcatgtcttattgatggcttttcctttcaaaatcataggtaacaatgctgaagaagaggacgtcagccaagtttactttaggaggctttggtgggaacatggacttgttagcagtgttcatacttggtgagaacatgatggacttgcctttggattcagcttggtatgatgaatattttattaattttggtgcatttgcctagacaatagataactgttaatcgttttcttggaccttaaattgtgttctctgttggaatttggaaataatttgtttataattggagttaagaacagttcaagtatttaataaagctagtaaacatacttttataactaaagattctgtcttcaggatagtggggtgtgttgttgatgatatgggatgggagtagtggagaatattcttgaaccagggaatgatagacaagtctcatattatagccaccgtttagtttactattttaggacttggtttgtttaaaatatttgatgggttagaatatgcaattgttttctgataataataataccattacatttcctaagtcaactttgaaatgctcagacataaattgttttcattgctctggacgaattcaatgggtggaaatgtattgaaattatgattgacttggcaatgaaaaagattggactttatattatatactgagaagttttgacctgactgtgttttgcagctggatacattattatccaccattggtgcagaaaacaagattcgttcagaatagtcagattctctgttttgtcagaaatggctcaaggattgcatctgatctgggtgatcttctgtcttcatctgatttgcatctcaagtcaacaagagacagagtttatctttaatggctttggtcaagcagatctttatactgatggggtagccaaaattcttcccaacggactgttgcagttgaccgatggttccggacagaaaatgggacatgccttcttcaagaagccttttgagttcaagtcacctagatcattctctttctcaacacattttgtgtgtgcgctggtgcctaagccaggatttattggtggtcacggtattgcctttgttttatctgcttccatggatctcacacaggcagatgcaacacagttcttgggactttttaacatctcgactcaaggatccccttcttctcatctagttgctgttgagctagacactgccctcagcgctgagtttgacgacattgatgccaatcatgtcggaattgatgtcaacagccttatgtctatcgcatctactccggctgcttacttttccgagatagatgggga

SEQ ID NO: 9031 - DNA, 1106 bp, Arabidopsis thaliana landsberg
agagaagggcaagaaactcatggacaaattcttaacatgcaatcgttggaatatgattcgacagttatatctcatgaagaaaatggagaagctagagaagaccctctctgatttctttagggcttccattttgacacacatccttgccgatcttcatcttctccgggccaattctgatgaacgttcccatgaggtctatctatctttgttttcttctctctcccttgtgatttcttgttcaccaagtttgaaggccatctctataatactcgtttcttttgcagcacgtcacatcaaccaaagggtgtgactacgacggacttggctcaattcagtaccagcacatccagcctaacctagacatggatatgcgggtcaccattttggaggctgaattccgcaccttctccaacaacgtcatcaacaacatgcttgcgatgaagcgagcgcaagatgtcttactacgagccaacggctttgaccccgagaccctcctaccgatgatgtctcctcctgcagcctccatgaatcctcctgcttgaccacatacgacttaggatacttgcaagccactcaaccttgcggactacgatctttaaaacacaaattgctttcgatttatgtttttcaattgttaaattatgtttcagtcacaattttaaatataatttatcgtccactactctgttttagcttcttctttttccatacgttacaattgaccttacttttttacgtattaaagagagaattggtttatacacctcaaatcagcaggttctacatgatgaatgaagcccttttaatatcaaaacaacccttttagtagctgaaggaatcagattgtatctctaacaaaaaggctaccaacaaaatgatgttatccaagttgggttccaaaatatggcgtctgtcaagagctatggctttcaggttgactatctgctctctcacacacctctttctgcatgcgggaactgaagaacgaagcccacaactcggggaaaggccggaaattgagcgttgatccacaaaacattggttcccaaggtatttctgacatcaagggcttctttgctagagctcctcttcttttgggcttaatt

SEQ ID NO: 9032 - DNA, 1366 bp, Arabidopsis thaliana landsberg
gccactgccttcggatgcagaagagcaagaagcagctaatggttgcttattctccatacattgaatctctattttcatttcacttatttcctcctaaagagtaaagacccatgaaaatcaccaaaaatccagaattttcgttaaaaacatgggattgagcacaaaatgaacaagaacgtatctttatcaaacaattaatcaaaaccctaaaaactcaacggccgcaaaatagaagccagatctcacaaaaaacaagtcgatttctttcaagcacaagatggatgtttagggtttatacaattctaatcattagaaaccaattcagacccttttccaagacccgttaaaacgtgttcctattcagacctaaaaccccatgaactcacaccaaagtagacgaagataacaatctgatcacaaaaaatgaaaagccctaatcagatttcagggaaaaatctgaccttttccggtgaacaaaccggtggattcgaacttgagctcatcgtgatcgacagataagcgaattcgcgaggaagaagaagaagggaacgttaaaaaaaaaaaaaactttattcgaaaaaaactttgcccgttgaacgagagagaagagagaaaggagaaggagactaattgggattaaaacaaatattgtaacgaatacttcttccgccgacgtaactgctaaccgccgttaacctggaaccggccggtttatttcaaaccgactcaaaagaatttgagtcggtttggaagaagccggttaattgaattgagaaaatgtatgtttttaataaaaaattatttatgttactgggctaattataatattatttcgaataaaaacaaaaataacgagtttaattcgtggtttgatataaccggttatctaaaatcaaactataaccgtaaatggtgacaagaaaccacagaggatttaacggacgttaaaagtagaagaaaggtgggttgacgttggaaacaaaagtttcaacctcaaacggcactctttagctgatgcgttgaccaatgtacacgtcggcatatcagagctcctcaatgattatggaccgtcggatcattaagataactcattctgggttttttttttactgtagtttcttaagcgagagccgtccgaatcagtcgaggtttttgggtaagaagatatagaaaattacaatgcgttttagtaaaacaaaagatttacacaaaaacgtaaacaaccagacaacaagaagatgaagcaatggggaactagaaaagtagagatctagaagaagttaagaaaccaaaagtattacaattcgttttaatagaagaaccatatacaaaacgtagacaagcaaatggggactgaaagatggcg

SEQ ID NO: 9033 - DNA, 626 bp, Arabidopsis thaliana landsberg
gacccctagcttgagctgagcaaactcagtcccacttcatcagcttcagaacacctaaagctgacttgaacttttttacaggaatgcacttggttagtgcatctacaggatttctcgacgtgtgaatcttcaacacatccacatcaccagactctacaacatctctgatgtaattgaacctcacatctatgtgcttagtccgttcgtgataaacactgttcttagacaaacaaattgcagactgtgaatcacaccagatttttaccttatcctgctgcattcccatgtcttgtaacagtcctttaatccacattgcttctttagcagcttccgctagtgtaatgtactctgcttctgtagtagacatagctaccaccggctgcagactcgccttccagctcactgtattgccaccaatagtgaaaacatatccacttatggatctccttctgtctaggtctgctgcataattagaatcacagtatcctgttacagggaagtctttttcttttggtaagaccaagttcaggtcttgagcctcccttaaatacctataacccatttaactgcttccagggatactaccaggttgctatgatttgctgatcgacaatagcaaagctaat

SEQ ID NO: 9034 - DNA, 1981 bp, Arabidopsis thaliana landsberg
  unsure (1)..(1981): unsure at all n locations
caaaggaggaagaagagattaataagttttcgtgaccacttgcccaaagaaggaagaagagtcaacgacacaaatccaacataagaacggagttggatttgtgttttgtaataaggccattgggccgtaagtgaattatagccccacaagtgttagtgggtttggttggttaagtttaagctaaataagttaaggtggatataacaaacatagttgcaccaatgcatctcagctcacctggtctaagcaacggtttcaagaagttgctcgcttctattgctccacgcctccacaagtagctcctacacaagagtaataactcattagtatagagacacaagattatacaagaaatacttagtagacataattgttcatctccagtgttaatcctcaataattgtcgatgcagtattcttctaatgagatgaaaaatcatttttatagagttaccacccatcaaaaccatttatacaaaacgttttacttggtcagagtaaaaaaatgcatacaagtattgtgtataaataaaaaggtcatctattaatgtataatctgaatcaaaaaaagaaagagcacctgcaccaataacaatgtgaatctcatcaatgaacaagattgtttgcccattcgaagcatatacttccttcaatattgttttaaaccttgtctcaaaatcttctccataattagcaccaacaaggagtgaacccacgtcaagagatttcagctccatgataaatagcgaaaccaagcaaagcatgttaaatcttcctctagcctctttgaggggaaaaggtaaataaacttaaatatttaaaaatatctaagtttatataataacaatattgggtaagtgaaaagtaattatcattatttttgacacttatttttattagttagaagtaattataattttttcaaacaaaaaagtaagttttttgtgtgtgaaaaaataatgatattgagcaggtaatttaattagaggtgatattttataccttaagaagtgtattaaagttaataaccataagttaaaattggtaagctaaatgttagaaatcattcgtgttgtctgaattttcaagtttcgttcgtttcggattactttcttcttctgcaaaaacagatcccaaccatttcaaaggttcgtcttctccttctcttccacactcttctctgcttcactttttactctatcttcgactagtaatatcgctttcgacttctcaaattacttctcaagttactatttttctcttcctttctttcaaattttcgttacaaactgagtttgaaactgtttgggttttgtaaagttttgatcttttcatgatattgcggtaagagattgttaattcgacttctgggtactcacatttcgatgctcaattgtttattcttatgggtaattttggctagggttttttccaatttctctctcgttctctttcacaaggttagtcgatcttgctcatgtggtatagagtttgatgaatcgagttgtttagtagctattgtacgaactatctcttgatatagttgtaaaggttttagattgggaacaaaaaatttcactgtgatgtttgtttaggtagtagagttcaattgtgtgaaactctaatttcatagtttgcttaagtctcagaactagcactgagtctattgttatatgtgttgtttatgtaagtttgttgttattgatgggagatatgttttgtgtgcagaaaatgagtagtttggtggagaggcttcgcatacgatctgataggaaaccagtttataacctagatgattctgatgatgacgacttcgttcctaaaaaagatcgaacctttgagcaagtcgaggctattgtcagaactgatgcggtttgtttcttctctcgagcttattgttcagctnttactgttttatgtgttctattttaatccttttttttgtgttggtactctgaatttgtagaaagaaaatgcatgtc

SEQ ID NO: 9035 - DNA, 1389 bp, Arabidopsis thaliana landsberg
tttaaaaattgaacttttttcgtagcgcaaacccaccggtattgaactctttttggcccacttagccacgttaaagggtcacttgttactagttgtaattgcaactatctgcctaaaccgtcgtgcctattgtctacattctagaaccatgcactaatgacgtggctggagataagttggttgattacacacgtgtcacttagacagagcgagtagactttgatgcgggtaaaagatattttagattatctagctcgctaggccacgttggcggatatttgcactttttctttttttaaaaagaaaaaaaactaggctctacgaattttccggtcaccttctccgatctctgatccgatatttttccacatgttgttgagctttaaaggatttgaaaccgttatgaaagtaatgaaaacgaagagtgtgtgaaacatggggaaggaagttatggtgagcgattacggtgacgacgacggagaagacgccggcggcggcgatgaatataggattccggaatgggaaattggtttacccaacggagatgatttgactccgttatctcaatctctagtcccgtcgattctcgcgttagctttcagcatgatcccagaacggggccgtacaattcacgacgtcaatcgcgcgtcgcaaatcacgctctcttcgttaagaagcagtgccaatgcttcgtctgtgatggaggaggtcgtggatcgagttgaatcgagtgttccaggatcagatccgaagaaacagaagaaatcggatggtggtgaagcagcgtcggtggaggattccacggcggaggaaggagactccgggcctgaagacgcgtctgggaagacatcgaaacgaccgcgtttagtgtggacaccgcagctacacaagagatttgtggacgttgtggctcatctagggattaaaaacgcagtgccgaagacgattatgcagctgatgaacgtggaaggacttactcgtgagaacgttgcgtctcatttgcagaaatataggctttaccttaaacggattcaaggattgacgacggaagaagatccttattcgtcgtcggatcagctcttctcttcaacgccggttcctccacagagctttcaagacggcggaggaagtaacggaaagttgggggttccggttccggttccgtcgatggtgcctattccaggctatgggaatcaaatgggtatgcaaggatattatcaacagtatagtaaccatggcaatgaatcaaaccaatatatgatgcagcagaataagtttggaacaatggtgacatatccttctgttggtggtggtgacgtgaatgacaaggaaatggatcttaaaggtctataatttgctctacagagagatactggtgagcttgttttc

SEQ ID NO: 9036 - DNA, 284 bp, Arabidopsis thaliana landsberg
agattctcttcaaagtggctaagtatcaaggagtctctgaatgatccagaggctttgcctctatgccttgaagtctatttgacagagtgttgcgttttgaactttaaaggggatgtccctcttcggcctcttcgtctccctcctctctccctttctttcttcccccttcccctccttttctcctccttttccccccccttccttccctttctctccccctctccttctttacttttccccccttctccctctccctttcccctttcctctctcccctccttcct

SEQ ID NO: 9037 - DNA, 841 bp, Arabidopsis thaliana landsberg
tcctcccccattgaatccatctatagactctttttaattctcatttgcgcttccacctccaacagaaggataagaagccatggatccaaacttattctgctgcatcatataaggatttgactcaaacgcaccatttccaccagctccatgatgatgatgatgattattctgatgataaggatcatgattatgattttgatgatgatatccttgcatacccatatgatgtgcataaactggcatctgcatcatctgctgcgttccatacgctcccggaatcggcactccaacattaccgctgctactgccaccgccaccgatgtcttggaagctctgtggaggcacaggtgttgaagagaagagcttatccgaagcagagggaccttcattagtcaatccctgcatccttttgaggtaaagcctatacttttgaagatgagacgcaacgttctcacgagttaatccttcaacgttcatcagctgcataatcgtcttcggaacagcgtttttgatccctaagtgagctacaacgtcaacgaatctcttgtgtagctgcggtgtccacactaaacgcggtcgtttaagtgttttcccagatagatcttcagttcctgaatctccttcttccgctgccatcgccgaatccggatccacaccgccaccgtcatctccatcaccgtttgatgtctttcgcttcttcgaatccgatccaggactgctagatccgactctatcttcctgcttcacgttattatacgacgactaggtatttggaccggaagatccaccacgtagcgaccagagcgtccactacgatgcacgattcacatcctgaattgtc

SEQ ID NO: 9038 - DNA, 1293 bp, Arabidopsis thaliana landsberg
aaatctttgttataatcatcgagcagcattcttggatctttgaatatatgtttttatcaccgttcagcattcttaaatctttgaaacagctgggatcccaacacgctgatgtttgttttttggtttatcattacagattgatgcccatgctggtaatgtcagcgatcttgctttctcccaaccaaaccagcaattatgtgttgtgacttgtggagaagacaagtcaatcaaggtttgcatcttgacgtatgtttttacatttgtataatgagaccatcctgcttatataaataatttctatacaggtctgggatgctgttaccggaaataaattgcacacttttgaaggtcatgaggcacctgtttattccgtgtgcccacaccagaaagagaatattcaggtagagtagaatgcataaagtgtctcttgctctttattttaaggcatccaattagatgcaatctcgtttaccaattgtctatttggtgttctctgctcaagcagaatgcctaatttctcgcatttccatcttttgtcaaatttatgttatgataattacaagtgtattgctatacaatgatgtgagcagttttatgtttctcaatctacatttatagtctgtgcaagatttttcacttttgctctctttggccattgagatagttataatggggattttttctttctgtcagttcatattctcaactgctgttgatgggaaaataaaggcttggttatatgacaacatgggttctagagtggattatgatgcccccggtcgatcttgcacgtcgatggcatattgtgctgatgggactaggtaaatgattcccatgctgtaatattataatcttattatgctgtacttatctatccttttgttcatatcttgtttatcttctcgtttgttgtagattattttcttgtggtactagtaaggagggggagtcattcattgttgaatggaatgaaagtgaaggagctgtgaagcggacttatcttggactggggaaacggtctgtgggggttgtccagttcgacaccatgaagaataaatttttggtagctggtgatgaattccaagtcaaattttgggatatggatagtgttgatctcttgagttcaacggctgcagaagggggtttaccggtaagggtctatgtctacctcaattgctgtttatagtattgaccttaaaaagaattggttgctaacttaatatcaatagtcttccccttgcttaaggatcaataaagaaggaactctgctggccggctaaactactgataacg

SEQ ID NO: 9039 - DNA, 1911 bp, Arabidopsis thaliana landsberg
cactatgaggagttcgaacaaccttgatctatcacacatacaaaagttgtagatgaaagcaaaacctctagatgtgtttcgtttgaaatcaaatcattttctcaaataatatacacgaaaaacaaaaattcaaaatcctagagtagcgacattattcatatatagagttctgccccacattaactatagcatatatgtttgttcttatgcgtgttttgtatcattctttcttgtgtggtaattttttctattttcttacaccctaattctttcacgtcgtcgcatcgatcgagtgtggacgaagcaaatcgggatgtggatttattttaagtagacaccaatctctttcaattatttattcattactccaacctcctattaattactccaaagtccaaacccctactttgatatttgttttagcaccgtcatttaattcaatttggtcgaccctactaaaagaaaaatatttgaatatgcaagtttagagttttgacttttaagcctaaccaatctaatttgttaaacagcaatatgctttaaggactttgatattttcatcaagaaaaatacgttcgattttcatcttaatttgattgattttatcgttctggaagaacaacaacaagataactacattttggcttttcccttactctatggtctctttttgttgattctaaattgcaaacaaattttaatgtttcttggagaagcagatatgttctttaaactaattacgctccaactcaaaaatttgtcaaagtgaaaagagtagcagtgacaatgtgacattcgtgtttgggaatggcatgtagcaatatcttattggaggatgagtacgtacaagtggtctgtctttattcaatactattattgtatttaggacataataggttggataatgaatgacggcttttttgttcaaactgcaataaattcttcatctaactcgcacatggtttgttatggaagctccaatggttttttgttttaaaaatcataaattagatttagatgaatattaataaagtatgatttttaattagaaatttatacgattatatcatgtatcaattttatatatcgatctaaaattttacacatgtaagagaaatattttcttttattagttttacaaagctacgtgtcaattttttgttttcgttataattaattatgctttgttatttattaattaaattaaatattaactatgatataaatttgatctcatatacacattattttgatataacaatttagcacttatccattaagatggaatgtgcatgactaaaatttagtttattattataaaacagatagtcaaattatattgttaaataatatgcgtaaaataggatcggacatatgattcaagagtatgtgcttagaaaccaactgtggttcgacctaatgaggaaactatgaagaatttacttctgatatttaaaaattgtatcacgaatgattggaaaggcaactggtcagaaaccagatactctaccagtggacaactttagtgcattacggctatgatatttttttctaaaggtgacatatcttaatacatatatgaatacatttcatcttgatgtgtcaagaagattacttctatggttcatttatggatgttgttgttttagcttgatctggatatgcaaaatactttaataatgcttacctatacgaagttattggaatttcatgctttgccttaatgatttttacttgatgttatcttaatctgagtctaacctgcaactacaaagcttaagaactttaagtgtgtttgatatatatgcttgatctggatttatatgtgaaaaaaagaaaattggtctaaacaatattgtaaaatacatttaaagaactcagtttggattactatttaaaattcaaaaacca

SEQ ID NO: 9040 - DNA, 1374 bp, Arabidopsis thaliana landsberg
  unsure (1)..(1374): unsure at all n locations
aaggttccacttcgaatatgtatctagacaacctaagaacaatcaacagacaaatgggacgaactgaactaccatttagccattcctgtaagacattaaacttcatgactagaatgattacatcctcaaaatttatatgcaaaaattaatattgggccaaaataaatgcaactaatgcacacctttgcaataaaagtccgatatcagtagcctctggtttcttttgctgtttctgttgcccataaatttggcacgacacaacatacgtaaacttaaggtccgcttgagctcgagcttcaattgacgattcaaatcctcgtggcatgttggtcagagatgcatcatccactgtaacaaaacaaaacaaaaaaaactgctcttacagatatgcctttcctttgaagggaatagtcacaaaaaaattaggaaaccaagtacctcccaagcctcgtctttctaagaaactctggagcatcaaagcccttcggtaatacatcatacctcgcacttaacaacaacaagaacaaattaaattaggcactcgagtgtgaaattcaccatatttctacattaaaatccaaacctattgaatgtaaatgtatttgtaagaaattatttcagaagtgataagcaatacagatcgtttctaaccagtcctcgctaaaggctggcctcgataagatacccaaaaccgaagctccaaagcatcagttgaacttgcttgaagatctgcatcccctgttgattcagacctgccaatcctctccaagaagttctcccattcatctaaagccaaaaatagatggatatcagctctcagctaatgactatattgactaaggaacgacctcacacgcctagaagtagaagatatataccatgaaatatcttttgaagatagaaaagaatagatattccatcctcattctcacttcgcagttctgaggagctatagagcactgtctcactatagtatggggtgaagacactgttcacaagaatttaaaatggatatttataaattaggagggaaaaaataagttacatgtcagtcaagtgaaaccacatacctgaatggaaccatttcagcaacaggccttgcttggggcatatccataaataacgaatttgtgaaaaactccaatcttcttcttgcttctagattttttgggacgttagcagcggcatccttcacagtnnnnnnnnnnnnnnnnnnnnnnnnnnnntctatctgttattataaacaataatattatttgcataagaccacaaaaccagtatctggcataaatttccttcttcttcttctagaaggaaatacaatttctgggtccctaggccaagctattctggaaaagagaggccgttcctttc

SEQ ID NO: 9041 - DNA, 1513 bp, Arabidopsis thaliana landsberg
ttatcttttctgttactgcaggtacctagggcttttgtattagttacatttagtggcatcggttgtctctgtattcatcaagttcttcagatggttgtggctcaagtagtattaaaagaagaagtcgtattgatccaggctatgttcgtattgcacgaaactggaagagcaagcttaagcttacctagtagctcatgccgttctgtggtccaaatgcctgaaggaggaacacctttctggattcagtttcctgatcagaattacacgctggttttctgtctccggggggtggggaagtccatacttgtcctggaccatgtagcgttgacaccagacagagcatggggcctctttagtccctctcttcattctcattgtggcctatgttctcaagctgatactttttaagattaatgaaggttatctgtatctttgctaactcccttgttccctacttgtagttcgaatttgggttctctgtgctcttgttgactgttcaataatgggtcttctcctcttgctttaagttgaggaaatgccatggacatcaaaatcatgcaagcttgcctcttttggtttggttatgttcattattacttgtaatggacgctgcatataccatgtgatgttttaagagagtcgttcaagtaggctccgagattaaatgtgttcttcaataagtagaatttgaatagttcattgatctcacacggaattagccaaatgcaacactgcctcttttttttttgctctcttaatcaataaatataaaaacatctgtgatctccaattacatggctatcgtaattatatacttaactttgtaagaagtcgttgtctaagcaaattgcaagtaacacttggtgcgtgaaagctttttggtaattttaaagagcaaaaaaaaaaaaacgtcattatgtacatgaaacgttattatgactagaacagtataatatatggaccagacaaggtctgtgtctcatagcagacctaaaagaacacaagccatttagatttgtcagagcccttaccatccggaatcttacagtcaccttgtccagtcgagccatcgcgttgtttcccatcctttgaccttcctattttcttcctgacacagatccctaacttcatcgctgtcaatagacccatagcaataagcaaaggtctcacagcccaatgaaaatcctccagatgttgatatttttccacagctccttgacatgtattgaaattcacaatctctacttcagccggatctgcaagatagcttccatgttcctctccaaaaggtaacattccagggaagtccacttcaaggcaaccgtttggtagaacctgagagatcctgccagttgcccaaatacctctacctttacgcatccatttgaatctcgggatgacaacattggctttgagtttcacaaattgacccacactgtatactttagccatctgaagctgcgatgatgtccctttccagagagttggcaacccaataaatccaacagctaca

SEQ ID NO: 9042 - DNA, 1822 bp, Arabidopsis thaliana landsberg
attgaaggtttaaaccagagtatttgggttgatttgcctccagagttacttcttgatataatccaaaggattgagtctgaacagagtttatggccggggaggagagatgttgttgcttgtgcttcggtttgtaagtcatggagggagatgactaaagaagttgttaaagttcctgagctctctggtttgatcacgtttccgatttctttaagacaggtttgttactcttgaccagtttgtcttataatcgattatcattgtgtctaaaacattggttttgtttggcttagcctggacctagagatgctccaattcaatgctttattaaacgtgaaagagctacggggatataccgtctctatctcggtttaagccctggttagtttactatctatcagcttcttgtgaatagagtttggagtgtatttcatatccctttcatctgtataaattgcagctctttccggtgacaagagtaagttgttgttatctgcaaagagagtcaggagagcgacgggtgcggagtttgttgtatcgttatcggggaatgacttctcgagaagtagtagtaattacataggaaaactgaggtaaagtctccttctttgttctatatgatcaccatgatgcccatctattataagtcttgttgtgtgttgtgtacagatcaaatttcttgggaacgaagttcacagtctacgaaaaccagacctcctctgtttaaccggaaactcccaccaacgatgcaagtgtctccatgggtatcgtcgtcatctagtagttacaacatagcttccatcttgtatgagctgaatgttctgagaaccagaggtccaagaagaatgcaatgtataatgcatagtatcccgatttcggctattcaagaaggcggtaaaatccagtcgccaatggagttcacaaaccaaggaaagaagaagaagaagccgttgatggatttctgctcagggaacctgggaggagaatccgttataaaagaaccattagtcctgaaaaacaagtcaccgagatggcacgaacagcttcaatgctggtgtctaaacttcaaaggtcgagtcacagtcgcctcggtgaaaaacttccagctagtggcagctgctgcagaagcagggaagaacatgaacataccagaagaggaacaagatagagtgatattacagtttgggaagataggcaaagacattttcacaatggattatcgttatccgatctctgcattccaagcttttgccatttgtttaagcagcttcgacacgaagccagtctgcgaatgaagcaaaacatatcatatcaaattatattcttctatttgcatgcagtttgtgtggtttaatgtacatacttttccctcttggagcaatcaaacaatcagatcttttttttcattctaaaactttaatttcttcttaatcttttaatcaaaagtaattaacttttggttaaggtaaggtatgttttagtctttcattggaagcaaagagtcatcacctttcctttattacaaaacccaatccatgtttatgtctctgtttcattttattttcggaaaaaaacacaattttgaacctattgagattatataatgaaagcttttgtgagaggattattagcaagagctaatgaggtcccaaagattcatcagaggaaggtatcggccggttttggttgcttaacttcgcctccgccgccggagaaagggttggagaatctgacggtggcggatgtgctctccacgaaggacaccgaagttgatacgtggatctcgtgccgtacgaatgacactgtttctgacgctgttaaaaat

SEQ ID NO: 9043 - DNA, 1712 bp, Arabidopsis thaliana landsberg
ctatctcgaacctgctaacactggcagccctttgtgtcgatctgaagagcagaccacagcagccagagtcaccttccaatccgcgattacacgagcttttaaacctcagaaagctcagagagggccttatcgatatcctcctcatggttccgaagatcgttccactgcattaagaaaaaggtctcgtgtaataagcaggacatatgcacgtgtggaagacataaacaatggaagagagatgtgaatacctgttccaggcttagagagatacctgcaacatataggagacatcgaaaatcttgtcaacatgattatgcaaagaaagcaaactaatatagctggccctaggagacaaaaaccaagacgttgttgatgaaaagaaaacactctgcgcatctcctcctctcagtcccaaaccgcagaagtactagatatataataaaagtccctaagatctgctaactaaatgcagaaccttaacgaaacaaaacatgaaaacaaagggatgaggatacattgttgaccataaaaaagaaaagagaggaggatacagagtattagcaaatgtggaattgtgagaagaagagagacagtcaaaagaagatatgtagttaaaaacaaaaatttaccttgcttgctattacaaggtaaagttataccgtccttgacaaagaactgacgaatggcaatccaaatcctcccattgcaattcctcacaaagactctccgattcttatctaactggaatgtaaacaaaacataacatcataaacaaatatcacaacttgatccaaaccctaaaactcatacgaactgctacagacaaaaaagagatgaatagtagagagactaacattgcagatgaagatgtcctcaatctcgtccgctggctttgccactttcttaggcggcgcgtgggtctcagattcgtcgcggtcgtctgatgctctgacatcctcgtctttcctttttccgttctcagacattttcttaacctctaaaaaaaacactcttctactgcaaaaattgactcttgagattctcaagttaaataaaaagcacctctctccttttctcgcgtaatatatctactgcgttcaccgaattacaactatgatatcagattcggaacgccattttacaagcgcacagtttgagaacacgcgcggccaaacttaaaacgggggagttttttgggaaggtaaatattctttggaaaagagcaactatagcaatgaaagtagcaacacagagtgatacatttattgtgatgggttcatcttcaaagacaatgtctgcttatggccttgtccggatcaagtgaagtttggcaagagctatgtaacatttagacctatcttgtttataacttatcaaatgaatacttgtattcctgcaacgtatcttaatttgcaaataaaacagcactacagcagtaaataaaagagcaatcattatattcttaataccaaccaaagcttgtctgaaccaaaagtgaaagattccatacaccaactaatttgaagcagcttacactagcagaacatggtgttgttctacaaaaacaaccaaaacaactgagccatattctaatagacgtacaaccaatgatacaagttttaaaacctaagaaaggtcagagagggccttctcgatatcctctgcgtggttccgaagagtgttccactgcattaaggaaaagctgtgtaata

SEQ ID NO: 9044 - DNA, 1156 bp, Arabidopsis thaliana landsberg
tatgcttcacggctgctttgatttcgagcgcaagtggtattggcgatggatttttcttcattccaattatgaatttagtcgcagggatagacttgaaagcagcttcaagcttctctgcttttatggtaaccggtggatctatagcgaatctaatcaacaatcactttggctgtaaaaaattgattgattacgacttaagccttgcttcttgagccttgtatgcttctaggagtaagtgttggtgttatctgcaacaaagtttttcctgagtggctcatcactggtcttttcgtggtgttcctcatgtggtcttccatggagacttgtgaaaatggacatacttcttggaaattgagtctgatattgcgcgagaaagaggacatgagagactcgagactggccgaggtgaaacggaggaggacaataatattcttcaagcacctttacttgaagatcaagaaaacagaaacaaagcaaagcttccttggaagaaacttggtgtcttagctattttttgggcgtctttctttgtcatttatcttctccgtgggaataaagatggcaaggtataatgatatataactccaaagttcgatagattttatacaaagtcgactgattctgtttatgttatgtgcagggaatcatatcgataaagccttgcagtgtggagtattggattctactgtcacttcagatacctcttgccttagttttcacaattttggctctctctagaaccgaaagtctccaagaacaatccataagcaatcaagaaggtacaagactggaccaccagttcaagcggttaatgttcccagtgatgtcatttttagccggcttattaggcggtatattcggtattggaggtggaatgattataagccctcttcttcttcgagctgggataccaccacaggtatttaacaaaagaagaacagttttagttactgttctttctgatatttcacaagtgtttcaaagttgaatatatgattgatgcaggtaacagcagcaactacttcattcatggtgttcttctctgcaacaatgtctggcgttcagtatttactactaggaatgcagaacacagaagcagcttatgtgttttctgtgatttgcttctttgcttcaactctcggacttgattttgctc

SEQ ID NO: 9045 - DNA, 817 bp, Arabidopsis thaliana landsberg
agggcttgaacaaaaggcagatcattgtaattctatctagctttgtactcaaacaaacattgatcatttattaaccgaacaatgagttcgtctaacggaggtgtaccgcctggttttcggtttcatccaacggacgaagaacttcttcattactacttgaagaagaagatttcttatgaaaagtttgagatggaagtcatcaaagaggttgatttgaacaagattgagccgtgggatttacaaggtacgttcttttattaataatacatatacgatccaatcctctagttatattagatactatacaaaagcattttttttttgtttttgtagatagatgcaaaataggatcaacgccacaaaatgagtggtatttcttcagccacaaggataggaaatatccgacagggtcaaggacaaaccgtgcaacccactccggtttttggaaggcgacaggacgtgacaaatgcataagaaattcttacaagaagatcggcatgaggaagactcttgtattctacaaaggaagagctcctcatggccaaaagacagattggatcatgcacgagtaccgtatcgaagacactgaagatgacccttgtgtatgtatatatatctcttattcattagaaaatttgtgaaagtcggtcgatttttaattgaataaaccaatctatacataatgcaggaagatggatgggttgtttgtagagtgttcaaaaaaaaaaatctgttcaaagtagggaatgatgttggctcaaacatcagcaataataggcttgaagctcgtagtttcatccgaagagaaagcccttac

SEQ ID NO: 9046 - DNA, 1322 bp, Arabidopsis thaliana landsberg
ttactaccttgaacaaatttttcttcatgaacactctacataccacccatccatcttcctacatgatcgtataaaatatgttgcaaatggattaaatttaatagaccaccttcctaaccaataaattgaatttaacgcagcataatatacagtgcactctcaaactatttttaaagcttcggaaaattgttgtagatacttattaaaagacatttattatattcatatttaacaacaatattagaaaacctagtatggaaatcagagattctgtgaaatttcactgtttgaataatgataatgatctatattataatttaaatattgctcaaataaaagacatacactagggttggcttgaggatcatcagcgtcttcaagacggtactcatgcatgatccaatcagtcttttggccatgaggagctctacctttgtagaacacaagtgtcttcctcattcctatctttttgtaagagttccttatgcacttgtcacgtcccgtcgccttccagaaccctgcatgagtagcacggttggtccttgaccccgtcggatatttcctgtccttgtggctgaagaagtaccattcgttttgtggtgttgatcctatcttgcatctctcttccaaaaaataaaaagataacatacaaattagagaattgtataacaatgaactgttcatgtatatatatatccaataattaagaagtcaagaagacctatcaaagtctcaaaaaatgataccaattaataagcaatgaatgaattgtgatatgtttaagtaaaagagtaccttgcaaatcccaaggctcaagcttgtttaagtcaacctctctgatgacttccatctcaaacttttggtaagaaattttcttcttcaagtagtaatggagaagctcttcgtccgtcggatgaaaccggaaaccaggtggcactcctccgttcgacgaagaacccatttcgatttacgttttctttctcttgtctccaactaaagacagcttaaaacatttaaccactgcctttctttctaagcagctacaagttcttgattatatatttatatacacactcacacgtaaattgtcaacggatcgttacttaaatgtgtacataaatgtacgatgatgatgcatgttgataatgatgatgatgcatggtgaagttgacggccggtgaccacgccgccggagatgctcaaaaagctatcgtaaaaagcaagactcgccggagattaatacgacttttattttaatataatgtctctacgcgcctaatgttgcatcgtgtggtacacttacgtaaaatcgactgctccat

SEQ ID NO: 9047 - DNA, 1516 bp, Arabidopsis thaliana landsberg
  unsure (1)..(1516): unsure at all n locations
taaatcgatccaaaatgttactctaatgctctcatcgtcttgccctcttcttcttttctcttcccccacctccttttacgcggcagatgtttgaaaccctaccctcctggcccaaaggttacccgtcattggaatattctcatgatgaaccagtttaaccaccggggtctggccaagctcagccgtatatacggtgggttgctccatctccgcctcggattttcccacattttcgtcgtttcttctccggacattgcgcgtcaagtcctccaagtccaagaccacgttttctcagaccgtcccaccacaatcgcaatccgatacttgacctacggaggatccgatcttgcattctgcaattacggcccgttttggcgtcggatgagaaaactctacgtcatgatgcnnnnnnnnnnnnnnnnnnnnnagtcgtgggtctctgttgatgaagaggtccacaaatcggtccgtttagtggcttccaacgtcggaaaaccactaaacatatgtaaactagcattttccctatcaagagacataacgttccgagcagctttcggttcctcctcatccacatctgatgaaagccgtttggacgagttccttgagatcattcaagagttctctaagctctttggtgagtttaacgtagcggattatgtcccgtcgtggctcagttggattgacccgcaagggataaacgggcgagttgagaaagcccgaaaatctctagacggtttcattgagtccgtcatcgatgatcacttgcacaagaagaagagagaacataataacgttgacgaagagactgatatggttgatcaattacttgcgttctacgaagaagaagtcaaagtcaacaactcagtcaccaaaattaatctcgataacataaaaggcatcatcatggtatttaaacattatatttttcataagtgaatattatatgaccacgaaaaaaaataaaaacttttttattttctaaaggatgtgatgttcggaggtacagagacggtggcattagcaatcgaatgggtcctaacggagctactccggagccccgataacatgaaacgggtccaggacgagctaatgagtgtggtcgggcttgaccgatggcgcgtggaggacacgcacctcgagaagctcactttcctgaagtgtatcctcaaggagaccctccggctccacccgcctttccctctcctcctacacgagacggtgaaggacaccgagatttccggttacttcatccccaagggatcgcgagtgatggtcaatacctacgctctagggcgtgacccgaattcttggtccgacccggaaattttcaacccgggtaggtttttggacccgattgctccggatctgaaggggaataatttcgaattcgttccattcgggtcgggtcggagatcgtgcccgggtatgcaactcgggttgtacgcccttgagcttgcggtggctcatcttaaacacaacttcacgtggagtttaccggacggtatgaatcccg

SEQ ID NO: 9048 - DNA, 1799 bp, Arabidopsis thaliana landsberg
aattatcctgatttttaatttaattatttatttataatttataatttatttttatttataatttataatttatttttatttataatttgttggtaatttttaaattataaaacattttgttggaaatttagtagaatatatcaacatatattcaactggtaatctatgattgggaaacattctaacataaataaccctataaagggtaaagatttacatggaatgctattaggattttttcaaactaagacttaatggagaatttcataaaaaggtattttggacaattggctgcaaactgggacgcggatcctggatcttttagtcggatctgtatccacccactgatgatatcacgcggatcctgttcaaattaaatttcgaattagtagtaaccaattagacttattgggcccacaaaatagaaagaccaatcctcttaaaggatcttaaagtcttcagcaacatttaacatattaaagaaatctgcagtaaactaaataaatgcaaatcttaccataacaaccaaagttttgaataataagcaaatctttgaatatctatgcggttacattaactaatttcagtaaatgtattaccataacaagcaaagttttaaattgaaatttgtcactacaaaaatcactgaagtcacgcaaatcacgaaaattaccttaccaaactaagcccaaatattctaaggattatgcaaaacttatcataatagtcccacgggacgggttgttacaagtatttaaggaagtttttcagaacctataagagtaagcgttgcaatagacattttttctcagaggtaaaaaccattaacaaattttagtgatctttctctgtgtttagtataattaatctcttcttttttaaatcttataataggtataagctggtttgaaaacgggtaatcgaaaagtgattgaataattggaatcagtttaccagagaagaagtgaagtgttagattttcaattttcgtttttaaatcgacattcaattattctcatttactttttcaaaggatctcaaacaaaaaaataataacacatttactttgttttcccaaaagtaatttatgtttgctattttagatttagcatacttaccgttatatgttttcaatttcttaattagtaaccaagttttcttttgtgtgcaaaatacttgttttcaatcaatcaagaaagaaccaaatacaaagaaaactgagatcaaaagattcagagtttagaacataaacaagaaggacattccccaatgccacaaacagataaatagtagaaatcgacaaaggttccatgagagctttgagacaaatgcttgaaggtgatttgacacatgtgaggtcacggtttgacgaaggatcttccatgaacgaatcaatggatgacaagatagtcacagtcataagactatgtaacgttgataagtgaaccatggctagacttctcgtcttgagaaggactacacgaagtagtacagcagcgcgggttcgggcagctatggatttgtagcttgaaggagtttgctttacgacataaagcaggggtttgggatcacttctatgaagatagtaaatgtcttgagagcacatgatccggttcttggagatgatgatacttgggcaagagttgaagacattcaataatattgtcgtagcgtagagatttaaacaagggccttcatggccacacacaaatctccagcaaaaacggttcaaatgcaaggacctataagtcttcaaaattttggaaacaatattcaaagccataggtgcaactaaaatc

SEQ ID NO: 9049 - DNA, 1024 bp, Arabidopsis thaliana landsberg
cgcgatcaatgcttgttttgctacacgtcagcaagatcggtgagtgataggggtgccgtcatcggctcacaatcaactgactattttctaaaaaggttatcgccaagattagtatttacgaattagaattgataaggtatattcttgattcagtccgatactattaagatttagtttgttattcttgggtcaaataataatttattgcggatacttttagtgattttgaaaactttcgttgaaagtcataactgtgtgcgaatctattatgataaattatgcacaatcattagaatatttgggcttagtttggtaaggtaatatccgtgatttttgttataccgaatttcaattgaaaactttgcttgttatggtgattcatttactaaaatcagttaatgcaacggaatatatgatattcaaagatttgcttgttatagaaatcttggacttcaaaactaatcagcattaatttaatttactgcagctagggtaacaaaaaattgtcggtgaaggctataagatcttttaagagaattgggcttaatgtcgtaggcttaaaaagcccaatatctatactactaattccaaattcaattatcgcaggatccgcgtggtatccatctatgcctgaatatagatccgatcaaagatccaggatccactgtatgtttgcagcatattgtccgaattaccctttaactaaatcctctatttactcttattttggaaaattttttttatgacattctatgtaattctttaccctttatagggttatttatgttagagtgattcccaattaatagtatagattaggattttttttttttttgataaactatagattaggatttagttaaatatatctttataacgatatacaaattagtgttcagtttcttagattttttttaaaaatcaatccattaaaacaacattaagatatgtgtatgtttgacaaatgattttggtttacaaaggaaaatgttagcttaatgtttgaaagtaaagaataatacta

SEQ ID NO: 9050 - DNA, 1446 bp, Arabidopsis thaliana landsberg
ctaacataatcctcctttatttctaaagtttataaattctatccacttaggttatttttaaacaaaacactttaaattttcattataacacataaatagacaatcgaatgattaagacattatttttaagcatcatcattagtactatttttatattttaaattttcaattaatttagtaaatatatctaatacaaatttatatttttaggtattaaatgataacttattaaaattggaagagttttttgtaaataaaaaaattatgctttaaaaatagagaaatgattagtattgctccaaatttggagcaatactatctttatttttggcgcaagatattgagtaccattgatgatgattttatatcaaatatagagcttgtagcaagaagaagggtgacttacattatccttgtggtaaggtttgtagtacgaaactatttttaaccattatccttcaaacaaacaatgttaataattctatgtcaagtttctagatcttaatctccgataacaaactaataattaacaattgttagaacatccaacaataaagcataaagagtgaaaaaaaaaaaaaaaaccaattaaaacctgcaatttttctcgttctcaaataaaacttctaactaattaattttcttaaaaaatcttcaagtcgtcaaaattcaaacttttcctatttaaaacttatcttgaaaacctccaaattgaaatattttcccaattaaaacctcaaactttttttcgtttctaaataaaatttctaacataactaattaatttttcctaaagaaacgtttaagtcatcaaattttgagtctgatcaatgatttactaacgataaacggcttttaacaacatattttccatttatttagtttttgaaattcacatgttttagttacagtagaaaatataaaatcaaaattgaggattgaataaatttatacttgaatgattgttaaaatttatacttgaatgattgttaaaatttatactttaatgattatggttaaatttttaaatcaatcgaagtaaataacccaattggtaagtaactaagtattaaaagattccaaaataggaaatatacaataatgttttgcttgtgcatcggtggtcattaagtaaagggcaccattcacttcttagagtggtaggaagcgagaaaccaagccaatatggtatcccatatggctaagcttatgagagagttagagacaagtgtcgcattaggtgtcatatggaagatgcatacgatctatatacagttttttaacaatgtgtctatttgtaattatcactcattgtcttacttgatagcttttgtttgctttttcttaataggatgcattttattgcatgtgtatgcatttctcccaatgaaatcttgggaaacacttggctctaagagtctaactcttacacaagctaaaaacacg

SEQ ID NO: 9051 - DNA, 1143 bp, Arabidopsis thaliana landsberg
actccttccaatttttatttcttaaaaataatatttaattagattgaaaagaaaaatattgtttttacaactagtgtattgtttggttgaaatttgaagcacttaaatacaaaaaacgttaaaaactataaaattttaatttctcgatgcgaaccaaatttttggaaacccttttcgtaacgtcgatttccgctcgcttgtattgttgaaagctgatttcgccctttcttatctatccacttgatcaatcgggtgcttggtggatagacttcttccaagtttacgtgtgtgtatactgtatatattaactataccactcttgacacctcgctttcactgatacaattttatcattttatgtatgcatatcagcatatgaaaagtcaagatgaatattttagatacacacgtacgtatatgcatattcaaaagggaaaatcccagaaaaaaccttaaactttttccgtttccatataaaacctccaaattgattcttttccaattaaaacctccaactttttctgttcccaaataaaaccttcaactaataaaataaaactttaagtcgtcaaatttgtgtctgatcaatgattaactaacgataaacggattttaacaacatatttttcttttatttagtttttaaaattcacatctgtcagttagaacagaaaagatgaaaatcttaattacgaaccctagaacatattttttctaatttttagggttcatataaattttggaaacaaaaaagagatgtcgtcaacgactattaactattccgaacgaaattaccaaagatcattggtcaaccattgatcaagctcaaatttgacgacttgaaagtttctttataaaaaaatactaattagttagaggttttaattgggaacgaaaaaagttgaaggttttaattgaattttcttttcgatttggagattttctatgagaactaaaaaagttgaaagttttatttgaaaaatgtttcaacttggaggttttttctgggatttttcctattcaaaaatatgtatttacgttccctttttcatcttgactcttatgtggctgataaaaaattgcaaaatagtatctacctaatgttttcaaatcgtttttctaaacagttaatttgatctagtg

SEQ ID NO: 9052 - DNA, 1551 bp, Arabidopsis thaliana landsberg
acatcgaaagctgctttgaaagactcttctgagctatgcttggaatagttgggagagtccattctagaaccgtgaatgggagagctagtgatctaagctacatcaaagttcaagacatagtaatataactacaaacccatttcatcataactttctcaagtatttccatcactccaaactcaccatcacagggcttttagtcattgcccatacttctactggagcatcacggaacaaaataagaagatacctgaaaacatgatgtcaaagactctttcatctctttgtgaagcctatgaaaaagtaaagaaaccaacctcccagaagatgaagccctcaaagctcttataggagctcgctctggcttttgcaatactcgaaagcctctactgacgccactccgaagacatgtgacgacgagcttattaacatacccacctgttcgtttactcacctgacatcaccaaagcaacatttctagtgttcaaacagtggaaatcgagcaaaaattattaaggatcttacagatatgaatttttctttacccgactacaagagtatgaaactagtctcgaatttcctagccaattcaaaccccttatactactagtgtgtgcagagaaacttgctgccactgcgtttgcagacacatcaacaacatcaattgtgccagcttcggttcccaaagctacaagaggaactactacagcaggaaaattccctccaccttcaaacaatacattcctatccatgagcttgagattttcatttaatatttaaattcacgagttgtctatacaactcacgagccaatgttgcggtcatggaaggtgttggtatcgcaagcacagtcactgcggacgagagaagttgaagttgtccaactaatgtgatctgtatcaatgagtttcatgtaaacacaaaaatattgaaggggaaagataagcaaagaaggttccagtttttatcatagacctcgaaagatatattaggatggagatcttgattgccattagtaggactctctatcagattctcattagtttgaggattagaatcctcatctccattaaaagtcaagatccaactccatattttaccatcatcagatatagatatgaaatgtgttttgaatagaagaaaagcatcgttgttgaaatcaaaagaaatctcgagctctgaactatccaaaagagcatctgaatggatagtcctgatgttctggagggttgaatccaattgggagattagaagagtcagaagagatggtgatggtacagaattaccaatcgttggcatgaactcttcgattgcacataagacatggacctgttcccctctacaaaagtgagaaaacaaacagaatgaactaagaaaataccacagagaggaacaaagatgaatagagaacttctcggcgcactcttttcgtcgccaaatgcttagcctgccatcgaggtgaaggcagtatagaaactaatggattgggtcaggcaaaacatcaacaaactttgcgtagccacgaggtaatgctacaacgtagaggctgta

SEQ ID NO: 9053 - DNA, 1065 bp, Arabidopsis thaliana landsberg
aggaagtatgcagcatggatgagcaaaggccaatatgatattagctgcatcatagttttcttatggctaacctgggtaacatttgtacggtctaagcaatctatgcagtttgatcggacaacaccaagctgctccttcattttctcacccttttcattcaacagaaagtacctgcgtatttcagagaatgcaaaatgacgtgccattttttatttataattattcagatttcaagattacataaatagaaatgtacaaagaatcatacccattcttttcgagaaaaccctcgatgtgctcgtacagaattgataagcgctcaaaatgaatatgcccacaaatttgatggaaatcaaagtgcaggtacctacaggataaggaacctcctttaatgagttgcaaaacaataagcaagttgtctaagaaacacattagacgaacagattgactaccttatatcatccccagtaatgtgttgcataacagtagcatacttctcgcataagcgcccctcaccgccttgctgattagagaaattaaggaataaaaagttggagtagatttatgcaatgcaattaatttaaagaccaaggtgagctcacaaacatgacctgtacaacatcttgagtcacataactacacaagtattcatgtcaatttgaaagaatttgtaccttgttaacgagatcaactgccaaaactgatccatattttttcctaaggtccaaaaagtgacgctcagctatccgtttctacaagaaaagcaccctatgcaatttacttgaaagaaatagataaattactaaaagagtaggtaattagtcagaaattagtactcacagcttcttcaggttggacaatttcaaacttgggcttgtaagtcagatctacaacctgctcccacataaaaggcatggatcctctgacctgcaaatgtaggaagcaaaataacattaagagtttaatcgtggataactcagtctcgagaaaagttgtatgaaaaaaaaaggtaattataaaatgaccaaagatttgcagcattaagggaattcacaatatgcaagc

SEQ ID NO: 9054 - DNA, 916 bp, Arabidopsis thaliana landsberg
ccttacatcgtaagactatgaatttccatccatgaagatgagcccgaacagctatatccatattttcgacggttgtcctttcaagcgaacctccagattcttcaagggctttaattctccatactccagcagttccattgaaaccaaagaaattcaagaacaccccattaacctgctgctcaacctcgaaatgaaaacacagattgatgttttgaagacgggtcaacaagttctcgtctttgttcacaaacgcccacctagcctgaaccagacctaactcaggcttctcctgaaataacattggcatttacaagttagatgcttcaccaaaaatggttgtctcatactctcatgacacaaccaaacagaattactaatccacctatctacataccttgaaatgtggcacggttagtttaaggaaatccgagttaggttggaaatccgcatcgaaaattgcaacaaactcgtaagcttccacataatcacagctcattgcagatttgaggttaccagctttgtaaccagttctaaccaaacgatgccggtaaataatgttgacacccttttggctccatttagtaacctcatctctaattaactcctggatgctttcatcatctgaatcgtctagaacctgaactagcagtcgatcttttggccagtcaagctgacacacagcagatatagattgctcatatacctaaacaaggattagacatttatgtaacttcattaatctaattcaacaatgaagcacataaccatgtaaaaggattgatactttgtttaaccatacctctctctcattgcacattggtatctgaacaagaaccattggatactcagaccctgatccttcaaaatcatcatttcgaaaatgctcttcatcgattctcggcttaatcttcttaaa

SEQ ID NO: 9055 - DNA, 747 bp, Arabidopsis thaliana landsberg
ttgatgaaggggctaacggcaatcttcttgtctgcacaaggagaactacacaacgtagagctttagcagaggtttggacaaagatgttgatgtcacatggatgggttaaggacgatattccaaagatcttcaaaagagcaaactcatgactcaatgtatatgaagaagctacacaaagggtttgtagaagataagtgataagctgtaacaaaatcggtgggtcctctctcacatgaaacgggccatggagattaaggaatccacacacattttgtagtcggtctaacacatagagacaaaacataaacctgagcttcacaaatatagccgaatgaaccatggcaaattgtacaagagagaacacggtgagcaaaggataagatgatacatggttgaggaagcagcggtaatccccactccttggagccgagatcatagtgccgcgctgcctcaaccattgcaaacggccgtgataatgtaagctatctgagagagtcttcttcaagctttgggaaactttgatagaacttctaggtgattctaaagggcaggttttcagataaatgttgagcaaacagagcaaagaggtatgatatgagatcaagtggcgtccacaaaccattgactccatgaatcgacacaacttaaagctaagagaggacaacagacgcttcacgcaatacctgggcttttgtaaaaatgaaattgaagagcaccttttgaagttgggccgtggaaataaacggt

SEQ ID NO: 9056 - DNA, 707 bp, Arabidopsis thaliana landsberg
gccataaggtcacaggcacatatttatattgtcttcacagaattcatttatggggtaaaaatttcaaataaccacaaatcacaattatatctatacacactcacgtacgtctgcacaattgcataagaggacaatacaatccacattttcccacaatttatatataaaatctcgtacaagacgaaacatgatcattgcaacgtacgtatgcaattattttcaagcacgacactcgggtggtgggacaggaaacctagaccggtcagtacaataatcataaaccatatagtttactctaacccaccggtaacgtcgagcttcaacggcgttaagagactgataggcataaccttcccaccaattatgagggttcgatggacaaaaggttggtccaggaacaggacaaccttcgatgtcgaaatctttgtaataagcataaaatggagctttgctccaatcaattttctctaatccaccacgtgttgcccagtcatctgcttcccataatgttgagtatactcccataggttgtgatgttgggtaagctatgttcttggcttcgttgtttttgtattctcttattggcacatcgtctacggccaaactgagtatccaaaacatccccacgttaaactaaggcattttttaaacagtaaatggtgatatctgtcttttaaacagtaaatgttgattctagttgaaagtac

SEQ ID NO: 9057 - DNA, 2224 bp, Arabidopsis thaliana landsberg
tcgcaccactactatggacaaaggatgtatgtggaatgaggaaaaaactagatggacgagatcacgatgtcttcccgtttgaaacgccttgtcctaacagagatcagtatgtgttttgggatgctttccatcctacagagaaagttaatctcataatggcaaagaaagcgtttgctggtgaccgcactgtcgcgtacccgatcaacattcagcaattggctagtctcaattaacgattatgaagactatcaacaagacataaaaacttggtgttgtctttgtagtttcttttttgtaaggttttgagtcaaatctgttttccttttaagacgttttgaaaacgtctactgtgtcacacttaacggtccaaatcaatgtactcatcgttgcttcctttgttttcataaatatcatcaattataaaattacaaaaaacacacaatctttttctttttttttaataaatcacactaatcctgaagcctatggagcttcggagattcagttcttgatatgtatttaagcatcatccaaccagaaattgtttataccggcggatagggttaaggacagaatttaacgccggagacaccatagttacggtgactaggcaccgtgaaatgacggagtcttccctcttgcttcgtcatgtaatctctacacaaaaactccattgagaactcatcctccactttcctatccacatcatgcacaaacacagccgttgtctcttcctcatccttccgtctcctcgcgatcatccccgccgtgtaaatcgccgacatccgtcccggagcttcttcatgaaaccccgtcggagcatccaccatgattagatcccactctgtctcgtaaaccacctccggtaagcccttcaacgcaagctcgcaagtggaaaccctaagatcagttgacacgcggcggcattcttctctgtctttcgtagcagccatgagagcttccgcgtctcttaccttggtcttgtaccggacgtggtacgattcaagagacgggaatttctcagcgatttggtgaatccatgactcgtcctcgtctaagaagatggttcttcctccgtgatttaacgtcgcccacatcaagctatcgtgaccaagaccaaataccaagaagttgcacggagatttcttctctaattcctgatccaatttaatttgtatcatctataattcacatttacacttatcttatacaatacgacaacaatttactagtagaaaagtaaaataaaatttaactacggtcatttgctcattttttgtgacgtctaaaagactaaaaattcacatcattaccggactactaaacttatgttacggtagcaacattagtacaaaagattagactagattcatttaatttgctaatcatatttgatttttccagaatttagatgacgaattgagttcttcatttagatatcaattaacaatctacagtttacaatttaatttgcatgtcaaaagtctttttttttgtgataattaaatagtatactttaatttgttaccttcttggtgacggagatttcggagagagtttgctggggagtgacattggaggaggcatagtggacgagagcatcggcgagggaaggagggatcttattacaacttcttggactctgtaatttactgccggtggaggaagtggagatccggagagtgttgttcaaaggctgatgaaatgaagatgacggtgagaaaccggttctggtgatgaagaagagagtgagtagccgagagagacgaagctagagagtatgagtctcgtggtcatcggaaatgggagataagtcgtcattgagagatgcagagagattgtgcttaagtgagagacgttactaaagctttttactgcagagaaagggttttttatggtcttcaggggacaaagagacaaaagattttgatttttcttgtgtagctttgtccatgttttgtggtttgattattggtgtgactcgcattgattcgtcgatactaacaatagtaatttttctaattaattaaggttgtggtgtcatatcagcttaggtcccaattaaggttaaagagtaaatatagcagttacaaattacaacactatatttttactctaataaaaacaaaagtatagtcaataatttatcccaagcccgtaaaatgtttctctaggtaaaaacattaaattttgtatttgaaaacaattatcaagctccttcacc

SEQ ID NO: 9058 - DNA, 2071 bp, Arabidopsis thaliana landsberg
tgtccgccggcgaatcatcagagatcgaggaagcggttgcgagtctaaccatgtcttctaacaagattttgttgacgagttccgatggcgagtctttcgagatcgacgaagcggtggcgcgtaagtttctgatcatagtgcacatgatggaggataactgcgccggtgaagcaattccgcttgaaaatgtcaccggggatatcctctccaagataatcgagtacgcgaagatgcacgtcaatgaacctagtgaagaagacgaagacgaggaggcgaagaagaatctagactcgtgggacgctaagttcatggaaaagctagatctggagaccatcttcaaaatcattctcgctgccaactacctaaacttcgaaggacttctcggtttcgctagccagacggttgctgattacatcaaggacaaaacaccagaggaagtacgagagattttcaacatcgagaacgatttcacgcctgaagaagaggaagagattcgcaaggagaatgcttggacttttaatgagtaatccaactttagggtttgcagaatttcgtttcgaattgcacaatttagggtttctcttctcccccctcttagatttcgtgaatgggttcatcttttcgttatcgacttggtctcaagtaatattctttgtagattgaccaatgttgttcttgctctattagcgttctaattcgattctcgatcttgttcaaaagcctaaaaaaaataatcagtgtgttcttctattgttcttcaattgaaaacgaagatactagtagaaccggtcgtaaatcaattctattatctggccggttatctattttagttctctccagaaaattttcaaaattctaattagtggcaaatgaatgatcgacgcgtgtatgacagcgctcatcgagaggacccactctgtgcgaccatctttgttgtcgttgacgtattggtaaggatttgggctttgtgagaatcacgggctcatttgaatgcataatcttattaatgggaattttggacatcatggtactatttcgtcgaacacgacgaatttaaggttgacttatctttcttttttttgtcaacgaatataagattgatatttttaacaatgcataagttaagataagagttacaatcttgtaagattaggttaataaagtaattatgttatctaaaaatagttagacacgcatagcatttgtggtatcaaaaattcctctgcacagaagaagaaatgtctctgatagcaagtgaggagacaggctgctctctgatacgggataagaggatggaggtttgctcagttgcaatatctagcctctccttcgatttagccgattctgagaccagagtcgaaaccagattctgcagaagctgaactctctctccatgatcctcagcgttacttctgaacgtcttgctaaacgacgtgctgatcctgcgccacctaagtggaagatacctatcagggacctgaaaacagtttcctgtggagagaacacggagtgcgtgcctgcagagaaacccagagaactcaaacagttggcaactgcagcttatgatgccttcttgaggaacccaatacacttttcttcctccatcgagttttgtgtggtgcctcacgagatacccctcatccatctggaacgatgcgtagtgagcagcaagcacaagctgttcttggagcttggagaatgcaaaaggagtgagcaccgaggctgcgtgagattccatgggggcgccagtttttaggctgatgttttggagattctgctgcattgtttgctgttctgtagcttggtctttaaaatccacaacaacagccacctgcatattcacccataactcaaataagcaaaaatagcaaactcaacacacgtacagtaccatttcatgagattaaaatgcataaaccctataaaataaatgcttgaacaattactgcatagaaggcctaagagcttgaaataactcatttcactagcaatgaataaacactgtcagaaggagaagagaacatacttgttctacaaagtgagctagccgggtttgtgcgctcaagaacct

SEQ ID NO: 9059 - DNA, 502 bp, Arabidopsis thaliana landsberg
ccaaggccggtctgatccgaaccagaacactggtacatcaatccaaaactgtacgattaagccggcggatgatcttgtttcgagtaactatacagttaaaacgtatttgggtcgaccgtggaaagagtattcaaggacggtttacatgcaatcgtacattgatggtttcgttgaaccggttggttggagagaatggaacggtgattttgcgttaagtacattgtactatgcagagtataacaataccggaccgggctcaaacactacaaaccgggttacatggcctggttaccacgtgattaattccactgatgcagctaatttcacggtcactggcttatttatcgaagctgattggatttggaagacaggagtgccttacaccagcggtctaatttcatagtaatttgtgatttggtcttaatcattttcttttattaatttaatttaaagaaactgtatcatttttggtgaacttgtataaaaccgaaattcaagctca

SEQ ID NO: 9060 - DNA, 3189 bp, Arabidopsis thaliana landsberg
tccccaaataatcccttgaaaattttttcaaaagggtctggaaatatattaaaggaccaaagcaaagcccaatttttgtacttgtaatggtatttagaggattttgtgtgtttggaccttgttccattgaatcttgcttatgtctagagaagtctgcgttagagaagaaaaccgctgcttcaagcaacgtaagagagtttccgatctctccacaagcaatccctttttgtcaccagcagccattagttctttgaccatttcccatgttaactttggagtagtgcttgaagtattattgttgttgactccaagttttgtttgaactcttctcctccaaacatatatcgaagcttccacacggtttgcgatatcaagagcaatatgctcagaggacagatcaaggcaatcgagaagagactccgcagaaaatttgtcagatgttacatacctgtagataacatccccaaggcaggacctaccgttctgtaccaaaagtttaatgttagaacaaaaaaaaaaccttacaatggtttttatagggatgttttgagttaaagatgtagacctttggaagggtttcaaggtatgattcaggaacatccatttcggttaaagcaaggctgttaatagccattgcagctttaagtatctgcgtcgcacattccctcttatgattcaattctgttcttgcttcttcagtaagaccattcggtgctaaacgaggaacaggcaaccaccatttctcctcttggcgctgaatctttctgcggaaagaagctgagccatcgttttccgaagcaacgatcccttgatcaacataccagaactcagttttcttgaaactcgccaatatatcctaatgcaaaagaaaattacatcagagatcaaaacaggtttcacttgagaggatcatcgtataagaaagttaagtgaaactcacgagaagcatattgtctagtttacggagagcagggaggttgatgaaaagatcaaatcttggtcgacaagtcatgacctgaagaagattcacaattcaaactccagtaattgcagttgcaacaatcttaaaaaatcaagagcttacctcaaacttgttgccgtctggataagtttgtgttgaaggtgttaactcgacgatgtgatcactaacactaagaatccactccatttcccttctccacatctccttcttttcgcttgaaagtggctctaatctccatagttgcccgaaaatcgtagctaaaagaagaaacatcaaattcaacactttggttcaagcattttaacaaacacaagatagcttcgtctttttttaagacttaccacagagatttgttatggcgttggagatagctaaagccgtacacacacctttaccagaacctgacatatcttcaccaagtaacaactttgcaaatctctccttcatcatctccacatctaatccacaatcagattaacaacaacaaaaacaacaacaacaaagaaaacacatgagatcttagggctgagaaaaaaagtttcaatttttgattttttctcactaacctgcagaattcatctctttcgctttaaacccagaatcatcgtgaagggttaatttcttatgatcaaaattaacactctccttcgaatttttccgaaatgaagcttttctaatcggccaacccagaatctgcgacggtggtggtggtggagaagacgaagcgacggtggtggcggaggagctttcgtagctcgctccgctagtgctgcttctctcctttgactctgtaagtatatcttccatcgatggagtcaaattgcttcttttcttctcgatccctgcgcagctcttcactaaattctccatttttaaaaacaaaattttgaactttgaaaactggtttcttttgcaaaagacccaaaagagtttagataacactcactataaaggtaagaacatggctttagtgagagcaaaaggtaagaaatttgaaaaaatcgagctggatataaagttatgctctctgtttctcttcctcagtctcgagtagaaagagaatatatttgacttttttttctttcaaattattaaattatctttttggcggacaaatttcttgtatggtgtggatattacggttctgcccatgttttaaatcaagaatttagtattttaccacaaatagcaattgctgactcggtgtggtttatttattacaaggcaataattagttacgtaaatgagacaggtgaatttccaaaattgacatgttaactaaagaaatcttacaagatgtaagtacgtttaattgtttggaagtaataacttcaaatataagttttattgttttagttaaacacgaatatagctgtattcagggtctaagataagtttttttttttttttaaacattgggtttaagataagtttgaatttcagtttataagattttattgaacgaaaaatggcaacaaatatcaacaaaaccactttctgaatattattgaatgcagagtagaccggaaaaatgttcatacaaaagaaagtggagacattcttctttttttttttttttttttttttttttttttatggagacattcttcttgaagagtaccaaaatttaatgtgacataggccgccaatattaaagtaaataagtaataattaggagtttaaaaaggattaagtggatttaatgcagccatctttttgtttgttgtcagaaaataatgcaatgggtaagtgagtggcattttcgttaatatggatgtctgtagtgtgcaatatagtaatctgaggttttaattcaaacgcatggtcccatatcgatttcgtttgaagttcgtagccgtttaaggcctaacctcccacaattaggcgtagcttaatgactttgagagcttaatatctaatttaaattagttttcctactttctagtttctacgataacaatttgatatcctttataaacaaaatttgttaggtttttcaaaaaaatgtatagtttccattgcgttaaaaaaaacaaagaacaaacatctctatttttaggattttgttacgtcataacgactcatgtccatttgtccatcacatctaacaattctaaaatttgaacttcgataaagcaatactattgattactagtcaaaataaagtgaaaggttatggactgtctaaattcgaattgttaaacgga

SEQ ID NO: 9061 - DNA, 1882 bp, Arabidopsis thaliana landsberg
agaaatctaaaaacgagtcaacttgctttttgttatgaacagatccgagaaagacccatcagaagatgatccctaaagcaccaaattttgctcaaattccgatgaaatccagagaaattacgcaaaatcaggatatactcacaaggaatttagaaaagttacagacctgaaatgagtcggcgagaagaagaagaagaagatggagaagaggaggaagtgaaaaagccctgaaggaggaagaggaagatgagaacgttgatgacagtgagagcaattgttgcgttcttgaacgaaaacctcatgcgccattgatgatccattatcttattccaaagcaaaccccaaaaatctaaaccgtggtctttagaatttcaccaaacttgaattttatcaaggatcatgaatcttccttatccttcttcctttctctacaagactttaatttactggtcttttgactttactacttatcctttaatctttggttggacttgctaagcactgtatctccttttctacgtaacaagttaactattacctaaacaatccataaccttattatattttgatttggtgacgtgaatccaaacatttgttattttctttgtcttcaactatcagattaagaataaaatctttacttttcaaagtttatcaatttaaagtagtttgcagttttaaaagataactcttaacatattttgtgtgaatttaagaacaattaaggacaaaacttttgatggtcaaaacttttcttgtcatcaatcatcaatatatgattttgatggtcttagaaacatcttctcttcgaccaaaaaaaataaacatcttctctgttttttttaatgacacactcttctctgtttctgcaaaacgttttgacaagagtcaatggaaacttcaaaaagacagaaaacaacaaaccatattaaggaacaaatattcattctttggaatcataaacataactcttatcacattaattagataacttcaactatttacaatctgagagaacaaataaacaagagctttctctcacagaacatagataattggtacacagccaaagaagaaacaaactggaaaactacgaattgaatgacctaagcaaaaccatatccgaaaaccggattcaaatcatatataagcttctgcatgcttttatccatattctccaaaatactttcttcaaaaagtatcgagtaaattgcaaacctcaaacaatacataaacaatgccagctttggaagggaagctaaacagggttgtttctttgtctatccttctgctcttgacgtcttggagctgcattaaaaatgattcaatcagtctttttcattagtcaagacgagaaatcaagaaaccagaagatgatctttaaaacttacctagtccactagcttctgaggttcccatgatccgaagccttttcaccgagttgataaacattctaaacaaaaagagagaaaagagactaatcaggttttgaactactgcaatactgcttaatatccgaatcttacctccatggaacatctccaacaagcatccaatccccttccttatcttcataagtgagtacaaagtctgatgatccatctaaaagccttaaaggtttaaccttttctcgacaagtagtacctgatagataaaacagaaactatcagtagattcatagaaaacatcgggtttatagtgtacgcatttgaaaacagtacagacctgtcattccaaagaacatttcctcaagcgtctgagccaagttttcgtaagacgaatgagctctcatatccacttttctgcctataccaactccatccatattcaccttaacaaaccctaagccctgaactttcgcattcaccttcattgacacatc

SEQ ID NO: 9062 - DNA, 1203 bp, Arabidopsis thaliana landsberg
  unsure (1)..(1203): unsure at all n locations
atgcgatcagggaagaagtcatcggagaagaagacattggaaaagacggaaatacccttatggatccgttgttggaattcgaggaacggtgtcctccgggaggagaggaatccgttgttttctacacaacgactcttcgaggaatcagaaaaacgttcgacgattgcaacatgatccgatttctgctggatagttttaaggttaagtactacgagagagatgtgtcgatgcatagagagtatagagaagagctccgacgaatctcagcggcggaaacagaggtgttgcctccggttctgttcgtaaaaggaaggtgtatcggtggagctcagagagtgttgggactgcacgagcaagggaagtttaagattctctttgagggcattccaatcaccggagatgaacgttgccggcggtgcgatggttttaggtttttgatgtgtgatggatgcagaggtagtcgccggattatctctggtgatggatcaagaattcagtgtttgatatgtaatgagaatgggttaattgtgtgcgttggttgctcctaataccattttttttgtttggtgtatatatatcaaattacattattcgtttattatttttcttagtattgtaacgatttttttatacagaaaataaatatggtcatcagttatatcatatggttgtttctacacaaatctcaagttattattgccttaaaaaagagtttgaattattgacacgaattgcactaaatttatagcatttgttaatgtttataattatatatgatgtgtataaagattaacataccggtgttagtagcaaaatttttgcaacatccactaagattgtcatccataaactacatttatttgagaatttacccttattatttgatttaatcatcgatcaaccacttaacaaaacgtattcactaattcgatgaattgccaaatacttaaatatctgaatggtatagttacagtgaagtagtcaaaagagcaagttgggccgccagggtcggctgagtggacaaatctactgattgcaaaggagaggcgggccttccttttcaaccacagccgcctatttctctatttacttttatcatcacaaactgctatttttagattntctttntaagagattttttcctttatttcaaatatttttttctaggattantaaacttaacgtactattgtataaaaaatg

SEQ ID NO: 9063 - DNA, 454 bp, Arabidopsis thaliana landsberg
  unsure (1)..(454): unsure at all n locations
aatcaaaactatttagagaaattccacggttagcgcgagtccaaaaactagtaaaatctgatagatgagtttcaaacttgataacactaaccgccaagtattgcttttagctttgatctaaaccaaagctttataacaataacacaatgacactttgtttggcaattaagattgcatatttttttgctttttcatttttctttaaatacacaaaacatgaagcaaagtggagtcctagctcctataaatacatgcaaggaaaataagtgaaagagatggctcctaaacataaggagaaccaatactccatttatatctaaccgaagcaaataacataattaaactaaacaaagagaaaacataaatcgtttacttcacgtattaccggttntgcaactccatcaattggattatgatttccaaggaggacanatgaacctaattgatgagtttt

SEQ ID NO: 9064 - DNA, 1604 bp, Arabidopsis thaliana landsberg
ctccttccttcttgatcacacaacctcacccaatcggtcagatcaacggctcctgtttgacctgagattatgtcacctgcgctccgtctagtcaaaagctccatgagaatcacaccaaacgcatagacatcggatttgagtgttggtatcggtttggaagccgaggaaagttcaggagcagagtaaccgagtgcactcatgtttagtatctgttccgctacaccagatggagtcatcaaacggtgaacacagtaatcagttattcgcacggtattgtcaggacttgagaggattatgttagttggcttcaagttcccgtgtggcattgctctatcatgaaggtagagaagacactgagccacttcaactgcaacttttagtctttggctgaaggacattggagaatacctccgaggagtagtctctgcacagaaaatttggcagggtgattaactttttttcaaacaagatacagaaaggcttgtagttataggactaaaaagactaattaaaagatcttctaaccgtaaagatgcatggctaagctctctcctctcaggtaatcagacaggagaagtctttcttgttctctgggaccccaatagtatgctcgcaacggaacaatgttaggatgttttaaagagccgatttttatggcttcccgtgcgaaatctttcttatgcctcacgaggccaactctcaaccatttcaccgtcaacatgtgtccattatccagtgttgctttgtacagtgttccatggctgcttctacctagaacttctgcaggagctcgggataactcttctgctgtgagttttagtgaaacgtctaagaagaagagttctccggccaatctatcaggtgagtaaacatctaacatcacaggctggtcgctaaaacggggtgaggaggatagtggggagcctcctgaagaagacttgcgcccagatgctgcaggataatcatcaaggaggtttgtaggagcagaagtagcaggcgcaccctgctcggatatttcagcttcacatccgggtatcccagataacgaccttgaatttgcggtgagcaagtgatcgtttgagaagctcaaagatgatgactgctgctcaacatttgagctgaagttgaataaggagggacgagaagagcgtccaaacttggtgtctctagtcgttgcttggtctgtaaatctattcctcccgtgaaagtccttgagctgtgttcgatgataggcaaacaagacaaaaagaatcataatagcagctccaactgaagcaacaataatcgctattcttatgctaagcttcgaatgatgttttttcccaggtaaagacagatcaccagaagaatccgctggaatccgtcctgggagacttagcttggagttaccaggataaaatgaagaaggcgggtagcttctaaggtcttccggaattatgcctgataggtcgttatacgacacattgaatcccaccatttgggaaggaagcttattgggaatttgacccttgaaagtattgtttgacaagtcaaggaacaaaaggccactaagcttgttgaaatcgaatggaagttccccggacagcttattattggcaagattc

SEQ ID NO: 9065 - DNA, 1854 bp, Arabidopsis thaliana landsberg
aaacaagaggaatttgaatacagaacggtataacttataactataatcggtgaagactgtatttatgttacttacagaatgtgtagatcccacactctctacctctctgaactacaccgctctgaaacttgagattaatggcaggatcctgatggaagactagtagatgatggacttggacaatctgaagagcctcttttaaaaatcattaaagaatattaaattggataatggagaaacctggttgtaattaaatatatttaatgcggagcaatatgttttatatgcatgccaacattaagcatcttattaaatgaaaaataaaaacctttcgaatcttcaacatatgaatattcatgccagattgcttggatattttgccagagaggtatcaaaagcatgatgcttgatatctctacaaacttaagtgactctatgcttacatatcaaagaagagccaaccatgtatacgcaactgtaaacaatctactcagaggcttattatacctatatcagccttggtttggaaatgaaatgcatagtcttacaacgtaaaatggcatcaaacttcacgttgaaacctctacgaaatattatatgtaataacaagttggatccaaaagaaatcatatacccaaattcaggaaatggaattggagatggtaaagagctcgtttagtcaactgaccataagaaacgacttcccagcaggcgaagttatatttgcaaaatcttccacaacattttcgttttcaagctcctctataacatgctgcaaacatggaaccattaaaccaagcaattcgttttcatataaacagaataaatgttcattctttttcagtatgctgcagtaacaacttactgctgtttcatcattgccaggtgtcatagtccttctctatatacgagatttcttaacagcttaaaggcgtagtctatctgcaaaacatttagtagcactgatgatattaacaacataaagctaacagatttagcacacaacaaactgacagacctctataaaatctgatgagcaagtatatcctgaaacagatagaaattgagagaaacagtatgaagaatgatggtgaagaagaagcatcatggaacgaattcatgtcatggtcgattttgaaaaacgttcttcaagtttgtctgcaatgtacttgaactaagaccacctaaagtatagttctaaaattcaattagcctacttatactaacagaaatagagtacgctgagtttatccaagactcttcacgaaacaccacacacagacgcacacactcacccaacagtagatactaatttcaggactatctatggagtataagttactcgaaggtggaatcatgcgattgaaacaagactcaaatgaaaacagaaagaaattcaaccgaaaatgacaaacccgcagaagagtatatacacggaggtcatggacgaagacgacggagtttctttcgccgtctgatttagcaatctccgatcaaaagatttttcaggcgtcaagagttgccaaaaagagaaggaaaatgcaaaattccggtctaatttaacaagaagccaaaattacccggttcggtctatgtttacttgaaccgaatttaatttaccttcccggttcaaaaacccaaaattctagagagagaggacggcaatgcgatggggtcatctttctccgcctcctttactaactccaccaccgccgccgccgttcctcctccgtcgccaccttcatcgccgtcacgttccaatgtaaaatctaacggagaagagagacctcgtttcttcgatggaaaggcgaagaacaagtgctgggctaatgctgacatcgtacctggtcgaca

SEQ ID NO: 9066 - DNA, 1796 bp, Arabidopsis thaliana landsberg
ggaaagaaaccgataccgtcttgatggcaccaagatcatgaaggtaaaaacgtttacaaattcattaatctttgccccgtgcttaaaactgttttataacatgtctcattcctttttaactttgggcaggtatttttggatagtaagctaaagaacgacactgagtacaagctggagacaatggtgggtgtgtacaggaaacttacagggaaagatgtagttttcgagtacccagtcatagaagcttgaagagatgaatgtttgtttcattcttttttgtcggatagagagcttttgattctgtttgggagtaaaactctttgcaaagattttgttatttcagcatttcgcaatctcttcttcaaagttcgatttatcgatacaattcttttttcctactagcattcatagtttcaaaaacaaaagtttcaaataattccaggttaaatttataatttttgagcacaaaagtggtttgacacttgcattaaaaaatcgtacaataactgaaaaaacaaacatttgtgtactgtgtagttttgactatagaggaaacaaaaacctactgttgattcctgctctgtacaacttcaagtcagatgaagacctcaagtgaatctcggtatctgcaggaacaaataaaacatctcccattgaaatcccatcggctgatgcttctgtagacattcttccttcaccttggagtacaagcagaagagaagggcctggaacagagggaaacaccgtcgaggctccactgggaagatcacacagatcaacttcaaactcttcgaaaggcggcaggtatcttgttatgtatggtcgaatccttgttcccttcaggatttccggatatccctgaaagtcagaaataagaccttagtaaccaatcttttgtaagtcttggagtacactttgagtttggtttagatctttaccagtttataagagagcattgaacaaagtgtttgaatatccagaggcttggaagtgaggccagctcgtactacattgtctgaagtcgccatgacctcaaggcactcaccgaataagtatgcgtggggctcgtttgcaccaagatacaaggcttcgccaggattgagcttcacatagttgaagaagaatgcagatatcactccaatatcatttggatattgcttctctagcttcaaaaccagccgttccttgtctgtcaattggcgttcctgtgtatattgagaaggtttcagcagtgccattcacaaggcaatttagagaaggaatcatctgaaaaaacaatcgaaattagatgactgacctgactctccatatgcagtcggcgttttaatttggatacaattttctttgttgtatcggcgtcagcagacattagcagggtgaagattgttcggacaacagatttcactttttcctcatcatgttcagtgatacagaaaacttggtttgcttcttcactcccaacaagttcttcaatctccggaatagctcgaatgacactcttaagctcctgtaacattattacaagaagaaacataaatccttcaattctgaaatataagctaacaatcctaaaagtttgaaaactgaataacatacataagagacttcatagagctattctccaaaaccaaattgtttctaaagttttggtaatatatccagaaaaaaaacgaggaaagagcgagtcatgtgcaacaacaccatgaaccaacataaatacttgttcagcgaatccaatctcaaaccttaggctcaaactatagcatagagaaaagacactgagtcattactactca

SEQ ID NO: 9067 - DNA, 1383 bp, Arabidopsis thaliana landsberg
ccataagattttggagttttggttttaaaattgtcttacttcctgaaatataggacaacttggccaacatgatggaggggtttaacaatgctcctgctttcatggcaagcttgttgttcacatcaccaagaacttcttgactctgcctaacatcaaggtataatttaaagtttttcttttgagtattttttggtgcaatcttgacttattacacaactttattgatctttaaatgcctgttttttttgtctcataggttccacttattttgggtatatggggaggcaaaggtcaaggtaaatccttccagtgtgagcttgtcatggccaagatgggtatcaagtgagtccatttcccaaatctccgatcttgacccggtttctgtttagctctctttcgacaagaatctaaaaaagtttgaatctttttgcagcccaatcatgatgagtgctggagagcttgagagtggaaacgcaggagaacccgcaaagcttatccgtcagaggtaccgtgaggcagctgacttgatcaagaagggaaagatgtgttgtctcttcatcaacgatcttgacgctggtgcgggtcgtatgggtggtactactcagtacactgtcaacaaccagatggttaacgcaacactcatgaacattgctgataacccaaccaacgtccagctcccaggaatgtacaacaaggaagagaacgcacgtgtccccatcatttgcactggtaacgatttctccaccctatacgctcctctcatccgtgatggacgtatggagaagttctactgggccccgacccgtgaagaccgtatcggtgtctgcaagggtatcttcagaactgacaagatcaaggacgaagacattgtcacacttgttgatcagttccctggtcaatctatcggtaagaaagattcttactaccctgaaaatgttctatataggacctcgtgcagaatctgatatgtgtttttggtgtggacagatttcttcggtgctttgagggcgagagtgtacgatgatgaagtgaggaagttcgttgagagccttggagttgagaagatcggaaagaggctggttaactcaagggaaggacctcccgtgttcgagcaacccgagatgacttatgagaagcttatggaatacggaaacatgcttgtgatggaacaagagaatgtcaagagagtccaacttgccgagacctacctcagccaggctgctttgggagacgcaaacgctgacgccatcggccgcggaactttctacggtaaaacagaggtttgaaactcgtttgttttttggtttagttggccactgggtatgaaaatgtaaaagagaaagagaagaaaatggaattaggttttctgaagttaaacttacc

SEQ ID NO: 9068 - DNA, 1070 bp, Arabidopsis thaliana landsberg
tgtgcttcaggctaattattgtagtgagtaaatgagtggtgccaacgtaacgtaccagctaacaacttagccttcttgtggtcatgttgtagctttgggaggttttcttggagtgcgaccaaagcggctgcgcacagaacacctatttgtctcattcctccacctaatgttttcctaaccgttttcgccttctctatgaagctttgcgaaccaacgattacagatcctaccggagctccaagacctttagagagacacacctgaaaccagagtgtgtgtgaatgactcttatcttttagctataattttcagatgttatagacgagaaagagagaaaatggtacctgaacggagtccgcagccttaacaagcttatggactggaactccaagtgcctacaaaaagatatctcaagtcttttatttatgagtcttatggattaagaatggaaaacagttaggtgattgatattacaatggaagcattgaaaagacgggctccgtcgatatggagcttcacgccatgtctcttcgcaatctctccaactttctcagtgtattccacgctcaaacatctcccaccagagctgcattatcaggtgcatggccgtttattgacacatataagcatagtattcgaacgaggctctgctttaacagtcaaatatttaataattcatcgtacttacttggcatgtgtgttctccaagcaaatcaaccttgttgatggataaaacgtgcttcctttaggatctctaatagctgcttcaatggcctccaagtccatggtcccgtcttcttcattcttgactgccttaggatgcactcccccgatagtcgatatccctccattctcgtaaacatggatgtgacaattgtcgccaagaatcacctcgctgcctctcacgtcgcagagaaccatcacgctgatcagattccccattgtcccggatggcacgaacagagcagcctctttccccatcatcttagccatctcctcttcaagacgtctagccgttgggtcatatccgaggacgtcatcatccacctctgcgttacacattgcttctc

SEQ ID NO: 9069 - DNA, 579 bp, Arabidopsis thaliana landsberg
  unsure (1)..(579): unsure at all n locations
ttccacctttcctaccaaaacatatgagatggttgatgattcttcatccgattctatcgtctcttggagtcagatctataagagtttcatcgtttggaatccgccggagttttctagagatcttcttccgagattcttcaagcacaataacttctctannnnnnnnnnnnnnnnnnnnncatatgtaagtgttttcatgctttgtttaaaagtattgactaaatcaatcatcttcttagtggaatttgtttttgcgtgtagggttttagaaaagctgatcctgagcaatgggaatttgcgaatgatgattttgtgagaggtcaacctcatcttatgaagaacattcatagacgcaaaccagttcatagccactctttaccgaatcttcaagctcagttaaacccgttgacggattcagaacgagtgagaatgaataatcagattgagagattgacaaaagagaaagaaggattgctctgagagttacataaacaagacgaggaacgagaangtgttgagatgcangtgaaagaacttaaagaacgattaccacacatggagaagcgtcagaaaacaatg

SEQ ID NO: 9070 - DNA, 1552 bp, Arabidopsis thaliana landsberg
  unsure (1)..(1552): unsure at all n locations
tagctatcatttcacttgaaaatcccatctccataaaactagcaaccgcctcaccagagactcttattatctttaaatccaagatttagtcacctattaatctctttgacaaagtaaatatatcatcataaacttattacaaacctcaagaattataaaagtcgtaatatttatttctaatcaaataatcataagaaaatttatttattatatggatagtggataccaaatataagctggcatctactattcaatttcagctataaatcaaatgacatttttttttaatagaattgatggatttgaacattaaatctgagagaatacaaagaaaataaatataagattaatatttttgtaaaattaatactaccaacggatggtgttttatatccaatccgaaatttatttataaacaaaaaaaaacaaaaacatctcaaataaaaccactccataagtttttctattggataacattaatggttcctctgatttccaaacaaaaaatggccaacttttatttgactattgagtactgactagggatagcgttatcttatctacattcaaattctttctttttgggcgggtcaaagtaataacaaacacaaacacaaatgaaaattattaatgggcctataacgttataataaagcccagtatgaaagttgtcggaagagaacaaagtatcgacgccggtcaaaggcgttacgacgtcgtaataaacaccagagaccttcgtttctcaacggaaggagggaagctcttttggctcttagatcttccctctcatccggatcaagcttcaaaatttgtatgctttattcgatttaatgtctttgatacacttgttcttgttgttgggtctgctgagccttgaagctgcggcgtcgttttcaccgggatcgcgctcgattctccgggacatcggcagtaacatcgccgatcagaaagacaacgctatcgaattgaacgctaccaactttgattcagttttccaagattcccccgccaaatatgccgttttagagttcttcgctcactggtcagttttctcattctctctctctctcgtaaaaaatctgaaaaaatttcgaactttaggctttttagcactggatcttacacggaatttgtttgcaagtgtccttcatattcgaacctgactttacgttatccaattctctgagatttatccggaaataacttaactttatgtataaatgcgaaaggcttgtatactgacattgacccataatttttgtttggctcaaggtgccctgcatgtagaaactacaaggtaacaacgccattcaatgtcttattattcaatgcttactcttgtcaatgttgtttatatccaatgggtgactctgctgcagccacattatgaaaaagttgcaaggctattcaatggagcagacgcagtatatcctggtgtcgttttgatgaccagagttgattgtgcgataaaggtacttgcaccatcttttttatttatatagatgaacgtgtatcttgaccctcctttctcttntttctcttacttcat

SEQ ID NO: 9071 - DNA, 510 bp, Arabidopsis thaliana landsberg
aatcaacaatgaagcacagtggggttgctgtatctccaaagtgggcagttttgattcccaaatccaccttaaaatttttaattcaaaacgatgtcattaagttcacataaattctaatccgagatttaaaccaggtattttttcgtcagttgacttaacaacatgcacaaaaaggtaaaatcaacaaaaattatctatttaattctaaaatctgactacaactttggcatttaaatgatattttgaaagtttttaaacattcacagtttgaaaattcatgttttctttaacatttcttccgaaatataatctcttactaataaaaaattctaaatgagacttctcaaagtatccacatcagcacatgaaaaacatcttacaggtggctacctcagcacacttattaagtttagaaaaacccttccacgtcatatttcctatagctgtcatcttgcatttgaacacgttattaataactgaatcgtttcttcttccttcccacctcaacat

SEQ ID NO: 9072 - DNA, 735 bp, Arabidopsis thaliana landsberg
  unsure (1)..(735): unsure at all n locations
atgctgtatctgtcatgttaattgaggtctaatcaacaaaatctagaatcttagtcgggactcaagtgttgatgtatctccataatggcagttttgattcccaaatccaccttaaattttttaattcaaaacgatgttattatgtaagttcacaaaaattctaatccgagatttaaaccagttattttttcgtcaattgacttaacaacatgcacaaaaagataaaatcaacaaaaattatatatttaattctaaaatctgactatcaacntttctttttttggcatttaaatgatattttgaaagtttttaaacattgacagtttgaaaatgggtgttttacttaacatttctttcgaaatataatctcttacttataaaagattctaattgaggcctcttagagtatccacatcagcacatgaaaaacatcctcaacacaattattaagtttagaaaaacttttccacgtcatatatcctatagatgtcatcttgcatttgaacacattattaataactgaacatgtattaacttctatgtatcaaactaattggaaatttttgggcctttttctatcaatagatcgatctgtggtaaaaaaaataaaaaacaaaagtcatttatccgatctaagtaatgaaaataacatccagggtttttttgcctctttcatcccccatatttttttattatgggaaaaacaaattgtctcttctaagcattttttttttc

SEQ ID NO: 9073 - DNA, 1419 bp, Arabidopsis thaliana landsberg
tcatacgtctgaatatatgtttatgcatattttgttagatattttttgataaagttttcaggtattggggaattggactagggtctgatgtgtgactgctcaccagattcttagctttttgatcattgtatttattcatatatcttatgcatataatatatatcacaactacaaaaaattctcaactactacattaagtaaccttctattaaaagcgaggttagaaatcaaatcaaaactagtcatatggttttgatctgattcttgaaatgatatacaacggacaaaaatacataaatacgcttctgtttgtatttccttttaaacatttgtccatatactataagtctataacataacctaccctcttaaagcatgcacttggcagcattttacatatatctacattaaacaacccaccgtgactgtgattcgcacgaaaaaagaaaaacccaaaaactgaaataaattggaaacaaagattagggttgcagttaaacttctaaccttcctaaaaatttaatttattttttaaaaaacttactaacaatccttaattcttttatcaaaagcaaaaaaaaaaaactgactaagaatccatgtttcatgaagattacgacaagaaccacgattatttctctatgtcttattctctcatatatacattgttatagattaaattaagtttgtgttgcatgatcttgttcataaaagtgtaaatgttattaccggcatttttggggagagatctccaagaaccttcaccgttggattgaatgtagttggagagaatctggtcctcctccgccgtccaccgccctctcttgataccgaccttctcgcaacacggcgctcttcccattttctccggcggttatatgtgtttattccactgaccacaaaagtcaaggcaatggagagagagagagagtgtgtaagtgagaaagagaagttactgagtgacagacaacagaagcaaaaagtgactgatttagatatatataggggcaggtgatatatagttaattaattaattgaaagggattaaaagagcttgcgggttcgagggagaaggagatgatgacacgtgtgtggtgtaagaagcgccacgttggtttagaaggagactgaagtcgtggcttattcaccgtcgagagactcgtggtcggtccgtgcaggttcgtcgtggttctcttagacactaattctagtgtgtgccgagatcattgacgttacttttttattaacacataagattttttctctaaagttagtagatctttattgaaattaattgttgtttgtcacgtgaatacgtagatcagatagtaatcgcacattttttgttcttcttataattttgataaaaattatataaaggatttacgccggatcctcctagtccgttgaccagatggt

SEQ ID NO: 9074 - DNA, 1561 bp, Arabidopsis thaliana landsberg
gcactagctttatcagaatgagccatgaatccgtcttacacagttaacaacctcttctttttctcaatctttttacactttttgcgtcacagagacaaatacaatatctccatatccgtgaagctacataaatctgaaaataggtatagaaaaatgaaataaaaaagttgacaacgaaaacgacccacttgatttggagagacaactaagagagtcacagtaccgtggtgtgtgtgtgtgtatatatacaaatatcggcatgatcccacagctcccacttaaccatcaacatttattacaggccatttttgttctttcttgaacccctctctctctcaatctgtttatagccattgaaggaaacaagaaaaaagcttgatcaagcaatggttcttcttagtttctccttaagattcattgcgttcactctgactataactctgactcagattgctgatgggtttcagagtcgaatgttgatgaacaatggacttgctctctctcctcaaatggggttcgatccccttcattgttttttttttttgaatttctatttccttgactctcaagttatttacctcttatggttactctctgatcagatggaacagctggaatcattttcagtgtaatatcaatgaaacccttatcaaacaaaccggtgattactgattctactctatagaaagcaaatctaatgcaagattgattgatagtaaaagtaatactaatgatctgagtttcactgcagctgatgcaatggtttcaagtggtctttctgcaataggttacaagtatatcaacataggtactgaaattatataaaattttagtgtgattactctgttttatccatctctctgttttcttaagtatcgtgttctgtttttatctgtgtttatagatgattgttggggtgaactcaagagagattctcaggttaaataaccttgttttcagagtttttgagaatctaaaaacaaaaatgagatgtgtttttggtgtatatttgataggggagtttggttgcaaaagcatcaacatttccttcaggaatcaaagctttatcagattatgttcatagcaaagggctaaaacttgggatatactctgatgccgggtatgtatatacagataaagatagttacaaaacaaaattcttgttaagatatagtttctccattgatcatctttttctcgatttctaggactcttacctgcagccaaaccatgccgggatcactcgggcatgaagaacaagatgccaagacatttgcctcatgggtatgtatatttgtatgtgttatgtctgaactcatttcctgaaccttgaagctgtgtgttttcgttatcatgtattcgacagggaattgattacctcaagtatgataactgcgaaaatacagggacaagtccaagagaaagataccctaagatgagtaaagctctgttaacttcaggaagatccatattcttctctctgtgtgaatggtaaaaaagactaactaagaagaagattcacttattcagacaactttggtctgatgatactaaacaagaa

SEQ ID NO: 9075 - DNA, 836 bp, Arabidopsis thaliana landsberg
gaaattgcaagtttgcaacggcaacacatgccgatgagtcatcatcagaagttttatcaatcttgccgacaacgagcaccgaatcttgtgaagaaaacatcgtcgaaatatcgcacaaagaattcttgtttactaacgaaataactctgaatggaactcttgaaaaacacatcataagtgaatggtaatatgcataggaatattcttcaatccttcaaccaagaagtaatgcttgatagatttcttgcagatcgaagtgtctaaaatcacaagctggaatttttttttttttaagatctagtatctaaaaatcaattaccaattcaaattattgaaataaaagtgaaaaataagcggtataaacatatcagaaaaaaaaaaaaatggctataatcacttatggaagctgggtttaccagacatgaaccgactatctccactaacgaagctggaagataccggacagaagtccgaatcactggaaatggataatcattagaaaaaactctagtatgtaggttacaaaaaagagaagagaatttttttttaatatatactcctcatttttccttttacaagataataacaaataaaatcgaattttggttatttttattttttgttttcgtaaaaggcaccgaaatattcgtaataataatagtaaattagtaataatttaatgataaataactaaatccaaaaacttaacaaggaaaatttcaagaaagagatgggaagagtttctgtattatgaaaaattgcaatatgaaataaacaactatttaaaatatgctcgtgttttgggaaacattatgcacatttttatgattagtaat

SEQ ID NO: 9076 - DNA, 693 bp, Arabidopsis thaliana landsberg
aaaccacccaaggaaagatcaagaaaatggtgcacaaaaaataaagtttgatcaagaaaacaaaagagaatagggtgggaagattcaaattatggagactgtctccgccgttaaccaaacactccccatctccggcggtgaaccggtgaagttcacgacatactctgccgcagttcacaaagtccttgtcatgatcaacgccggaattctagggttactccagcttgtcagccaacagtcctctgttttggaaacacataaagccgcattcctttgtttctgtgttttcattctattctacgccgttcttcgcgtccgtgaagccatggacgtgcgcctacaacccggtttagtcccaaggctcattggacatgggagccatctcttcggtggtctagccgctcttgtactcgtctccgtcgttagtaccgcattttctattgtcctttttcttctctggtttatctggctctccgccgtcgtctacttggagacaaacaaacccagtgcctgtccacctcagttaccaccagtttaacatcttgtggttttatgaatggatgagtgtgagatgaacgttaatgtataataacacctggtgacgtctattagcaggctaatcggttagagactgtatcttggtaactagctgatgtggccgaatattccgaatatattcagttgacgtgtaag

SEQ ID NO: 9077 - DNA, 976 bp, Arabidopsis thaliana landsberg
tttcataattctaaaccaatactaaattactttgtagtaaaatcaactcaaacttatggaccatgctgctttaagaagataaaaacaagtggtacatgtatagaaaaaatcttgatcgctgttttttaccttgtcgatgtggaacttttgattttgtagaggtagagatttccacatggatatggtacatctcaatattaagttaagtttatgtgtatgttttggaagacaaaaaatatacgagaagaatatttattgcatgcaaatctataggatgatgttgaagaagattagagaccaatggaaacaaaaattgttggatgcagacccggcccgtccataaagcaggtgaagcacttgctttaggctacacaatataaacataatctgaaggccatatttcaaacttctctgtttagtttgttggtttaattgtccacgtctaagtcagatgttgtgagttcgaatccttacttataccttccattatagtggttttctggcatttaatttccattcctattattgtttttttggttaatttctttttttcttccttcacttaattttttatttaatagtataatttcttttttctttggcaaaaaatacctttgatatttggtttttgtaatctgtttttttttttaaaataagagatttgctttttattcaaaaaataataataattttctgcaaataattttgaaagttaattttcataaagtgtagaatattttacacttttgtttttggtaaaaaaatattttacacttaattaaaaatatgtaattatttttagtaccttatatgatatcttaatataatttttattgttaaaatttatatgaaagtatgttttaagaatctttaagccacataaaacataggaccggccctggttggatgtatgtggtatcagatctgaaaaattgtctactgtatgttgcaccagctccgactaaactttttaaaa

SEQ ID NO: 9078 - DNA, 1038 bp, Arabidopsis thaliana landsberg
ttcgctcctgctacagaacgcacgcagaactggaacggtattcagcaagagatcaccgggaaagttcagagaaaacgtgtatatgaagcaaccgcggttgttcgtatttatggaaacaatgtgacaacagctactgtacaagctactctatgggtccaaaatccaaatcaacgtgatcaatacattggcatttccacgttagtatttaatgtatcacattctcttattcatgaatcatggttaactgctgaagtagttctctttttgtttccttaaaagtgtgcaagcaacagacaaagagtggatacatttgaaagggaagttcctcctcaacggttctgcatcgcgggtagtcatttacatcgaaggtccacctccaggaaccgatattcttctcaatagcttaactgtaaaacacgccgagaaaattcctccttcaccacccccgtctattgaggtaagtcaaaagatccagttcacattttcaccgccgtaaattataggtgaacaaaatattctaaacaaatataacattttctaaagaataaacaatttagcaaaataattttgttctgaagactgttgtttaatttggaaaacgtaaacaaataatcgatgtcttaatccgtgttgttttgtttttttctcgtagaatcctgcatttggagtaaacatactcacaaatagtcatttaagtgatgatacgacaaacggatggttttcattagggaactgcacgctaagtgtggcggaagggtcacctcggatccttcctccgatggcaagagactcgcttggagcacacgagcgtctaagtggccgctatatacttgtgactaaccgaacacagacatggatgggtccagcacaaatgatcactgataaacttaagcttttcttgacgtaccaaatatcagtttgggtcaaagttggttctggcattaatagtccgcaaaatgttaatgtcgcacttggtatcgatagccaatgggtaaatggaggacaggtagagatcaacgatgatagatggcatgaaat

SEQ ID NO: 9079 - DNA, 1727 bp, Arabidopsis thaliana landsberg
ttttggacatttttctaactcaaaatgatacgttcaactactacttcaccattagttggtttaagtctatttgcgtagggtaatttgcaagaatgatgtgctttatatatcctatacatagaaaactttaattaaattttgcttttttgttgaatataccctatatttttgacaacttgttaaagatcatttttattttcatcagttattattttaataaatacatcgtatacatgtcgttattggacgcgtaggacttacgggattgggcataattaaatggtacttaattactttggttatgctttttctattctatggactcagacctcaatatttgcgaacctatgattataatgttttagatatttttaatcactgttgtgaagatttttataatcctagaccatcgatattacgagttacaacttcttctacataagttacaattaagatcactctggagtcaaagactaattaaattttagttacataattaagaaaagttttttttttttttttcacaattaagaaaaggttaagatgtgcgaacaatcaaatttggtttgtgcaccacgtggaatcttcctggatgacaacaatgtatcattaatgcataaaaataacaaaaaacaaatggaaaaaaatagaaagggtattaaaggaaagaatagtcaacccaagaaggcaagaatcgtcaagtcacgtgaaaacgaacgtcgattctgactcgacgacaatccggcctcatatataaaaagacagatgatactacataatccataatccatagatctcttattaaataacattgctgaccaagctcttacaaagcaaaccaatctagaacaccaaagttaatggagagctcaaacaggagcagcaacaaccaatcacaagatgacaagcaagctcgtttccggggagttcgaagaaggccttggggaaagtttgcagcagagattcgagacccgtcgagaaacggtgcccgtctttggctcgggacatttgagaccgctgaggaggcagcaagggcttatgaccgagcagcctttaaccttaggggtcatctcgctatactcaacttccctaatgagtattattcacgtatggacgactactcgcttcgccctccttatgcttcttcttcgtcgtcgtcgtcatcgggttcgacttctactaatgtgagtcgacaaaaccaaagagaagttttcgagtttgagtatttggacgataaggttcttgaagaacttcttgattcagaagaaaggaagagataatcacgattagttttgttttgatattttatgtggcactgttgtggctacctacgtgcattatgtgcatgtataggtcgcttgattagtactttataacatgcatgccacgaccataaattgtaagagaagacgtactttgcgttttcatgaaatatgaatgttagatggtttgagtacgtacaccagctttcattgtttttaatatatacatggattcaaataattcttccttaatgagatagatcttcactaagttactatatatgatattatgccaatataaattaaagtgttgttattgtaggcgaaataactaataagttctgtttgtgtgattagcctcattgctataactccttcttgaacattgtaaaattcctcagtttgtagaagagaagtcagacgagaaaattttcattataattaacccccctagagaatctatgg

SEQ ID NO: 9080 - DNA, 1106 bp, Arabidopsis thaliana landsberg
tctctacaaccactgattttctcaacggcagacaaatgcaatagattgattaggtttttagctttttacttaacgttactgtcgatttttgaggtttaattgtgtgtgtgcgctcaaaggtatgtgacatatgttttccttcggatgcttcagggtatcactctcatcctctctttgatagaacgtcagtgtcggccattggtgaatggtttaaaactgttggaggatctacaccgtaataaacatactctgtcgactggagacaaagagacggactcattgcttcaaggtggattccgtgagggtgaggttacagaacttgtcggaccttcctcttctgggaaaacacaagtatgtattttctgttaggcatttcactattcatgtttttgtcttgtcttctgtgtgaaaattattcatagataatcgttttaaatctttaggaattgtagattgtttcattcaaacaaagagactgttcctagaaaaaaagtgttgtctttgcttaccctttttttgtgctctctctttacattgtgtgatttcttatgaatgactagttttgcatgcaagctgctgcaagtgtagcagagaatcatcttggcagagtcttgtatttagacacagggaactctttttctgcccgacgcattgctcaatttatctgctccagttcagatgctactttagggcaggtttatttatttcttgtaccctagcctatgacccagttctttagtccatcaccaattatttatgtttttaatcttatggacaagaaacgtataagtgcagaaagttatgagcagaatattatgccacacggtctatgacatatatacactgtttgattcgctgcaagatctagagactacttcgaggttgcaggtattacgctagctaaaagatgcaatcttcccaatgtcactttaatgtgtatattcttagtgttcaccatgagttatctatttgtttaacttgcaaatgaatgtgaatgagtccccgctacaattgttagtagatgattcaatttctattctgattactccaatccttggagggagtggctcacagggtacatacccttgttgggcatcacttttctt

SEQ ID NO: 9081 - DNA, 1330 bp, Arabidopsis thaliana landsberg
acatgactcagccacactcgcaatagcttgtatgcaaaactcttcattgataagaaatcacacaatgaaaagagagtacaaaaaggctaagcaaagacaaaactttttttctctaggaacaatctatgttttacattcttggctgcagcttaaaaatttgaaatgaaacaattcacaatgtgtatgtaaggcttgaaaaatagtatatatgaagaattttttttccccacacaagacatggataaagaaatgcctaacagggacatacttgtgttttactagaacacgaagttcatcttacaagttctgtaaactaaccctcacggaatccaccttgaagcaatgaatccgtccctttgcctcaagtggagagagtatgtttataacgatgtagtgtagatcctaaaacatgcgtcgatgattggattttccttcttcaaatgtttgagaggcaccattgttaaacacttacacctctacttccccaattggttaaagaacaatccaattagcctccagtttgttttcaagtcccagactctgaatcctggttaaacccaaacaaccggtcaaccctaacccaacaaaattgatttacagatatttttattcgtttgtataagtttgttttctcactttacaaaattactttttatctataattaatcattgatagtttcaaatcatttttctcatatccaaaattaggtgtgcattgatggtttataaacaaatatttccaaattatctaaatgatttgcttttagatttggatagttaattataattatttagtttaattgaaaaatatttaacactaaaaaaagttttaaacattttttattacttataaattatattgaaaataattatgtgtcacatagatacgaaatgcactaaaatttaatccaaaagacaaaatacactacctatatttggcttattgcaaaacattactccatctatatacttcacctttctcaaaaacatcttatcatcaaaatctcaaacatatattttctaagcacaaaaaaaactacagttagataagagtcttttattatattagaatacatgaaatttacaacattagcattcattttctttgttctatcgttggtggctccaatatatggagggattgttaaagtttcgtggggcgagaagaaagtggcatgcaccgtgacagaattgcaaccatgcctaccatcggtgatagacggaagccaaccatcaactcaatgttgcgaaaaattgaaagaacaaaattcatgtttttgtgattacttgcaaaacccacaatttagtcaatatattacagctgctaaac

SEQ ID NO: 9082 - DNA, 996 bp, Arabidopsis thaliana landsberg
ctttctttttatcatcatgctacatgaagagcagagagcagagttggattggccaaaaagaatggagattgtccgagggattgctcgtggaatcttatatcttcatcaagattcaagactgagaatcatccacagagatctcaaggccagcaatatacttcttgacagtgaaatgatcccaaagatttcagatttcggcatggctagaatctttgggggcaaccaaatggaaggatgcacaagtagggtcgtcggaacattgtgagtgactcttttctgaaacaccacaaaactgtccaaaatcttacaaccttaaactgtttcaatcttgttgcacagcggatatatggcaccggagtatgcaatggagggacagttctccattaaatccgacgtctatagctttggagtattgatgttagagatcataaccggaaagaaaaacagtgctttccacgaggaatcatctaacttagtcggacatgtaagtacataactgaaaattttacacaaaaacagaggaaaaaaaacagaacataagtaaatgtatgtttctccgtcttgtagatttgggatctatgggaaaacggtgaagcaacagagatcatagacaatttaatggaccaagagacttatgatgagagagaagtgatgaagtgcatacaaattgggttgctctgtgtgcaagaaaacgcttcggacagagtagacatgtcctctgttgtcatcatgttgggtcataacgccactaatcttccgaatccaaagcatcctgcgtttacttccgcgagaaggagaggcggtgaaaatggtgcttgtcttaagggacaaaccggtatttttgttaatgacgttaccttcagcgacattcaaggtcgttaaaacaacttccaaatgttttactttttttcgtttaagaagagaagaagactagaggatcagttacaggaattaggaattttattactctgtaagtttgtgtaatgagactggttt

SEQ ID NO: 9083 - DNA, 329 bp, Arabidopsis thaliana landsberg
  unsure (1)..(329): unsure at all n locations
ataacttacaatcccgaccacgtcacccttccgctagacacagctgccggacctttaattttatacacgcggaagtggagagttgatcgaccacgttctccttaccaaggagtccagactgcggacaacaactaaaccaccgacgaaagatagaagaaccgcgactgatgaaaaactcctccaaggcactaccaagatgcagttttactgaggatgtaatctaagaaccgaactcagcatnnnnnnnnnnnnnnnnnggaagatgagaagaccacgctttgcccggccatatgaagcgccgggaacgagcaggccaaggacatgcgcgt

SEQ ID NO: 9084 - DNA, 1925 bp, Arabidopsis thaliana landsberg
gtttcaaactcggagaatgtaatccgctggagcaacttggactgtacatgaaacaagacgacggtgaagaagaagaacccgaggctcctgtggttccaaaacccaatgaaaccagcctcgagagacctgtagacgcatttggaagtttcaacctcaaaggaagtaaccctcttgagcaactcggactgtacatgaaacaagacgatgatgaagaagaacccgaggctcccgctgttccaaacctagccaacgacgtggaagaaggtgaaatcgattgaacaaaagaagtgtataaaatatatacatgtattatatataaaacaatagccagggcaggtacaaacagacgcaagaaatgaaggtcttagcccttcttaagagaagatccaatatgtggctcattgtttaatgagttttggaatggatctctcataagccagtgtggtgtttaattatgtaaaacacaaagcaaacgcttagaagctttttgccacgagacttcatgaagagtcccttagtgtatgattattaaaaaaagttagaaaaaagagtcaaagaccattgtttgtgtaagaatctatttttacatttgttcttgataataattctcttccgtgcagaatcttacctttaacatttcgaaccgattttggacacagccatcgaatgacaataataatgaactacattgaggtttcttttttcattactaccaaatgaaaaaaaaaatgagtactattgaacattgaagaagtgttgtcataacaaaagctgactagtgactataaataagtacaattgaattcgacaagtgttaagtactaaaataagtacaatacaaatacaataattatcaccttttttttactaatttttgtaagcagtttgaatgatagattttctttcttctaaatatacatttaagattttgatgaaatatatagaaaaatatattgtgttacttttaacagtatcattttttattataatcttggtcctaagcaaaactaaatttagttctatagtgtacttggaaccgaactaaaccgaaaacgctgtcgctttaggttttgtttccctcaccaaaccctttcatcgtttatctaaacaaacctcaaccatctccatcaaccatcgtctctatatatgtatcgacgacttcaaaagcttcaagttattctttatcagtaatggaaccaattacttattccaaagatcttccattattcttctcaatcttcatcttcgtttatcttctcggttacttattcattttcaaaaaatggactccggagactcgtcctttagcttccagctgtttaatctccctcctccacggcgtctccgccgtcgtcctcgccacgaacgccttactctccgatcctaaccgtggattctcctccgtcaacacccaatctcaaaactcaattctcgatttcagctccgcttatttcctcgctgatctcgtccaccttgccgtgtttccttctcccgccggcggagactcgcttttcgccgctcatcacctcgccgtgcttttcgttttcctcacctgccgttacatggttgctcacggcgcctgcgctctgctcgcgctgctagtcgtcgcggaggccacgagcgcgtgtcagaacacgtggacgctcgcggatgcgcgtgggaaagacgcgcctctagcggtgagtttgcaccggttcgttacggtgccgttttacgcgtcctatagcgtctgcaggtgcgttctagcgccgttgcttatcgttaagatgacgtggttttacgtcagcggaggcgctgatgacgtcatacccagatgggtttgggtttcgtggaccgttgttattgttactgccgttaccgttagtatcctttggatttggaatttgtgggtactgttttttcaggaaagatattccaaatttacc

SEQ ID NO: 9085 - DNA, 722 bp, Arabidopsis thaliana landsberg
aaaatcaaatcaaaaccatatctaaattaccgtgatccaagtgaaatgaagtgatagtctaaacaaatgatttgaattttaaagagagagcttaataaaatatataaagaattatcaatgtgtttttggatatagatgatataacctctcttgaccggcggtgtcccagatctgagctttgacgagtttgccccgaagagtgatggtccgtgtctgaaactcgacaccaatggttgattttgaatcataacagaactcgttgtgtgtaaaacgtgagaggagctgcgttttcccgacagcagaatctccaatgaccaccaccttgaacacgtaatcgatcttttccggcatcgtcggtttctttacgtgtttgttattctccggcgactcaccgctcatctcttcgttcattattgcgctgatgaagaaaacaactataaagtttaagtctcttttgagtaaagtgggagtgagtgaaacagagaaaagagaagaaaggagaagaaatttggttttatatggttcagtacgaatataccgaattaacaaaaattctgaaccactttagtgagattggttggattcactcataaccattcgcaaccatatttaataaaactaaaactgctacaaaccaaaatttcgtaaatttggtttggtttaagtcgttgaaataacccaaactaaaattaaatattgagtatcctaacctaaaagtgttg

SEQ ID NO: 9086 - DNA, 1411 bp, Arabidopsis thaliana landsberg
ggacagcttaatctagaggttaagcgtccggtatcggaatctccgagagtttctacaaaacgtgaccccgtggtaagacgagacagtcgcagtaataccaacgtggcgatgatggagaagttgtcaagtgtagtggtaataatgctccgattcagagaagctctagcactttacttaagatgagaactaggtcacgtctttcggatccgccaacgcctcagttgccgccgcaaacggcggatatgaagtcgggtcggattccgaaatccgggcagatgaaatcaggtttttttggaaaaagccctaagactcaaggtgaggaagaagaagatgatccatttgcagcagaggatttaccagaagagtataggaaagataaacttagtctatggattgtgttggaatggttgagtttgattttgattatagctgggtttgtttgcactcttgcgataccttccttgcgtaagaagaaactctgggaacttcagctatggaaatgggagtcaatggttttagtgttgatctgtggtaggttagtctcgagctggattgtgaagattgttgtcttctttatcgaaaggaactttcttttgaggaaaagagttttgtatttcgtttatggtgtccgaaaagcggtgcagaattgcttatggttaggacttgttttactggcttggcatttcttgtttgatgagaaagtggctaaagcagcaaacactaaggcgcttcgtgttgtgactaagatctttgtgtgtttgttggttgggttcttgttgtggctcgtgaagacactgttggtcaaagttcttgcttcatcgtttcatatgagcacttacttcgataggattcaagagtctttgtttactcagtatgtgattgagacgctctcgggtcctcctttgattgagatccaaaaaaatgaggaagaggaagagagaatcagtgttgaggttaagaagtttcaaaatccagggggtgttgagattcagtcaggagctcagaaaagtccaatgaagaccgggaaaagcccgtttctctctcatgttctatctaatggaggagggggaggaggagaaaacaaagggattacgatcgatagccttcataagctgaatcctaagaatgtttccgcatggaaaatgaagaggctgatgaatataatccggaatggatcacttaccactttggatgaacagcttcaggatccaagcttggatgatgatataggaaaccaaattagaagtgagtttgaggcaaagctcgctgcaagaaagatctttcataatgttgcttatcccggatcaaagtaatgaaaattccttttttctttttacaaaggcttttcaatagtcttgcatttttagattcctaacccagtttcaattggctttatttttctccattttag

SEQ ID NO: 9087 - DNA, 539 bp, Arabidopsis thaliana landsberg
tgattattttgcacatctttccaaatatgaatgctacaaccacgacttgcgagctcatgaccacgaggaatttggtggaagtgattccaagtatgataagccagataacaagtatgatgatcccaaccacgatattcaccatcttgtgaagcctgtttactgctgttttggtgtcgtttagggtcaatgcaagagctcttctctctctaaaagcattcacctgtgaaaaggttgttgcacattttcatcaatatctgaattcattaaagagtgtaaattcattccaaatttcttaccacccagtttttaagagatgacttgctgatcctgttcgtctcagatgctccttcaaagagacttaaagtcttcaaagcttcgtcatctggcagaaaccgcattatgtcgcttgcatagatgaacctaaatgagacaataagcaattgctactggttagtatctataatgcaatactattgtaaagcccttgtataaagaaaaaagtgattttctctacttcgatcctggcttatcaacattat

SEQ ID NO: 9088 - DNA, 587 bp, Arabidopsis thaliana landsberg
gaggttgttatatactatatagtgtgagaagagaactttacatatgtgttttaaaactgtaggtttttagttaaagggtatgtgcttacctgcttggtgaaaagcaattagtagtgattatatatgatacttgcttgagtgaatagattaggtcatatagaaccaagtttattaggaactaaatcttgcacccttcaatagcatgtgggccaaaatactataactagaggagacttatttgcaagtgctaattgctaatccaaatgtctagtagtttcgtggtgcgaaaccatgagatgttacttaagagccatgagtcatgactgctttattattgcatgcacttggtaattatttatagcgaaaattttctctttgctctatgacatttcttgaattaggtggttgaaaagaatatcgaacctaagattgagaaaacaggcacagaagcttcagcttcttctctgagttcgaagaaggtttgtgtggatgattcaaagaaacaaagcagtggttttggagttttgctgacaaagaggaagtttgaaagtgataacaaggtgaggttgttatatagtgtgagaatt

SEQ ID NO: 9089 - DNA, 1326 bp, Arabidopsis thaliana landsberg
tgcagtgttggatcttgatattctctactatccttgtccaagatggagtccaaatttccgcccgaaggttaaacagatgggcgggaaacaacagtttccgtacatggtttggcattttatcctaatggttttctatttctttttcgttcttcccacgaaaaccattcttagaagtaattgtctttgcccctgaaatgtccttgcttcgagttcaaattcatgatgcgttaatcacaggaatgtggtttaagaatacatctgtaattgctaaatttttgcaatatcaagttcttttttgttcatgaactgcctaaaaccttagaatgccaaattgagcttatattcttatattccctgttaaagctccttctgttaccttaccaccactttcatcggtaagaaatatgattttaatgttctgtatttatgaattatataatgtttctttaatcataggttgatcccaataccggagtgtccatgtatgaatcagatggaatcatcaaatatctatccgagaaatatggttggtttctctgcttatgcctgattctgattgtttttacgagatccttttgtggttatcgcaatagcatcattttttgtcatcatcatttctatttgagtaatactgtttccctctgtttggttaaacttattcaggagatggaacagttcctttaagtctgtcacttggtgctttaacggtcagtttctttgcacatgttgcagtttattttcctttgcttcagaatcaaggagcttaaaactaacattgctgctttgacgttgtaggctataacagcaggctttgcaatgattggtcgtatgggaaaggtaagaacaaattccattacattcttttgacatattttctctacagacaataatgtcaaaagaaaacttcataaagaacaaatgtttctttacggaagagtatgctataataaattgggtaggtagcatagcatcaccgaaactctattatgaatactatgtattgatacaatattggtataagcaacggctttatcacagaatgcttgagcttttaccacgcagggtaacttgtacacaccagcgaaactaccacctaagccactcgaattctgggcatatgaggtgttgatctcatcactttttcccaatcatcaaattacctaatcttatttaacaaataatctctgcttgaatttccctgcagggttctccgctttgtaagcttgtacgcgaagttcttgtagaactggagttaccacacattgagcgcatgtatggcaaccacaaaaagaagactcttagtctcttagaccagttgcaccatct

SEQ ID NO: 9090 - DNA, 926 bp, Arabidopsis thaliana landsberg
tttttggctctccttttggctctgtttttaaacataaagattgaattttctgaaatattttgtctcttgttggtgttcttttaataccaaatcagggttggtggttctggaatggacatgagaagcaaagccagggtaatttttcattctctagataatcttgtgaaaaggtcaacttttgtctatctctatttttggtagtaattctggtttatatatgtagactctacctggaccagtgactgacccttcgcagctaccaaagtggaactatgatggttcaagcacaggacaagctcctggtgaagacagtgaagtcatcttatagttaataatctttctttcttgatctttaaataagtttcttctcattggttttttttttcgattcttgtttactaatcttttgtgtgtttgtatatctttgtttagccctcaagccatattcaaagatcctttccgtagaggaaacaacattcttgtgagtttcttttagttttgaccttttttgttgcagccatgctttattacatccatcttaacttaatggttttgatcaggtcatgtgcgatgcgtacactcccgcgggtgaaccaatcccgactaacaaaagacacgctgcggctaaggtctttagcaaccctgatgttgcagctgaagtgccatggtatggtattgagcaagaatacactttactccagaaagatgtgaagtggcctgttggttggcctattggcggttatcccggccctcaggtgaagaagatggatttataatcggttttgtatcttttctgttgttcgggtttttctgaaatattaggcgaaaatgtattgcagggaccgtactattgcggtattggagcagacaaatcttttggcagagatgttgttgattctcactacaaggcctgtttatacgctgga

SEQ ID NO: 9091 - DNA, 758 bp, Arabidopsis thaliana landsberg
attgctgaagtgccatggttaatccaaattcccctgttctttttatatagctttttcgctttcttgcggtggtcgtagatcgctgattttttttccggttaattaggtatggaatcgaacaagaatacactttgttgcagaaggatgtgaactggcctcttggatggcccattggtggcttccctggccctcaggtacattccgtttttgcggagttttttcgtttgtttactgctctttttcgattctccgttcttggcttctgaattatctcttgcactcttgcagggaccatactactgcagtattggagctgacaaatcttttggaagagacattgttgatgctcactacaaagcctctttgtatgctggaatcaacatcagtgggatcaatggagaagtcatgccgggacaatgggagttccaagtcggcccatcggtcggtatctcagctgctgatgaaatatggatcgctcgttacattttggaggtataatttaaaaccattcacttttcgattcttgttgatctctttaaggaaatataaacttataacacaagttttggtggttttaaaaacagaggatcacagagattgctggtgtggttgtatcttttgacccaaaacctattcctggtgactggaatggagctggtgctcacaccaattacaggtaaaaagaatcatgaatcttttcgcttgttagatcattacaatgtttgtgagaacattcaagaaaatggtgaacgttttta

SEQ ID NO: 9092 - DNA, 2443 bp, Arabidopsis thaliana landsberg
gcagtgtcttcaagtatctttattggttctagcttcatcatcaagaaaaaggtctcaagatagccggtgcaagcggtgtccgagcaggtgaaggagggtatggatacttgaaggagccatggtggtgggctggaatgataacaagtaagtcttatcaaattctgcaaaaatgttttagtgatcattgactaaacatgtgttttgttctcttaatttagtgattgttggggaagtagctaattttgcagcctatgcatttgcaccggctattttggtaacacctttgggagctttaagtattatattcaggtattcttattgttgaaaatggcatcagtatcatatatttagattatagactatggttttcttgaaaacaaagatccatgttttatgcagcgcagtgctcgcgcattttattttgaaagagaaattgcatatgtttgggatacttggttgcattctctgtgttgttgggtctacaactatagtcttacacgcaccacatgaacagaaaatagaatcagtcaagcaaatatggcagcttgctattgaaccaggtatatgctcataattaccgcaaagttatggtgtgccaaatcgattctagtgaagattgatatatatatgaaagttctgtttcatcaggtttccttgtgtattctgctgtgattgtgattgtggtggctatactgatcttctactatgaaccgcgctacgggaagactcatatgatcgtatatgtcggaatctgctccttaatgggttctcttactgtacgtttttcttgagctctctctgccttatgttaactatgtttcatgggaaatttcttcatgctttcttgtgtgtttgtaggttatgagtgtcaaagctgtggcgatcgcgattaaactgacattttcagggacgaatcagtttaaatacttcaacatttggatcttcattttagtagttgcaacttgttgcattttgcagatcaattacttgaacaaggtaaagaaaaaacactagtgaaacctaaccttcatatacattctactgagttcctctctttgaatgtggcaaaaaaggcattggatacattcaacacagcggttatttctccggtttactacgttatgttcacaacattcacaatcatagctagtatgatcatgtacaagggcaaaatcaaatctctatttgctttttcttctttctcaagtaaataaacagtttcttaatatttcctctgctgagtgattacaggattgggcttctcagagtggattaaagattgcaacagagttgtgtggttttgtgacgattttatcaggaacctttctgcttcacaagaccaaagatatgggaaacagtgcaagtggtcgtggttctatctcaatgcctactagagacactcctgtcttcactaattcaggatccggtcggagctccagctctgataaagtagcttcctgatgatctaacggctcagattccttcctgttaggaacctttttttggtttgtttcccacatgaggatgtaatttttacgactaaattgacttaagaaaacaagagtttaattttttctaagtagatgtataataatgatgtgcatataagtaaccgaaccaaatccagattattaattcttgaatttaaagatccatataagtactgtttcttttctaccaattgataccaatcttagttaaatcgaatcgagctaattttttaaataaaatcttggatagaaacattaggaacaattttttatatctcaaagatcatttggagaaaccattgtcttgagataaactttggcgtcacgacaaccacttatgctgtttgaaactgggtaatgaaaccttccattggaacagttatagagagctaaaccggatctaaactccaataaaaccactaaaccgtctgagatccaaagcggtcgaacaaagtcggtcaaaccaggaatgctcaagagtttagaccaagaatatacttctccaaactccttcatcacccaaacatctgcattagctcctttgcaataacacaccatcgaaagacatcctcttaaatctccaagcgtcattgtaaaacatcctctgccacaacaaactggccctggaagctccttgaactcatcgcgtgacatatcatacgatatgatcgtccatgacgatgatgaggaagtggctgcccagtttagtgtcccgttgatgtagattccggatcttgatttgtcagcaacaacaactccagatgggaaacttgtgttgcttctccatagcttttgtctcgttgagtagatctttgtctctatcttcacttggtgtctttgttgcaacaacgcaaccactttatagtcatcttcagattcatcataaccaaacccatacgttacaacacactcatcatcgctcgtttcaagatccgactagacaactttgttga

SEQ ID NO: 9093 - DNA, 506 bp, Arabidopsis thaliana landsberg
ccttcaaatctatatatatttttgtagatcttactaacatgctggtatgatcaatcaattataagaatatcaacaagttgctgtctcagaattatagatgcaaatcaccacacatctatataactacgtttttacgtttttgtttattgaattaatacacaattcttacaaaacaataatttacttgtgatctcttcttcttacgtaaatgaacgtacggttatagaggcttgcgatatcgtaatctccttagacaaaattttgcccctactatggtgtaagtagattctatgggcgtctatcttgtaggatacaactatcaatttctgtattaataccttacacgaattctaacaaacctactttgagtttctcagaaattgattttggagaagaagaaaaattttctatcgttctcttcctctatgttgtaatgtctttatataatgactcaaacgatgctattgacttaagcgatgcttttgacaaccaatcgtatatgtgct

SEQ ID NO: 9094 - DNA, 440 bp, Arabidopsis thaliana landsberg
gaaaaggattatcctaatcccatgcttatcgtgcttaatttgacctctctggcattttaggctcaattttcacagatgaggtttgtcaatatgccacctgcggttggtcctaggatgcaaatgtatccaccaggtggtccaccaatgggtcagcaactcttctatggtcaagggcctcctgctatgattcctcaggtaaagctcaaagctttaagcataaaacatttgagaccaatctttataactttcttctccaactgggtatcgaacagcctggattcggatatcaacaacagcttgtaccgggtatgagacctggtgggtctccaatgccaaacttcttcatgcctatgatgcaacatggccagcaacagcaacagcagcaacagcagcagcagcagcagcgaccctggtggtggtagaagaggagctcttccaca

SEQ ID NO: 9095 - DNA, 941 bp, Arabidopsis thaliana landsberg
gtcggtgtaggagctaagttcgggaggaagaacagctgctggttgtggtggcggcggggctggagaatctgaatcgctagcgacttctcctcgtacacgttgttgctcgtagcaaaggacttgaacaatggtctgaacaggaagacgatcattctgagctgcatgagcgcaggcttctcgtgatagtttttggcagtccattaagctgcacactttcttcctctctacatcactcatattgggatgcgcctgcaagaaaaaaacatagttgttcactagagctctcttaaagttttccaaaatctctaagataatgggaacttgatcatctccttaaccacaagatgccaaatatttaccagcttttgtagcctcatctaaacggattcggtatagagcaaatgaatgtaaatgtttactaacttaatattaccttaaggcagatgtcgacggctcgatacataccatcttcagtaaccctagactgcccggggataaagtcagctaaaccgatgaatttctgcaagctcacatttttataacaagcaatttcagccatataattctccaaaagtttaccaacacgttccatatcaccagcaagatcaacaccattattgcttaagcgaactccttcgacttcaaactcgagataattcatgagaatgcgttgaacagtgtcagtatcaaacatggagtgatctccagtgaatgaataagaaggaatcaagagatcatcgagcacggcttgtcctaattgtaatcccattctgttttccaagtcaagtctacaagcaaccgttgtttcgaggaatattgctgcgcgtagaagcatagagagaaagctaaccgacattgcatttttctctcgaggaagaaggcttacgattgtttcaagaatcactcttttctcgtgttcttgttttggctccatcttcttc

SEQ ID NO: 9096 - DNA, 1135 bp, Arabidopsis thaliana landsberg
tttggttaaacattgaaacaagaacaaattttctataaatagtgaaggcatttgccctaacaggaacgaccgttgagcaatcttttaactaccaaaactaaactaaactaagataagatttatttcgtaattgttaccttccatgacaaacaaaccaaaagacaacagaaacttggccagaaaagttttaagaactcgttcatctccttgattcaatctcttttaaagaaactccaaattttcaaacaacaattcgcttgaatacaaaaggttttacgttccccaagattcaaaaatgtcagaagtgcgaactggattcctaaccatgacaacaataatcttgataagtataggcctcacaatgatgggaacaggtctataccaaaaaacaacaatgtcttcttgcatccgagaaacctcaagccagttcacgttactcggtctgcttcttctgctgattcctcagatcggtctatacggaatctgttgccgctccaaacgccttttcaatttcttcttctacggcatggttgtgctcattatcattgtatcttattattcaatcaaatgttccatttacaacaccacttttggcatagctaagaatcccgccaaggacaaccgtaccgtgccacagttacttggtaggttggtctctaaggagaagttcgagaaagtaacctattgtatcattcacaaacatgactgtaattacaatgccagcaaaaacagcaatgtttgggtaagttttgaatctttttactattaataagagacatgtctatatgaaaatgtgcatgcttatatttaggatatatgtgcagaagtattgctgtgcacaaccggtgggatgtgggaccataacgatgttcgacaagccaggcgagtggagttggaaacatcagtatgaacggaaccaagttccagaagagtgttcttatgagtattgtttagattgcagaggctgccaactaagcatcttaaaagccattgttcatcaatggaaatatctctcaatgtttgcttaccctgctctagtcctttcctgcatcagtcttgctatagcttggtctctcaaggagactatccacgaaaacgaagattatcgaggttcttatagttgatctatgattca

SEQ ID NO: 9097 - DNA, 1126 bp, Arabidopsis thaliana landsberg
tgcgaagaccctccttctctttctcttctctgaacttcaagattcgtgtcggacaaatttttgtttttatttttctgaattacaatggcagacaagattttcactttcttcctaatcttgtcttcgatctctcctctcttatgctcttctttgatctcacctcttaatctctcacttattagacaagcaaatgtccttatctctctaaagcaaagttttgattcctatgatccttctcttgattcatggaacattccaaatttcaactctctatgttcttggactggtgtttcttgtgacaacttgaatcagtctattactcgtctagacctatctaatctcaacatctccggcactatctctccggaaatatctcgtctttcgccgtcacttgtttttcttgacatttcttctaacagtttctccggtgagcttcctaaagagatctatgagctctcaggcctcgaagtgttaaacatctctagcaatgtttttgaaggagagctggagacacgtgggttcagtcaaatgactcagcttgtgactcttgacgcttacgacaacagcttcaacggatcacttcctctgagtctaaccacactcactcgtctcgagcacttagatcttggaggaaactacttcgacggtgagatccctagaagctatggaagtttcttgagtctcaagtttctttctttatctggtaatgatctccgtgggagaatccctaacgagctagcgaacatcacgactttggtacagctttacttaggttactacaacgattaccgcggtgggatacctgcagatttcgggagattgatcaatcttgttcatttggatttagctaattgcagcttgaaaggatcaattcctgcagaattggggaatctcaagaacttggaggttctgtttcttcagaccaatgagcttacaggctctgttcctcgagagttagggaacatgacaagcctcaagactcttgatctctccaacaacttttttgaaggagagattcctctagagctatctggacttcaaaagctttagttgtttaaccttttcttcaacatactacacggcgagatccctgagttcgtatctgagcttcctgatctgcaaatac

SEQ ID NO: 9098 - DNA, 1442 bp, Arabidopsis thaliana landsberg
aaataaaaagaattagcaaattctaatccttaaaactagtttttgcacaattatcattttaaacgtaaacaggacaccatgtatgtgaacgatgaaattaaactacttgtgagtgtgtacctacctacctatttcattttagttcgggtgttagaccaaagccgtagattcatagctcaaggctgtgaggaagagaatgagaattgtttttcttcacggttctcttcccagcaaagcttcaattcttctggaaccatactggtttcttcacacgatctctgtgtcaacaaggatggaattatgttagatttgttactcagattagtgacattaaagaaaagatttgaaattttcactcacagttttgtaagggaagaagggttctacacaggcttgtcttcctcagacgttttggtttcattatcaggctgcttctcttttgcagatgtaaactcaatctcattatctggctgcttctccttttcagatgtaaactcaagctgtcttgatttgattacagctgttcttttagctcttaaccgatatggtggagataaattgaaagcatttccatttaacccgagttcttcatcatcactgcaattatcagttgtctccagcaacaaactttctctcatatctttactttcttcttttcgatcaacttccttaactacaccattaacaacaacaacagcatctgttttcgctgccaaaacaacctttcgccttttcctaaaaatagaaggtgtgtttggaaaagtcctagcagcttctctcaagaaagattcaggacttctcgttgcggttaaaccactgtctttattacagggtgtagtcattaagctgactggtgatgcagcaccgggactgcaagcacattcatatccgtacatatgttgcagatccgcttctgatggaaagtaatagtcaagtggagacttatagtataaattcccatgctttggagttccaaacccgttttcttctttcctctgcattgatctctcaaaataagcttttgagtggattctgacttcctctgaaattggttccagatttggcaactgaggcttgtactcaacaggagagcaagcatactcattgacaccgattcttcgtgaagcagctacttcttcaagcagagcggaagaagagtcaaaatggtctcttccaacttcatttgaatctgtatttcctgaagaggtttgggtaaccgaatcagaatccttgaaaggtttagttgcactagactgcttggaatctctgtctccatcagcaatatctttcagaacgatgaatttgcttgctggcggtggcaagttaccagttgctaagtagaactctaattttttcttcagtgaactattccaatggttctttatggcgttatcagtcctgcaaaaagtacaggtacacatcagaagcaaaaactgtataga

SEQ ID NO: 9099 - DNA, 753 bp, Arabidopsis thaliana landsberg
accatccttaagcgtaatgagtgttaggagtcaagctagagacttaaaacaagctcacttgggaggaagtctcatgcctatccttgtatatagtttttatttttgttacttttgatttgttttggttttgtttttgattctcaggaaatgaataacagctggggcaacaacagggatgcaaccgagtgttcaaataaaacatttcaaatttttgatgaattacactatcgcaagatgagagtaaaagctcgagagtgcgatctagtggttttgggacaacatctttctcaacgacaccactcgatcgcaacatggcaatggtgtgatcaagtggtctcctagtggaattgcccaaaccactcaatcacaaggagaagtgaaaacgcccgacatgacttcaatgacaacccgcctgaagacatgtcatccagccaccatgacattgctccgccaaggcaattcacctataaacatagggaccccaccgttccgcaagttccccgtctcatgagccaatggaaaacaagaggaggaagagtggtagaactgtacattcatcaagcaaaggccggataatgtcgggctggagaacacatgagtgtcatgctctacaacctgctggggttgcgatcgagcttaatgacgaggagatggcggagccacatcaagaaccggccatgcctgcagagtacactcaagcgaatatggatggctacatctctaggtcattctactgaggtaaaacaccaaaac

SEQ ID NO: 9100 - DNA, 1858 bp, Arabidopsis thaliana landsberg
tgtcccagattcgattcctgccattgattccgattcttctctttcggaagaagaaatagttacagagaaagacagaggaatcgtcactttgtctccactgtgtaaacagaggattgattctgcttcgatctcggattgtgttttggtatctgatgacgaaattatagagtctctttatcagaatctgttgagagttattctctcattgcagcagattcaaagtgtagctgttgttcctgagatttggtgttttgatggttgtaaaacaccgcctccttcgtctcggaatctcgattcgaatatggttagtgatacttgtcctggagctcctatgaagctcactaagatatctaggaatattgattctggattaagaagaaaactcttctgagtcttgagtatctgacatggagttaaactgacatgacttgtcgttgtgttgtagtaagctataagagatttaggggttttttaaactcttatggctcttgtgatttgacttttgtttgtacagtcttgttaggctttttatgtgtaattgctagctaaagctagttgttgttgttggagacattcagtttctgttctttctttcttgtctgtaatttatcatgttcatgtttcctaagaacttatgtatggtaaggaatctttagaggtattatctttgttgatatgtcagagctttgttgggtgtgctcctttattgattggtgtttgtagaaggttaccactgaatcaatatctttgctctacaagtgaaactttgttgtgggataaggttgtgcatagatcaggcaaatcggagctatgaagcaaatagtgcagggtttcgtccatttagaccagtctttcgtgtgcatttgggtgatggtggaagccaaaaccgaaactcataaagtactgaagctagaaaatcaatgcttaacatggagttgtaacaaataaatctgtgtttaatatataaaagaactaagtctataggtctatacaaaggacttcagcagtatcaccaagatcttatcaatggagttgttgcataagaagcgcctaactgtgtctaccacacattcaatagaatttcaaagaatagtttatctgaacttttgatctttgcttggtctttcatggaataattgaaattgctttggaagcgtcgagatggttaaaccgacatgttccaagaagatattctgggagctcctcttcggtattcgcctgcacaaagaagaaattgctcactcaaatccaatgcttcaatatgtaaccagaatacccaccgaagttgacttagatttaaaccaggaaagattggtaattagtttacctgtattaagaaggccatttcaatcacgagtttgttgaggtaaccaagaacaagactcacaactcctcttgcaacagttgatgacccaatatcaacgcccagctgaaaataacaggtgtacaaaaaaataagattttctaacaatgcgtggctcaaacgtgaaaagtcacactgttgtggtagatagatactaattcctgttaggatctagcatcaatccttactgtgttacctcaatatagttctttcccctgaagtagttgatctccagggcttgaccaataaggcatgctttctttcccacactttgcttaactatccaagagccctgaaaatatcgccaaaccaaaagtcaggtatgaatgcattggacagacaaataataaaactaaatagaggtaatcttttacgccaaccttggatatgtagggaatgagcttgaaccttgaattcctatatgcgtcatcaccattaacaaagctaacttgcaaagggtgctcttaataggagtgctcattatgtaataaagca

SEQ ID NO: 9101 - DNA, 1619 bp, Arabidopsis thaliana landsberg
cccgtttccgaacccgaactcgtagactatgaagttaacgagtgcgtaacaatcaatggttaaaagtagtacttttatactattgttaaacatcggcattataacattgttgttgtgtatatatatttgtagaaagattaatgcgtctaggaggaatctaggcgtgctctcatgtgggaccggaaatccaattgacgactgttggagatgcgacccgaaatgggagaaaaaccgacaacggttagccgattgcgcgatcgggtttggcaaacacgcaatcggtggtcgtgacggtaaaatctacgtggtgactgactcgagtgacaaagacgtggttaaccctaaacccggaacccttagacacgcggtgatccaagacgagccactatggatcatcttcgcgcgtgacatggtcataaaactaaaagaagagctgattatgaactctttcaagactatagacggccgtggagcgagcgtccacattgctggtggcgcgtgtatcaccgtccagtacgtgaccaacatcatcatccacggtgttaacatccatgactgtaaaagaaaggggaatgcttacgttagagactctccgtcgcattatgggtggaggacagcgtctgacggtgacgccgtctcgatttttggtggctcccacgtgtgggtagaccattgctcgttgtccaactgcgctgacggtctgatagacgccattcatggatcaacggccattactatctctaataactatttgactcaccacaataaagtcatgcttttgggacacagtgattcgtacacgagagacaagaacatgcaagtcaccattgcctttaatcactttggagaaggtcttgttcagagaatgccaaggtaaattaaaaatagagtttagtttgctaaaaaggtcccttaatttttatattaattttaactaagacgctttaaattatttgggaaattggcagatgtagacatggatattttcatgtggtgaataatgattatacacattggcaaatgtatgcaattggtggaagtgcagctccaacgattaacagtcaaggcaataggtttcttgctccaaacgaccatgtctttaaagaggtaattaagaagctaattttctatttttagtcatatgagaaatattcaacttaatctgaccaaaccaactttttgatttgatataatataaaggtgactaaatacgaagatgcaccacgaagcaaatggaagaaatggaattggagatcggaaggtgatttgttcctaaacggtgcgttttttacgccttcgggtggaggagcctcttcaagctatgctaaggcttcgagtttgtcggctagaccgtcctcattggtggcttcagtcacgtccaatgctggtgcactcttttgtagaaaaggatcacgatgttaatccaatccatcttttcaaaattatatatataatccatccaatctaattaattaaaaagataaagaagaggatgcatgttgtccctggtatgtcaatttttcgttaccctttagttttttttttattatggggagggttaaagtagtaagatggattcgatgtgtatactaaagttatgtgggattccaaagggcacg

SEQ ID NO: 9102 - DNA, 1826 bp, Arabidopsis thaliana landsberg
acaaccctctcagctgatgataccgtcgacttgtttacttttgcggtaatgaggttgacctcaaaagctttatcctctgatacgagttcttggtcatatctacgtaaagggcctggttcatctgaaatctcttctagatctaatctggcacccgttggctcaattgattccctacactcaagaaacggtaataacatgcatcatgttattaggccactacaaaatgataagtggacaaaagggaaagatgggtttctaataaccgatatttggggtcttgagactggcggctcccctgattctgccatccctacaatttggcttcagcagacacaagaaagaatgtatctccttgcctatcagcataaaagtctcaccttacttcttctgatgcctacaaatgccattgtcaatggagatttaagcatctcagccgtgaaacagcaagttattgaagatgttagcacatctcccatcgatcttttttgttgaatctcttttctggtgtcttctaatatatacccaatatatcttttcccggcatcactgagaattttgaaaattgaagagaaaatttcaagagggtggggcggtgagaatgcttaccatattaagggttaccgttacttagtagttgataatgacacgaaagtatccagatcttctccttcaggaaaagtaacaacacttgcaaaggtaacgtctttcacactacgatttactagctgaaattattaccaccttggactcaaagtgtatgaacttcgaaaccgcaggagtctctacttgcactaaacaagcttagagaagaagtggattcagaaaaaagccgtgcaaaaggacaggagaaagacatggaaatatgcatcagagctaagaacaatgtgtgggtgatcgcccgtgtgaccagaggcaaagagctttacatggctttggagaaaggcagcgacactcttcttgataccacagacgctgttggaagattcagcaacaggtattgctacttacgaactaaatactctgccttgggaacaagttcatgactgttcttacaaaaacatgtgctgggatttaaacaggtattgcagcggagcattcttgatggactaagttttcgtgttctttcttctggttttgggaagagggttcttctagtttcaagtacgaagtgaaaagctcagaagaagtaatgagcacttctctctcagccattaattttgttttgtgagaaattgcagagaggaaaacgattgtgttcttagttggcctgtagatatgtaacaatgatattccacgttggatcagtgcaaacaaatccttttttgtgcggaggaaagcatctttctcgtgggtcttaatccttggtttggttggatatacccactcctgattactagtactatacaagtgttactctgtatccgtttcaatagaatttgaagtttacaatattcagtacaatgtcacactcaggttaagacatttgtttaggcactacagaatcttaatgaactattgaaagaagttaatgaaaacattataaaaccagtaaagagaacggaggcagcggagaagaacaacggtggccggtggttcatggcggcattacgtttttttggagatgctttccggcctccaccttttccgcctgtaactccacgacctcctttccccgcccggaagatgacgatgctctagcatcctctccaccctatatggctctgaatgaagccctgctgtaagaagaacaaaaacgagaaaatgaagctcaacagctctggtcatataaacaaaagggaatcaacagaaacttaaaacagagcacc

SEQ ID NO: 9103 - DNA, 1510 bp, Arabidopsis thaliana landsberg
tagagcaaaacaagaaatgttgaagaatatggaaaccaaatcatactctttacgtaaattttagcaaccattagatccctaacaagccttcccattttttttccttctggattataaaaagaaaaagaaaagaagcaaggacacgaatcttgagttttgaatgatcttagattggtctttgggaattaaggaccacgtttccttcggaagcataggcaaccctgttgctggtcgttaggaatcatccctcctcccttggttgtgtcaatactctccaacattggtacaacctcatccatctccggtctcttgtccggatttgcatcccaacatcgcttcatcacagctgcaagtgcgctcgggcaacacctcggtatatcgggtctcaggttctgcattgatcatatgtagcagcatattgcatatagattttttacttcagtgaaatgatgaaatggttacactactctagatcacattttttacttcagtgattcctcaagatttacaacaaaatataattgtgaaacaaccaatatgcacatttcaattaaattaacttttctttgcttaatctattcaaccatacctggcggacgacggctgaagtgacctcagagaaagtaaggtcagggtatggcatgtcacagcaatatatctcccataagcagatcccgaaactgtatacatcgcattttcgattatacgggtttccattgagaacctgcagccaaagtttatttgttataaaaagttggtttgttaccaatcttgatgatgcattatcactatagtacctcaggcgccatgtagccaagtgtgccagtctctcctgtcatgtcattagggttagatgcttcaactctcgcaactccaaaatctgcgattttaacagtccgggttttgtctaacaacatattctctgtctttacatctcggtgaacaatcttctgcgaatgaaggtaactcaacctaaaagcaacataacaataaccattagagcagataaacgacttgagaaggcggcgaaagaagggagaatataatgtaccctctagcgagatcaagagcgagctgaacaacaattttaaatgttagttttcttcttctgttcttgatcaggtaagattttaaagcaccacctggaagatattcaacaacaacacaacatatattgtttggcatagctaatggaccactctctgtttgcaactgtaaccctgatgcacccattgttgctcctataaactgcaaaatatacattcattgatgacccaaatcttatttatatcctcaatatataacaatggtaaaaagtaaacagaagtgaaatatgaaccttggtgacattaggatgatccaatttatgccaaacagcaacctcctgagcaaaatcagctctcaaagacacaatctcagcttctgatctatgaccttctttaccccaatcaagcaacttcactgctcactttcaccacaatgattagctcattcttcactttaaatttat

SEQ ID NO: 9104 - DNA, 1377 bp, Arabidopsis thaliana landsberg
  unsure (1)..(1377): unsure at all n locations
cctggacgcccaaaccatgacaaagtgtctaaatcttttggtttaacttatttagttgatgccatttgcttttggaattatcatagatcatcttaactttctggtagatcttatcttatgatttccttgtagcatacaaaactaatcccagatacaatctttaactgcagaattcactgctcaagaatctgatcctcgtgaagttcatgttaaccaactgtcttctacaacttcaggcaccttaagcagttcaactactgtgcagggattaaataagcatcccgagcaacacatgcagcttccatcaagttcttttcatatggataccaaatctggaagtcttaatccatacccagggacaaatgtcacttctcctggttcatcatcgagagcaaagctccctgatttccagcacagggaaaacaatcagaatgtgggaacagccagtgttggaggaccaaccaagtctacaataaacatgacgacagtacccaagtttgagaggccaacttctgtaaatggtccaagtagggttcaggatggccctatatccgacttccaaaagaactcatccttgcctttatattctgctccttggaaaggatcagtcactaaggaccatacagtgggaccttcttcatcagtgatccatgtggagcataaattgattgatcaaagttttgaacaggcacataagcctcgttatttggtgcagcaaggcgtgactaatgttccactgaaacagaggaatgctattccaattagttcaaatgatgacttggagaagcagtcttctaaaatgggtttattcacatcaaccacttctgccagctctgtttttccttcaatgacaacacagatggactctagcacgatggtaacttataaattatactttcaaaagacagatttcaatttggttgatcttctctttaagctcatagggagaccatttcccttcaaccgatgttgcatttggtttcgctttgcttatattttggaccaccctggcttctgtttctccttgtactggcttcgaactttggttgtgaagagtaaatggactatctatcttacgtgaaaattatttgtgtacacttcacgttaatatgcctgccccatctgagaccattccnnnnnnnnnnnnnnnnnnnnnnnnacccaaaatgccttctgttggtcagaagaaacctcttgaggcactaggttcttcgctgccaccatcaaagtaatgagctggctgcgttgtgaaagatgaactacttacagcgtccaaaaatttctcttccttttttctttgcttttctaataatatacctcttaccctactagcaatttagaattgctaaattgaaggcttatgtatgtgttaatata

SEQ ID NO: 9105 - DNA, 607 bp, Arabidopsis thaliana landsberg
gagtaagagatctatgataattgcaaagtaaatggcatcaactaaataagttatttcagcagtattagacactttgtcatggtttgggcgtccaggtactttgatccccatatttccctggttacacatacagttcattctgaaaccagtaagccacaattccaagacaagaagtattcagcttatactattaaagtgagaattctttatgttatttcctttttaataaggttcagaagtgagatttctttctcagcacatgttcatatacagagaaggaagcatataaaacaagaaactctcttggaggctgctaaatgaaaatcattaaagtacttataaatgctaagaaaatggaaagggtaataccggttttaactgaggcagttggctaattaccgatctgattatctgatcacctacaagatctctcagttgtcgcatgaactcttccattgtaagttcttttctctgcaatcaagtatgaaaagaaacgtaatgtattaagaaacttcgatcagagtgccaattcattcatggatgtaaactgtaaaaccacaccttgagtttataatgcaggttaagacaatgcgtcttttgccgggtt

SEQ ID NO: 9106 - DNA, 888 bp, Arabidopsis thaliana landsberg
cggccctttctcatagatgagcccgaaactagtgattagtagtcactagttgaagaattttttatctttcttttattgttactcaaactagtgctccatagttggcaactgctttcattgtcaagaaaaaaagtagacctcatttaaaagttttcatcaaggtcattctacaagagtcctactactaaaaagatccaattatcgagtccctggcgtgtgtttggcgattatgactttgatgaaagggtgtgaagaggtaactcatctcatatttgtatagctattttttgctggtgcagaacaacactgcacaatcaacactctgacattttaacatgatgtaggtcattgtgaatgatgaatgatccattctcttggcatgccgagttgaggatgttatattttcaactccccgcctatttatctttgaaacctattgcaaaattcaccaaaggtttgacatggggtaagttcccacgtatttggttgtatatgtgtccacatagctcaaggcttgatgccaagattggaagtgtaatcatggagcctactcagcccaacgtgtaagaagaatacatcttaaaaaaatctataacatcattcttatcctagtccttgatgtttgaaatttatacaatctaatctcgtttcggctttatgcaggcctgagcagttgacaaaccacaacaaaggcttacttgtaacacacacaagcgcaagaaactcgctaatcaatttttgttgttgctgtggattcctttccttggtaaaactcagctttgcttaactcgaatcattttcttgtttttgctctgaaaatttaccttttacttttattatggaggtgttctatctgaaagggttagatccacacgttggaacattcac

SEQ ID NO: 9107 - DNA, 910 bp, Arabidopsis thaliana landsberg
ttcacttacacgttgggctgagtaggctccatgattacagttcctgactcagaatcaatcttggcatcaagctttgaggtgcggattaggttcacaatccatctctcggcctcctcatagttcagattcaatttttcagcaagtaccctgacaagggaaatataggctcgacatgagtacaaagttaaaccacaagaccgcaacaattcttctcaacttaaatagctggatatggcaattttcatgtgttgggaaagataaggaatagagaaaattccaaacattgagcaatccggagagcagagttatgtgtaaacatatacaaccaaatgtgagaacttaccccatgtcaatcctttgatgaattttgcaataggtttcaaagacgaataggcgggcattttcaagaaattcatctctcagtggtacagttgaaaagtttccatcctcaactcgcttgccaaggaatggatcattcacaatgacctacatcatgttaaaatgtcagagtattgattgcacagttctgcacaaacaaaaatatctatacatgtggatgagttacctcttcacactctttcatcttcttttgagccccatcaaagtcataattgacaaacacacatgccaggaactcgataattggatctttgtaggagtagtgctcttgctgaatgaccttaatgaattctttcaattgtggtcttctccttttgttgacaatgaaagcagttgccaagtagcgcagcaagtgtggagcactagtttggatggcattcagatacctgaaaaaggtaatcaaattagtatacagaactgcagcatgaaaacaaagtgaattatttttcagcaaatgcccatacacaaagcacaaatcttaagaaataggtcgggatgaaaagaaaggaga

SEQ ID NO: 9108 - DNA, 1303 bp, Arabidopsis thaliana landsberg
caaagaatattaaaaagccaccgaaaaaaaagtgatccatgacttccggaatggtgcatgccgtaatctcgtgtgtactggtatgccttagtgttatcatgctgctattgcaggagcacaatgaatcaaatactaaattatctacctcttagaccccaatagtggctttagttgaggctttagagggacaacttatactggttttaatattttgactttgcgaaatcagctatgtcctctacctgaatagtttatgatttaatgatggttgctgcagacttgttcacacgtggtattgacattcaagccgtcaatgtggtgataaactttgatttcccaaagaatgctgaaacttatctccatagggtaagctaaaaaccaaatgtccacatgatactagattcctacatgttgattgatggtaattgattttaatatctggtctctgttcaggttggacgatcaggaaggtttggccatcttggtctagctgtgaatcttatcacctatgaagatcgatttaacctgtatgtatttttctcttgactggtttgtactattgttttctacagcatagaataacctttgtgttacatttttgtagttaccggattgagcaagagcttggaacggagatcaagcaaattcctccacatatcgatcaggcaatttattgccaataaccaagggtaaaccaccttggtctgctgttaggtgaatcagtaataagtggtacgtagtatctacttatggacaggcttgaattgttcctactttcggagtcacttacttcatgtaacctcaagattctctaggataatttgttttaatgtatacacaatacagagtcttgttggaaagatcaaagatggaatttcaactatcgtaatcataacaccacattacataattcaaggcatacattaagttacatatttcgaggacataagttcatatggttgatgcatataggcctattcattgttcttttgccacttacgctagaaaaattcttttgatttgggtttgcttcctcatttaagaggcccctaatatattatttggatttgtgcaatgtttcaggttggttgaagccatggttagacagttgtcttatctagccatgcaggacaaggacaacccaaaaaggcttcacattctgcctcttacctccataatgtttttttctgcgtctttgggattcctttatttttaaagattaactatagtcaaggctaaaaggtaagaaataccgggtagtattacaaaagtgaagtcttttatatagttttgcaagtagttt

SEQ ID NO: 9109 - DNA, 1463 bp, Arabidopsis thaliana landsberg
  unsure (1)..(1463): unsure at all n locations
tcgaaattaggacttatagggaaagatgtcaagtgagcgtcatggctctcatttgggaaattaggaattgagtaggagtgaagctaaaggcatgtttggatgtgttgcttccatctttttgcccaatttaataaagatgtggttagggaggttatgacttatgattgggttttgtctattgattagaacctctaaacgtgaaatgcacattgttattcattaggtcattgtttttagaaggcttccttgtagttgtattatttcaatcaataatttagaatttcatgttgaatattggaccaaaaataactggtgttgttgatcacaccatatatacaatctacttacttagtatatttatttattcaactaatgagttgtttacacacatgaatctcttcaactgaaaacatcttatttattcaactaaatgtataacatatcaaatttaagtatttaactgttgaataaatttacttgattaaattctagttattatattcgtatatacctagaagactagaccatatatagagcaacttacaaagttgcaatgacatggaagttcaaaagaaactgttaatttgatgaggagggttaatcaactgattcaaatcgctaatcaatcatcattcctcaaaagtcgtttagtgtgaggaacatatggttaaggaatcgttgttatcttcgccatcgacatcagattaaacaacagaaaacaaaaatatcgaatttatcaatgggcacatgaaaacgaaataaacaggcaccaactaaatacaatagttggtgttgcttgtaaaatcaacaatagttcctgttagttatttttagtagataaattggtaaagcaattattaaaggcaaacacaaatcatttaagtgattaataatgcaactaattaataatgcatatatagtggggagtgttgcaacatactttccgtcattaaatcagatattatgttatagtatgaagaaaaaggggttaactgaggaaaaagaaagtggagatgcggggtatcgatccccgtacctctcgcatgctaagcgagcgctctaccatctgagctacatccccaacgatgttcaagcattcaaatgattaaattagtctacgtacaatcaaaagttatttctgtttgtgtctgggctagtaatgggctttcgaatacgtttcgagattgatgtattagcatctccgtacaaaccaataagttagtagtttactcatttgcctacaacatagaaacttgcctatattcttgaggttttggacaaaacaattcgatctatattattacgtaaattataatgagttttggttttaaaaacaaattttaaagggtttatatttcttatttttatatacaaaaaatagaagtgaaatgatttggagagatatgcttagatagaagaaagaaacagannatgctaatatttgtcgagagttgatagggaat

SEQ ID NO: 9110 - DNA, 1693 bp, Arabidopsis thaliana landsberg
aaaaaaaaaacagttggttgggaaatgggtaacaaaaattgtctttcccatttcctttggaattcccttttttatggttttgggaggggtcctttttttctttaaaattgtttggtgtacgtaagcgagtctaattactggtcctgattataataagtgagagagaaacagaaaaaggccgacgggcgaaaaaggaaaagctcaaaaccctaaaactgaaagtccaattcgatttgcttagcgtttcggtgaaatcagagcccattacacacgcgtttcagagtcttcttcctttgtgtgtgtgagtttcaactttctctcttctttgttttcgtgtttattctctggagattttgtgttctgcgatgtgtcttctctttagtcggatctctttgttccctggtctcttcttccttcgtttcttcgtttgctctcatgagtattatcgatattgtgtcaaagcaaacgtttgatgtataattgattcgacgttgctttctctgttttcaggactatggacactaatccttcagagctggttgataccgacgttgtttgtgatacacgaccccccatgcactgcacaaatcctttgcctacatgtctgaaaataagtgttcaggaactagccaccttaagcgtcacatttacttgggtatttgtgcgaagatcccagattacaataagctctcgcaaatcaaggaggaaaccacctcattccttcctaagaaatgtcagatattgcaaaccaaggatgaaaaacccacttcttgccttcccaagaaacgtcaaatgtcttctgctgatgtccctctagatcaagatcgctgtaaccttgagatggcaaagatgatcattatgcatgattaccctcttgatatggtcgagcatcctggttttgttggttttctgcaggctcttcgtccccgcttcagtgtctctagcttcgacaccattcatgctgattgtctcgctatgtttctatcccaaaagcagaaaattttggacattattggagagattcctgggggagttaatcttacagtagacttgtggtcatcaaagcaatcagtggcttacgcttttgtggcaggacactttgttgataaagactggaatttgactcaccgccttctaaatggttgtggtgtggcttctcctgattctgattttgcgttaaaccagcctataacagcttgcttatcgggctggggcttggagggaaagatttcgagcatcgctgtcagccaatcattagtaaataaaacctccatcgacaatctcagaggtttcttgtctttcaggaaccagcatgtgttgaatggtcagttgttgatggggagatgctatgctcgcatcttaagcagtatgacgcaagatgcactcacagctgagcggcttcaagaacccataaagaaagtccgagatagcatcaagtatatccaaaccaacgaggcttgcggagacagatttgatgaactgaagagacggtttccatccccttcgctttacaaagatcttcttattgacaaccaaacgagatgggacacaagttacaatatgttgttggctgcctgtgaacacagacaagtgttttctaatttggaaacctgccatcctgactacaaaatatcattatctcctgaggaatggaaaaagattgagagtctttgctcatgcttgaatgtacttg

SEQ ID NO: 9111 - DNA, 1109 bp, Arabidopsis thaliana landsberg
ccgcgtatctaaagattcgcatgggaccatgtctagtagtctagtaccatataaacctttttttgcttactcgtcagtagtttcttttgaaatcttcacaacactttcaacacttctcagtgaccgtgagcaacgaattattttcagttcaacgactccgcggaaatggacaattcagaaaatgttccctcttacgatcaaaacatcaatttcactcctaatttgacgagagatcaagaacatgtgatcatggtctctgctttgcaacaagtaatatccaacgtcggaggtgacacgaactcgaatgcatgggaagctgatcttccacctttgaacgctggcccttgtcctctttgtagtgtcaccggctgctacggttgcgtcttcccacgacacgaggcgataattaagaaggagaagaagcacaaaggagtgaggaaaaaaccatcaggtaagttctattctaatacaagctttgagtttttctagtactagctagttttagttcatgtattttcatatataagccacgagcccatgaggtaaactatgttccaatacgttagcatgcagttgatgtactttcataaaccatcaggtaaatgggcggcggagatatgggatccgagtttgaaagtaaggagatggcttggaacgtttccaacagcggagatggcggctaaggcttacaacgatgcggcggctgagtttgtcggaagaagaccagcaagacgtggcacaaagaacggagaggaagcatctaccaagaagacgacggtgaaaaattaacggagaaggagcacgtatagaaaggcaggaagaggcatcttacttgcttcacaagtaaatcagaatttttttgaaaagtaaaaacgttattttgtttggtaataaaataaagtaaaacaaaatattgctaacgcaagacttatcaagttcagtcgtgactgtgagtgtgtttttgtgtatcttacttcattttttgtctttcaattgtgtggtttttttttttttttttataatctatttggtttgggtttattgtgaccaatgacaagaaaagtctatattttatagttagacgttttatatatatcatgagataatat

SEQ ID NO: 9112 - DNA, 450 bp, Arabidopsis thaliana landsberg
  unsure (1)..(450): unsure at all n locations
ccacaaccttcttcttcgtacttgacaagagatcaagagcacgagatcatggtctctgctctgcgacaagtgatatctaactccggagctgacgacgcgtcatcatcaaacttgatcatcacaagcgttccgcctccagacgctggcccttgtcctctctgtggcgtcgccggttgctacggctgcacattacaacggccgcaccgagaggtaaagaaggagaagaaatacaaaggagtaaggaaaaaaccatcgggtaaatgggcggcggagatatgggatccgagatcgaaatcaagaggtggcttggaacgtttttacggcggagatggcggcacaatcttacaatgatgcggcggctgggtatcgagcaagacgtggtaaaacaaacggagaaggaattaaacggcggcggagatgactgagaaggacatggtncgtgatcataca

SEQ ID NO: 9113 - DNA, 2519 bp, Arabidopsis thaliana landsberg
  unsure (1)..(2519): unsure at all n locations
cggccggacttatcgtcaagcgggggggtcggcggtcattatcgtcaagtgatagtaccatggaagagggacgggctgcgattcaagcagctattgctcattgcaagaactcaagcgccgttgatcgtgatgataaggttaaggattcttgatttggttttttcttttgtccttaatctggtgttctttcttgtcggaaagataaaaagaaaaaacaaaagtgttagtgtgtgacgtggattttaagaattacagtagaggtaattatttatttcgtgtatagaaaaaaggagttattgttcctatactatgtgtccccataattcatttataataatgaaaaagagatttattttaaagaaaaatgtgacaactttgttagaataatagatcgataacaacaagtccaggctggggtttattgtttgtttccacaaattggggatgaccaaaaaccgagaaagtgagaagagtttcattttgaaaagcaaaaaaagagatgggttttgagatcggccctcttcgtttacttgtctctgacataaccaatgctagaacaaacccattttgtggtggagactagtataatgacacaagagattgtctttgcttctatgttgttttctttttttgttcaatggaaccaataaatccaaagttatacatttttgtaaaccttaaatcttttcattttcaatgaaataattacatttttgacaaagaaaatgacacggaagatttgaccacgtatatgtcggtttttacactaaccactaatcattagcctgcaaaagaagtattgcattaaaaggatattgaacaaataaagtgttacaatattaacttcaacaataggacatgcaaagttactgaaaacgtttatagattcaagaaggcaactctcccctaatccttgctttgttttaatttgttctttcaaaattcttgcttcatgttcttcacaacgtcaacaacctttcgaagtctataatgaacaatatctgcaacatgtcttacagcaaattctacgtttctaactctcagagaagatgtaggcttctattacgaggttttaacttttaaggacggacctcgtataaattgctcgtggtaacaacgatgaggaccccagttattcggtcatgtggcaaccacgtgaacttccgggattcgtgaactcgaaatcggtgtttccactctcgacttagccttgtttgcttagttatgtagtgtactttgatctacttctagaattttctgtaacttttgtcacaaactcaaaatgggtactcgccccgtgtccaactctactagttagaaacgagaatttcggttgattcgcacacgggcaagatcccttgacacgcccaatggaagcgccactactcggttgaatgttgatgtcgttgcatgaacggtataagtacatatcttgttttattaggctagttttggaaaggtagaacaaaccccaaaagtttgcaattattaaagttcttacgtagggcaggtcgatcctcttatagaaaacgtcacactatcatttgggttgttaacatggatcacaagttgcagcattatgatactttatagtagcgttttaccaattttagaggcggcttcacaccagagtaaatgacttctgacacaaaaagcatggtcacatcacatcattgacctaactgaccacaactcgtgcacatgaagatggggtcatgcgccgacattcattgtcgtgaactaacattctccgaaatataaaagaaaaatatcgttgtttaatgggcaaaccagagttgtaaaagtcatcacctcactttctctccaagtcatcacctcactttctttccatgcattggagtgcacggtattgttctgaaccactatttggtaaaaagtgtttaacgttgggtaaggacttgggcgcaaaagtgtatcaacggtttctttggtggaaaattgttttaactagtggtctgcttttgactgtggcactgacaattgatttgttttaagaggtgtgttatatacaataaccgtaaacagaggtacatgaatgctattctacaaaatctaaagtgaatagttacgtatataatcattaatcagatacaatatctttcggaataaccggattgccatgcaagcttgaaaaatgctgtttctatggtttatgaaattctgatgagcaataagagaaagtatcctaagtcgtgcgttcttttaaggatgttaagtttttgatcgtacacgttaagcatcaaaacactcgatcgaagtacnnnnnnnnnnnnnnnnnnnnnncggatacgaaaaggctgccgactattcttaaatcattttatgtgcatataatttagagaaaaaaagctcctctgatattatgctcccaattctgattttatggggtttggattattagtacccatttttagataaattatgagtgccgataaagtatactcttgacagggacagtgaaaaaaagaagaacaagggtgaaaaatgttcaaatggtc

SEQ ID NO: 9114 - DNA, 421 bp, Arabidopsis thaliana landsberg
agcatcaaaacactcgatcgaagtacatagtcactcgacgtttattttcggatacgaaaaggctgccgactatgcttaaatcattttatgtgcatataatttagagaaaaaaagctcctctgatattatgctcccaattctgattttatggggtttggattattagtacccatttttagataatttatgagtgccgataaaggatactctgatcagggacagtgaaaaaaagaagaacaagggtgaaaaatgctcaaatggttcacgtttggtcgaaggagagaaacttgggcttggtcatcacatctggggctcggaacttgtctggaaaagtatttcagagatgtttttatcagaaccatgaccaaagattgagaatgtgagagtcgttacacggccatacctcgagatatcgtttaaa

SEQ ID NO: 9115 - DNA, 1563 bp, Arabidopsis thaliana landsberg
tcgaagtaaatgtacattcattatgacaagtttttccactaaaaaaacgcgtgtaaacatatgacgtgtccatcttttgagtaattgttgatatttggttgagttaacttaagtaagctcctcttgtcatgtcctgtcttgtcctgagcgagattctaatagaagctttggtaatttctctttctcttcaactccagctcatcttgatccgtgtacatccttgctttttttaataactttgcctgatgtcttgaatctctggtttttctttgtagttaccttctgattttggcatttctgaagtcagattagctccagattatatcaatggagttctgtggatgcttgtcagagctcatgaatggagaatccagttcaaagaggaacggaccaagcactttaccggttaaagaggtcaggacagatatgcggtctaaatactcatctgacctaagttcttacacatccgcttgtaaaaaagactccaacctcaaatcctttgattcttcgcttcaccaacgaaccaacataatcatcacctcgctcgctgctcgagccgagactcaatctttaaacctagactcactcatggaggtttacggatttctgcttgaactaaaccaaaatgcagtaagagtcattattgaaagcagagaagatgtctggaagaacaaagatcttaagtctttggttgatgtctacttcaaaagtacttccaagtccttagatttctgcaataccgtcgagaattgtgtcaagagaacagaaatcagccaacttatcattcggttcgcggtgaaacagttcgaggcagagtcagtggacacggatcttggaggagataagaagaagaagaagtatacgaaaaccttggaggagctgaataaatttaaagctatgggagacccttttgatggtgaattggtgactcagttcgactcggtctatgatcagcaggttttgtttcttgaggagttgcgtaagcagagaagaaagcttgataagaagcagaggaatgtaaaaacattgaggacggtgtctaacgtgtttttcgctactgcgtatgtctctgttcttgtcttatctgtggttgcaaccacaatgagcgcaccgccagtggtgtgtgcggttgcctctggatcgaccgcaccgattgagataacaggaaaatggtttagccagatgtggaaaaagtacgagaaagctgtgaagagacagagaggattggttttgacgatggagagtagagtgcaagttaacaatgaagcgatgaagaatataagatcggatgttgatgaactgagaagttgggtttcgtcgattctggagactgtggactttgctgtggagagagaagaagaagaggaggcgatgggacttgcgatgcaaggaatcaagaagcatgtagatgggtttactgagaaaatggaagaagttggtgaaaatgcggctaagtgtagcaaattcattgctttgggaagacttcttgttctggaacacatccttgggttacctgctaattgagtttttgtttaaaaggtctatattatcattaatggtggc

SEQ ID NO: 9116 - DNA, 556 bp, Arabidopsis thaliana landsberg
  unsure (1)..(556): unsure at all n locations
ggagaacaaccgngggcatcttatcactggtgactctgnggatgcgctttttgagaatcgagccccccgcaanactccaaggccagccataagatatgatacagnngactgacgccagaccctaagcngcagaccacatcatttcttctgaaagatagacgccgaagaaaagataagctgttactaccactcattatctttggcatctcatctattgaagttccatcaagtagtaaaacacggaaattttccatggtgtcttcaagatttggaaaactcttgagatttaaacagccagagagaatcagttcttgaagagctttaagttttccaatacactctggaataatctccagccttctgcactctttcagattcaataagataagtctctgaagcttcaccaagtctgtcgggagatccttaattgcagctccatctaaatacagggattctatattntctgaaattagccgaaattcacgaaggttcaaaccgccactcatgataagagttgtcaatgnnnnnnnnnnnnnnnnnnnnnnnnnnnnaagac

SEQ ID NO: 9117 - DNA, 1290 bp, Arabidopsis thaliana landsberg
aagccttgaatgtatatatattttcagggcttcacacatccagtgaaagctcattttttggaggatgttctggaaataacgggatataagctgacctctttttaaacaagttgatgattatggccaagaaaagacgtggaaaacgcaaaaacagttaatgcctcgcaaaagaaaaaaccagatcactactcttgttgaggtacttggctaattttttacatcaactggaaattccttagaattaactctaatttgcaagtttaactaactgtgtttctgttggtcaactaggtttgctgagcagaccaaatattccaataacattgttcaccattgtttctttaaaattgcaggaagctctcagcaagtcaaattttgaaagctataactctaggacacgtgattctctttcgtcttggatgcctgactgcataggatttaatctcattgaggctgttctctgtcacatatgccgaaaagaacgtccaggtgctgtattagtatttttgacaggatgggatgatatcagatccctgagcgaccaaattaaagcccatcctctcttgggagatccgaacagggttttgctattaatgtgccacggttcaatggcaactgctgagcaggttgatttatatcctcacgtgttactttgtttcctttcaatttgagtcacgactctggagaagtactaattgtaacttatttaacatatttcgttgatgtttacgcagagactcatttttgagagagcacctcctaatattcgcaaaattgttcttgctacaaacatggcagaagctagtattacaataaacgatgtagtgtttgtggttgactgtggaaaagcaaaagagaccacctatgatgctttgaacaatacaccttgtctgctaccttcttggatatctcaagcttctgcgcgacaggtgaatacattatactaaaacctattgttgtaaatagatctttcttgtgttttgcatcgttcttatttttgatttcagaacattgactcctctatatgatttgattgcatgattatcattgttgcaatttcagaacatccattttgctatctggtacatcttttgatagctataaagctttctcatttggtatgtccaacatttcccctctatttggccttcagagaaggggaagagctgggcgtctgtttccgggagaatgctatcacctgtaccccaaatgcgtctatgatgcttttgcagagtatcaactttctgaacttctgagaactcctttaaactctctctgcctgcaaattaa

SEQ ID NO: 9118 - DNA, 1310 bp, Arabidopsis thaliana landsberg
tgaaattttagttaaaagttaaaactcaaaccagagaaaaatcacaattgagataggctgataatttattaactataaattgtttgactactatattgaatcagcaactagaatcttttcattttattattatctcaaaaaattgcttttttttttggtgaaccacagggagaatctccctttatttattgaaagttacaaaaaattaaatacaaatctgtcgaggaaacgcagttcctcgagtcgtccaacaaaatcgaagttcctcgagtcgtccaacaaaatcgaagcaacacaactaggagtgacctctagtaaatgaaaacccaactgtaaagtaaaagcatagttaactaactcatcaccaagacggttaccttccttatacacatgagaaatgaagacattccagtcccttgaaatgaagtcatggcacaaacgtaccatgtaggacagcggatgcgaatcactaatccctgtctttagaatacccaccaccatctctaaatctatctccaactctacatgtggtgctcgtctctcccaagctaaatagagtgcatagtaagctccccacagctccgccatcggagcggagcaaatgcctatatgaaatgcaaaacccactatccagcttcctgactcgtctcgtatcacgcccccggctgcagctttacccgggttctcctgtgacgccctgtcagagttaattttcagctacccactccccggaaacacccacttaatcaagctctccacccttgtggtacccgattgtgcatctctgagccccgcataggaatccagcacttccttggcaagatccttcagaaacttaactctatcccgacatctaccattgccgccaaaaacattcccacatctccacttccagccccaccatagagccatacagaaaaattgcttttgtgattgctctcttaccatcaaaataatgcattttggaaagcattatgtttgctttgaagtagaagtgaacgaagacttgactaaatggcgaggaagaaaaatctataatcattctttttttcttttttttgaatctaaaatcattcatacttatctcccatttaatattccgatcgtaaaccaaaaaaaatgatattgaaatttgcttcatatgatatgatataattaaggacagacacaaatgaacatatttttcattttaaagatttcagattcttggcatgatactgtgttacacattatttaataactaatcgttcattccttatttaggtttttttatttatcacatatataaaaataaatctaggattatattt

SEQ ID NO: 9119 - DNA, 801 bp, Arabidopsis thaliana landsberg
tttatttgtttagttttcagttaatcgttatttcaaggcaatttctcagttaattataactttaaagaaaatgatttacaactaatattttaaccaattatataagctcaaacgatttacataaaactttagtttggtgaattagttttgcgttagtttcacatttctacacttcaaatttcgccactaaaagtttcagaaatatattttcatgtttacagccatttttgatagccggaaacaacccacaagggcaggaatggctacaaggccgaaagcaacagaagcaaaacaacatcttcaatggcttcgcacctgacatcttggctcaagccttcaagatcaatgtcgagacggctcagcagctccagaaccagcaagataaccgtggcaacatcgtcaaggtcaacggacctttcggcgtcattaggccacccttgagacgcggcgaaggcggccaacaaccacatgaaatagctaatggtttagaggagactttgtgcaccatgcgatgcactgaaaacctcgatgacccgtcggatgctgacgtgtacaagccatcactcggatacattagcacacttaacagctacaatcttcctatcctcagacttctccgccttagcgctcttcgtggctccatccgtaaagtaagctcaacaaatctttagaaaattaattttatgtgacatatgcaataatttgatttggcaagataaactaatagattttgcgatttggagttttaaactctaaataatctaaatcgttttcaattggtttaaatatatatcttgcatt

SEQ ID NO: 9120 - DNA, 983 bp, Arabidopsis thaliana landsberg
gcgaacaacatcaccggcggtattccagattcaatctctcgctgttcaactttaatctttgtcgatctcagccgtaaccgaatcaacggggaaatccctaaagggatcaacaacgtgaaaaacttaggaactctaaatatctccggtaatcaattaaccggttcaatccctaccggaatcggaaacatgacgagtttaacaactctcgatctctctttcaacgatctctccggtagagtaccactcggtggtcaattcttggtgttcaacgaaacttccttcgccggaaacacttacctctgtctccctcaccgtgtctcttgtccaacacggccaggacaaacctccgatcacaatcacacggcgttgttctcaccgtcaaggatcgtaatcacggttatcgcagcgatcaccggtttgatcctaatcagtgtagcgattcgtcagatgaataagaagaagaaccagaaatctctcgcctggaaactaaccgccttccagaaactagatttcaaatctgaagacgttctcgagtgtcttaaagaagagaacataatcggtaaaggcggagctggaattgtctaccgtggatcaatgccaaacaacgtagacgtcgcgattaaacgactcgttggccgtgggaccgggaggagcgatcatggattcacggcggagattcaaactttggggagaatccgccaccgtcacatagtgagacttcttggttacgtagcgaacaaggatacgaatctccttctttatgagtacatgcctaatggaagccttggagagcttttgcatggatctaaaggtggtcatcttcaatgggagacgagacatagagtagccgtggaagctgcaaagggcttgtgttatcttcaccatgattgttcaccattgatcttgcatagagatgttaagtccaataacattcttttggactctgattttgaagcccatgttgctgattttgggcttctgta

SEQ ID NO: 9121 - DNA, 1465 bp, Arabidopsis thaliana landsberg
gtccatgtatgttacaggttttgcatgcagaagtgccttcctttatcggggacaccaatgttgttaagctttcttggaaagaagccacaaagccattagcctatacaagaactttgttagtattgttagttttgcaggtttcttatcatgcttcccaaatatgataaaatgcttatcatggctcatcttcttttctgatttttggtttctcagatatacagacctaatgtatggcatacccccggatattgatgcgtttcataattttatggacaaactctcagaagacttgctgaataaactagatatggagggaatgtgcgaattagaagatgatcaggttcaagcacttgtgggttcatcaggacttaaacaagcacaagacacgttaccagaaagtaggattttcttacatgaaaatccaaaagtaccttgtctcttttggaggatacgagaatcggtaatattctatataataaccatctacttattaccttttaagaaattattaagatttacttttttgtttttgttgtagacattattaaaattggtgacgtccaagtcatggaagaaattcctaggttttattagagaccaactctttcacctcatttgttgggcttatgcagcctctgacttagtcagtgctactagaattatgcgcaactgggaggtagagtatattcctctgtgtccatggtatctttgctccttttgtcgaccagagtatcttggagaagatgaaaatcctgagaaagaagatgatgaaaatcctgagaaagggcattactgttagggaaatgatatagaggattacctactatacatcaaacagcatggcattcctagagagatctgcaagaagtttgactgtaaggactggcagcctccaaatgctgacgacccacatatgcacacgacaaaattaaagagtgttcgaaaaattgaatcaatggaggaggcgttgctattgcttccacattttcccataggagcggacttagttgtttttacggaattgtggaccgtaggagaggagatttattatggtcccggaacaaattccagaggtttccgctcatatcatgcagtgatagtatccagtattgagatctataaaggagaagtggtggccatctgtaagatgagcaatggtactaaagtttgtgacgaaggatatgttagggtttctctagcgacaacatacatggtggtgggtgcctgtcctaaaaaaaaagaacatgttcgggctacttctaagccgatgcatcttctctgtgaattcatcatcatagatataggtgagaatgtgtaagagcaagagggagcggtagagaaaggatctgagaccggagaggaggatccagtggatatccagagaggccatccagagcataacccgagagggaagtctgaagaggggcaatatcgtggctgtggggcaagcatgtcacataactcc

SEQ ID NO: 9122 - DNA, 1354 bp, Arabidopsis thaliana landsberg
gatgatactattttttcttttttgaatttcacaccggattcaatcggtaaagtattatagaagttcttactgaaacaacattaatttttttgtaaaatataaatctaagaagaaaaaattactagggaaattaatagcaaactgtaacggttgactggttttgctaatcgtgcacggtttagcattgagattaagataagctctttctaaaatattcgaaacatatcctttaacaaaaaaaaaaaaaaaatcaaacaaaaccagcaaaagtaatagattatagcgaaacaaagaccaaaaagtcgttcaaaatactctttaaaatattataaaaccaacaaaaaaacaaagacttccttggctcctcctataaatagaagctttatctctttaccagaaacacaccaaaatccattaacacacacaaaaacaaaatgaaattttcaatcacattagctctatgcttcactctctccatcttcttgatcggatcacaagccaaagttccagtcgacgaccaattccgagtggtcaacgaaggtggctacaccgattacagtcccatcgaatacaaccccgacgtacgtggcttcgtacccttcagtgacaacttccgtctctgtttctacaacacaaccccaaacgcatacactctcgctctcagaatcggaaacagagtccaagaatccactctcagatgggtctgggaagcaaacagaggctcaccggtcaaagaaaacgcgacgttgacttttggcgaagacggaaacctcgtactcgctgaagccgatggacgcttggtatggcaaacgaacacagctaacaaaggcgccgtggggatcaaaatcttggagaatggcaatatggcaatatacgattccagtggaaaatttgtatggcagagctttgattctcccaccgacacacttctcgttggacagtctttgaaactcaacggtcggaccaaactcgtaagcagactgtctccatctgtcaacacaaacggaccgtacagtctcgtgatggaagccaagaagctagtcttgtactacacgacaaacaaaactccgaaaccaatcgcttattttgaatacgaattcttcaccaagataacacaattccagtcaatgacgttccaagctgtggaagattccgacacaacgtggggtctagtcatggaaggtgtcgattctggttctaaattcaacgtttcaacgttcctctcacggccgaaacacaacgcgacgttgagttttattcggttagaatcagacggaaacatcagagtttggagttacagtacgttggcgacttccacggcatgggacgtgacatacacggcgtttaccaacgc

SEQ ID NO: 9123 - DNA, 602 bp, Arabidopsis thaliana landsberg
  unsure (1)..(602): unsure at all n locations
cggtttttgaccctgagtgttcctgtagctcttgatcttgttattggaacttcctggnataaccacgtgtctatagcagaccatctgattggaaccacttataagattacaatattagtaaacgttaatgcaaacaaaaaataagtataaaatgtagaggtagagagactaacttgttgccgtgaagggcgtgaagagagatgattgaacgttcttcgtcttcagtgaactctcctcttttgatgtcaggtctaagataattggcccatctcagtctgcagcttttgccgcatctcttgagtcctatccaattagaagaattatttaagtaaaataattgagcaataatgaccaataaaggtccaacattgaatattcaaacatgacggaataaacataataaaaaataatacataccagctttttcggggagagttcgccatccaccttcaccgtggcggttaaggtaagagagaagcttctgatcttcctcgggagtccaagctcctttctctaaccctagttcagctttgcaacacggtgtccgcaccattcttgattcttcacacatagctttcttgatcgagttcaaagggggtgtt

SEQ ID NO: 9124 - DNA, 914 bp, Arabidopsis thaliana landsberg
tcattgcatcctataaaaagaagctcactcagtatactaaacacaccaccattcatcaaaaaaccacataacaaaaaatggaattctcacccacattagctctgttcttcactctctccatattcttggtcggagcacaagccaaagttcccgtcgacgaccaatttcgagtggtcaacgaaggaggctacaccgattacagtcccatcgaatacaaccccgacgtacgtggcttcgtccccttcagcgacaacttccgtctctgtttctacaacacaacccaaaacgcatacactctcgctcttagaatcggaaacagagcccaagaatccactctaagatgggtctgggaagcaaacagaggctcaccagtcaaagaaaacgccacgttgactttcggcgaagatggaaaccttgtacttgctgaagccgatggccgcgtggtctggcaaacgaacacggctaacaaaggcgtcgtggggatcaaaattttggagaatggcaatatggtaatatatgattcaaatggaaaattcgtatggcaaagctttgactctccgaccgacacgcttctcgttggacagtctttgaaactcaacggtcaaaacaagctcgtaagcagactttctccatcggtcaacgcaaacggaccgtacagtctcgtgatggaagccaagaagctagtcttgtactacacgacaaacaaaactccaaaaccaatcggttactacgaatacgaattcttcaccaagatagctcagttacagtctatgacgttccaagctgtggaggatgccgacaccacgtggggtctacacatggaaggtgtcgactctggttctcaattcaacgtctcgacgttcctctcgcggcctaacacaaatgcgacgtgagttttctttcgttagagtcag

SEQ ID NO: 9125 - DNA, 925 bp, Arabidopsis thaliana landsberg
ctcaaaaagctcataaatgtggatttttgtgtaaaaatcttgtgtggggaacacaagttttaatttttgagggatccaacaaatcagtaaggcaaaaaaagttgagtgatttatgttttggtgataaggtaatgaagtgtgaaagatttcgcccctaatgatagagaaaggtaagctgagtaagagaattatgtgccaaacgtggcaattagaagccttgagggtcccaatgtatctctccattaacaactttaaactatattgagaatctactcagaaggaaattaagtaagagaacattctaatggttcaagaaaatgttgtgtgcacacttatttaacatttgactagcgggaattgaagcagaagaaatgagagatatataaaggaattagaattagattctcaaccgggaccattttttaggaagaaagctgatatatttccttatacgtgtagtcatcgtcggtatagtatttatctagattgatcatatattcttgattttgcttttcaggcaatcaaatggttagctttaaaaaaaaagacagggcaaagaagaaagacataactgaccgacctgtttgtcctctgttataggagtaatgtttttaatttccacaaagtattacacttctactttgctctttcaccatgttgtttcctaagtgcctcgtcaccattttaagattcattaacctgccaagttcaatcaatattacaacgcagagtaagtctcaatggagattaactcaaagtcctttagtctgtgagcaaaaattggtcagaaccaagcgtaccacatctgtctaaataattgttttaagtaataagaacaacatccattggagaaacatgggcgaattaaagatactcagaaataaagcgttaaaatcaaatgtctcttcattaatggttataacgc

SEQ ID NO: 9126 - DNA, 1176 bp, Arabidopsis thaliana landsberg
tgcaaccatcactctccggtgagcttccttcaccttatctgccacaacactctccctgttataaaaaaaccaccacacaaacttagtcaacccattcattttaaaatcaataatctcctacacaaccaacaatgaaaaataggattcaagaacataatctatgtagtttgctttcatctaaagggtgttaaatcaataacttttgacctcaaataattagcagaacaacactataaccacattttcaaacaggattctgaagggtatatagcttctatgaatctcagcctcaggaccagttcaatctgaggagcaaaaacaaaaagatgaagcaggtataagaaagccggacgaacctaacaccaagaatgagagcagcttctcggcgggtcatagaactttggaaaccaccttcataaaacctgcgcattctaggaacacgaggtcttgccttgaaagcttgccaagccaatataccatatctaccagcaacagcagcagcagctacagcagcacctgcaatcattggcgtagcctgtgtatagccagaaccaataaaaaccaacgtcagatacaaaaaaaggaacacactttggctttggaaatcaaagataaaaaacattcttaattgatatcggaaaaccacagataagatcatctaatgtatccattttgttgtgactttaacataagacaacaaaaggatcctgatctgaattcatctgaatgtgacaccaatcaaacccatctgaattctgaaattttttggtgttgtcaacgtcgtttttgctgtaaattttaagtttaattcgattacaaacgaacaagactgactagaatttcaagatactcctacaataattcagagcgagagagagaaatagattaatccagcttaaacggaaacaagatcagaccaaaaaaacttaccattattcagctaagtagttgttcggagaaaactcaatcggaataaaaaaaacaaaatttcctgataaattcttcgattgtcgagtttctcgatcgaattggggaatgggtttagggttctgggaggagagaaataaaaattcgctgctgctttttttttgctttttttttgcgtgggcaggaggtcggtttgaagagaacttccttctttctttctatttaatactgtcggttcaacacatttgt

SEQ ID NO: 9127 - DNA, 1821 bp, Arabidopsis thaliana landsberg
tacatttgttcatatacagagagtccttatcatatatacatttctaattagtgagtcacgagtacgttccaagcaaaaagaattttccatctcattgtggaacacgtaaactttaatatttccatttttttcaagtcatatatatagacgtgagatgtcgaagctaccttaaaaacccaattatcaattcctttgcatatttggtggtttctaaaaaaaaagaaggtcataacttgcaaatatgatgtcgagtttggtgtttgtagaagctgaacgaacccaagcaataatatgcacatggctagaaggtggagactggagcataatatatcaatagctaaggtcaaaatattcgttgctctcattatcaatttgctctcatctttggcttcgtaaattttttattttattattttttttttttatgagtcgaattccttcctaaattactcttatgtttgaaaaaactaaaagcttttttcttaaatactggagcataatatatataatttcttatttctttctaatgatactttataatagctagttcgagttagatgaattaacatggtaaatgattgatagtttgtatagagaaaggaaattgaacactttaaaaaactaaattgtatatacgatatgtttatatatctatcagacttataagaagattgtaacataattaattctaaataattatttaattattaaaaaaataatgttgcgacaaattgatagcaacaacggggaaaacacaaaagcataaagtctgtaaaaaataaaaacttagtcataagtcataacatgagtcacgctaatttattcaggacaaattaaacaaacgacgatatttagtaaactactagtcactagatagaggaaagtctctatggtatagtaacatcgagctggagcttctcttccaaccagcttttgaccattacgttgcgattgttctcatgagtagtcggtccaaacctacatcacatgttcataacccaataacttattagacaaaaaacattcaaaccaaaaatggtatatactatatagagcagggctaaaatgtaaaatattatttgatgtttatctaccttgcaaatggtgtgaacttgacgtctctaaatccagcctctctaagggacaaaacagcttcttctccacagtcacaggggtgaggaacagaatcgcctgcgacacatgtcatcataaagatttagcattgtctctgatcattatctaaagaggaaaatagttacattgaaagagaagccggttagatttacatattccatgcgtaataaagattgactgcgatgcagcacgagctggagccccatgtgaagcagattctatactgcgttttaggctcctgcaatgtttaataattagtctttcatcattcaatgagatgtgaaacgtaaaattaattagttttaagaaattatttgagtataccccgaattagaaagccacccgctgattccaacaacaactcggggatttatagtataatggttaagagcacaacttgttgcaaagtggagagctactgctgcacccatgccaaaacctgccactccttttatgactatatacaaaataaagttttagtcattgagtagctgtaactagtcacagattagatatatgttaattaagcatattcaaaaagggaaaagcccacttaatatatgtatataaagattggtaagaccatttttttaatttttgttaaagtcccaaataattatgggtcgatattaggtcactctacattaccatttttttaatttttgctaaagtcccaaataattttgt

SEQ ID NO: 9128 - DNA, 325 bp, Arabidopsis thaliana landsberg
acattgacactttcaaaaactacaatcgatggatgtatatctatcatctaatcacatcactttcattaccaaatacgtgtaggtttatcaatttacgttatatcttggcttaattcaaatatatattactcatgtatacttataacagattgcgacataggtaattaataattatttaattgttaaaaaaggttgcgacaacttgatagcaccaacggggaaaaaacaaactaccgtaaagtctgaaaaaaccactaacttagtcataagtcataacatgagtcacgctaatttattcaggacaaattaaacaaacgacgatagt

SEQ ID NO: 9129 - DNA, 297 bp, Arabidopsis thaliana landsberg
cgatgggaagaaaaagaaaggttgctacgctcgcactcaaagtggttattaagtatagatccattgagttgtgtatttgttcgttaatttggtatttcttagctaacgcgagttgtttgctgtatatatatagaacgttagaagtcatggcttatggatgtatcatgtatgatgtgctccgacacttcacattttagttcattaattaaagacttcatactcttatttaataacgactacgcttcacagcacacatatatttttttttttgggggtacggtccacctcacacattga

SEQ ID NO: 9130 - DNA, 2385 bp, Arabidopsis thaliana landsberg
  unsure (1)..(2385): unsure at all n locations
atgaaaaaatataaatagaaattttgtagcatctctggggtcagctttttcttaatgttttcttttttacgcgaggaaatgcaaccttgaaaccctagaaaactcattctcaactacgactaaatcgatttcgcaaactttgacctacctttctttcacgataaacccagatcgcttaaattccttgaatttcttcttctgagagttttaggaaaaaatgtcgtctttgagcagagagttagttttcttaattctccagttcttagatgaggagaagttcaaggaatctgttcacaagtaagtttgtgctttgtcgtttttgtgtgcttgtttggtttctctgcgtaattttgggtataatttggaattggttgatgtgtaggctagagcaagaatctggcttcttctttaacattaagtactttgaagagaaagctcttgctggagagtgggatgaagtggagaagtatctttctggtttcactaaagtcgatgataatcgatactctatgaaaatcttctttgagattaggaagcacaagtatctcgaagctctagatcggtgatgatttctcttcttgtgcggtcggatatttagactagtgttgttgatttgatacatttgtgtgtttttattacagaaatgacagagcaaaagctgttgatatattacccaaagacttgaaagttttcgctacatttaacgaggagctctacaaggagattactcagctgcttactctggagaattttaggtttctttttttttttactttgccatcgatattattgaagttttggaaggtggctacgatcatgctgaagagtgcgtttttttcttagggaaaacgagcaaccgccgaaatatggtgatactaaatctgcaaggtctataatgtatactgagttgaagaaattgattgaggcgaatcctctgtttcgagagaagctagccttccccagtttcaaagcttctcgcctgcgaactttgatcaatcaaaggtgaactaggaggagtcataattctttcctttttttatagagattagttaaagtgtatgacaagtgtgtttgggacattgcagcttaaactggcagcatcagctatgtaaaaatccaaggcctaatcctgacatcaagaccttgctcttggatcactcttgctcaccatcaaacggtgctcgtgcactcactcctgtcaatcttccagttgctgctgttgcaagaccttcaaactttgttccttcttggagtgcatggtggagtaggatcacttacttaacttccacccattctagtatataacttaatgttcatattttgagggttgatgaaacaactgtatctgtgcagccctttcaatctaatcctgctccggctcctaatgccaatgctttagctggatggatggcaaacccaaatccttcttcatcagttccatctggtgttgtcgctgcttccccatttcctatgcagccaagtcaaggtataatttatgtcacaacttacaagtgtctggatattatggtatctttcgtttttttttcttacttgtgatattagagtttttaggaaatgaattttaagacctgaagttctattgctgtatttcgtctcaacagttaatgagctgaaacaccctcgggcaccgtctaactctctaggattaatggattatcaaagtgctgatcacgagcaactcatgaaacgcttacggtctgcacaaacatccaacgaggtaattgccttcaggttttccttgtttttgaaacgcttagtgcttacctagcaaacaaaactcttgttgcttttggaatgtgcgctttgatgttgagtagatggctctacttttcaaatcacaggtcacatatcctgctcattctcatccccntgcgtcacttgatgacctccctagaaatgtagtgagtacaattcgccaagggtcggtggtgataagcatggattttcacccttctcatcacactttgctcgctggttagtccattgctaccatgaaaagcttagtagagttgagatttttatttggctcttgttataacatgtctgttactcgtagttggttgttcaagcggcgaagtcaccttgtgggaagttggatccagagaaaaggttgtcacagaacctttcaagatatggaatatggcggcttgttctgtgatcttccaggtttctctcttcttccatcgtttttacttattttcttgataaagataaattatctagaaacatactttaacactaagctaatccagccttgagtgatttatgttctgttctgttctatcctatactttaaaactaagctaataaactatgattttgttgtgcgggcattttctcgccagggttctatagtcaaagagc

SEQ ID NO: 9131 - DNA, 1796 bp, Arabidopsis thaliana landsberg
cttcaaaaagacgtccagattttgtgcaaagagtggcttttggttcttaagaatagtttcaatactttattccattgtaagtgtactttaatcaatatgtgttctgtgttcataacctgtttccatgaatctattcagagtcatccgtttatagagaatagaactggcgttaaaaagaaaaaaaaaacactgaattatcttaatataaacagaatcgtaaaactcatctttcatgaatctgctaagacgtagctgagacttgtcaacacacgttagctcttaaccctttctttttccatagttgaagtttcaaaaccatgggaaagtctttctgtgtaaacattttcaagtctcctccctaaagaacctgtgacttgcgaagtctttagaattccccagctttgagttttggctaccctctgcccttattttctattgaactccctaaaatcacaaaaagtcaatagtaatcttggtcacgacttgtctctgataccaatgttatcatccatgtcttaatcagcttaatttttgcacacacttaatacaacgtgtaatttgttttcttgttttatgaaattagtatagaaacagatttttactgttgattacaataatgtaatcgctttatgtaatacattacttttgacatgtttaaaagtatctttgaaaattctcgagaaaatatacacctttgattgataaattataactaactacatttattatccggtcgattactgttttttttcttacagttaattctatttgttttctcttcaattattttattttgttggaaaaaatctttaaccatattgaacacgtattatctgctaaaaaccagaaactaaaccaacttctttgccatataaagtacgaatcaaattcaaatttcaaagtaatcaaaatcaaaaaataagaacacacaataatggcgagatccttctatttttgtttattcttcttattcatttcttcaacatcaaagctaaccacaagctatcctctctccacaaagtcacgatggatcgtggacgagaaaggtcaaagggtgaagctagcatgcgtgaactggccggctcatctccagcccacggtggctgaagggctaagcaaacaaccattagactctatctccaagaagattgtgtcaatgggatttaactgcgttaggcttacttggcctcttgatttggtgactaatgacacattggctcttaaagttaccgttaaacagtctttcgaaagcttgaagttgtttgaagatgttcttgggattcaaactcacaatcccaaattacttcatcttccccttttcaatgcattccaggtaaatttaatgatagagcatcggtttgttcgatctgaattgtgccaaactaaaccgggttatgttcattagatggactaatatctaaacgtgatctaattcgaaacaacaacaaattaaccaaaattgatcgcaaaagaacctagtctagctaagggacaatataaaccaaaatcaaaccaattcccatttgctaaatttaacaaacaaataagtgacatatcatcaattcattgtcaaatggttttgatgtgaaactgatatatggttactgttattatatgttgtcaggaagtggtgtcgaacttaggagaaaacggagtaatggtgatactagataaccacttgacaacgccaggctggtgctgcggcgataatgacctcgatgctttctttggctaccctcactttgatcccctcgtctgggccaagggcttgaggaagatggctactcttttccgca

SEQ ID NO: 9132 - DNA, 1578 bp, Arabidopsis thaliana landsberg
ttcataaatcaaatttcctatatgagtttgccattacagaatccgatacatgttcactgatcattccctttatttcaacattctcattaaaacttgtaaaatggaattacgaatcaagctagtatacttgttttccttttccaaaactttacattttttttatttaaaactatttgttgaggatctcttcctaaattcaaaactagaaatttagataagattagaggaggaaaaagctctcttttgtttctcaaggaaaatgttatttagtttaaagacttggataggaaagagacatgtattgtgtagtgagctaattgtactggaatttgtgggattttgtatcaaaggaaataaaggaggtgttggactgttgggcttgggtcagcgacattagaacttagaagcttgtctttgtatatgttaagaaagatcaagtcactcccaataacagaacacgtgggatccaaatgtttatatccgaaagattcagctaatcacaagtgtaattaggttaaaaaaaactaacgggattaacttcatcatcttcttaaaacatcacggtaagtagagaaaaagaaaccacgaactgacgaacaggcataggcactacaagatcacgcacaccatgtctctcctctgttcaggagattctcctaaaacaagatctaagtaatctaaaatatcaaaagattattcttaagctaatatctctgtttcatcaagaacaagaaaaacagcaatgcagagtataagtaaaccagttacaggaaaatctttaagctctccaacaaagaggaaccaagaaagacttgtgactcatctctttgtatttacaagttagtaaaaaaagtctcaaatcttggtatataacagaagtgaccataacagattgaattttcaagtcatacaatcacactcattgcaaggaaagacaagaaactgtaaataagcaagcacacatatcattcaagatctcaaacttatggcatcaacaaaagcagtgaacaggttgcataaaccagtcaaaagagtaatatagagagatcaaaaactcccaaaacaaccattcttaaacatcctaaacgactttagcaatcacattatagtcaccaaaaaggagcattaggtagattttaatagaaaacaaaagaggtttatgaacattactcttcttctttgcatctttttgttaagcaaccgaagtacattccctcgcaaagtgaccttccttgccgcagatgaagcacttgttactgccaccgccacctccgctgcttccacttcctctccgatcacagtcacgagccaaatggccagttcctccacattcgtaacaagcacgaccaccaccaccaccaccagaaggtatcttgctggtgcaaactttcgcaatgtggccaactccgccacaggtataacaagtgtttccaccacctccaacgtttccaccgccgttttgcctacaatccctagcgaaatgtcccacaccaccacacatgtagcatccatcaccgccagatccacgaccaccacctcctccgtatctgtttccaccagaaccaccacgacaatcct

SEQ ID NO: 9133 - DNA, 4204 bp, Arabidopsis thaliana landsberg
gcctccaagtctttcaggcaacatctatagaattctagtagagatacttgctcctgcacccatttattggatagccacatttttggtcacagtgactacagttctcccttactttgcccacatatcattccaaaggttcttacatccgttggatcatcacatcattcaagagataaaatactacaagagagatgtggaggatagaagaatgtggacacgagagcgtacaaaagcacgggagaagactaagattggattcacagctagagttgacgcgaaaatcagacacctacgatcaaagctcaataagaaacagtcaaatatgtcacaattttcaactcaagatacaatgtccccaagatcagtatagcttcctcaggatatctctcttaaaggttaattatataacctgtagaaacagtgtcaggttcatggatggaggtaggctgtggattttgatttcagattggggagacagctcttgatgctgttgtgtgtgtatgagaacatacatggaagaaagtaaaaaatagtgtgagcttgtgaaagtagctgactgacgtttggggttgtctttgttgtatcagaaacagaactatacatagatttttttgtgtgtatacttaggacagattgcaacaccaaaaataatgtatcctccgtttttacctctgttgaaaacatatattctcattgttcttgattgctactagagtgatgcagaaaatgtttgatacaaagaaaacatatgaaaagattgatctttttggattttatatattgtgattcatacaacaacttgtagaagaaatccaacaagaaagaaacttgcaaactagaaatgcaaaagcttgatgatggaaacagaggaatcactttttggatcgaccggagtttggttttttagaagatactagtccagtgttgcgaccctcgagtaacttcatggtctcaccgatccctaccctgtcttcaccagacaacattttctttagcttctcctctgtgtaatcacccttcttcgtcaatcgaccctagagaaaacaacaagttacccatcattaaattcatcgctcttaaaaagagacatttcatcgaacaggtggtgaactgtttcaaaattatttactccggttacggatcttagaaatcagaagatagattatatgttacctgggcaattctgatgtacttggagactaataaatcggattccgagcgaataatcttgggaatacccagaaatgctcctacaccggaagatggagacaccggtggtggctctggaaacgccgaagatgaggctgagaactgtttctgttggaacttcctcgcagcagcagtcgccgttctcaacacctttcccgctttgatcgccatcgacaagcacgactatgcactctctttctctccttcgttatttctactttgcagatctccgttatgagcaaattcttaagtgaaaccaccctaccactattttattcggttatccatttaaccccgtaactttaatctgtatcaattcttacccaaactataaattctgaatttcataaataataacgcagagaatagaaaagatgatttttggtttgtctattaagatatataatgattatgtaatgaaaattctaactgatttatatgaatttcttggtaatggcaaaactcaaggatcagcaaatactaaagtataattatcgaaagacaagtcaaaatgtaagggccttaagggattaagatgattttaatttgcgtgacgctcaagagctacaaacggcgtcgttcttctaattttagattttccacaacttcaaaatctgatttataaaaaagcatattacaatacaaaaaaggtattaatacgatcctttccatccacaccagaaattttatgttttggctaaattactcagctacacctatttttatgataaatgaaagaaagttagtgtcattttttgtccaaacagttcctgagttcgtaacgtatcactaaaaacataggaagaagagaatgcaagctaatagcctattactattagtaatatataccaaaaacaaagagcgtctctgatgatgaaactccaaagattctgtgctgcttcttttgttccatcaacctcaattcaagtacataatctttccctgactacctgcaatacaacaaatctgaaacaaatcagacacaccaaaaaatcccaaagatttagagacggagaaatagtgtcaaggttagtttttataaatttatttacattcttcgtgcatctctctcgctatcactagcatctcatcagcctcttctgccagtttcatcagtctctctatctcttctgcagctcctttcgacacatctaatttgttctctacttctacgagcttataagctgctgttattgaagcttcaacaatctgctgtgaaatagagggtccctgactgtttgtctgctgccgggatttcgtgttgctctcttttggtctcgctacatgtggtgttctttgtaccaagctattatcattcatcttatagaagttctgtgtctgttgtgtgtattgttgcattgttgaaggaacaaaacattaaaaaaaaaaaaagcaggaatgaggaaacaacacagaccacaagaaaggttgcacacttgttcaagcaaggctttcaagacttactgattttaagtggctaaccttttcaagctttccctgagctgcaagcctcctcaatcttgaactaagcatcctcctgaaatttggtggcacttcttgtcgttgctgctatacacataccagactattatcatgaacttgatcatgacaggttagctgctaagacaataataacggatactgaacctaatagagctatgttatctcttaaagataatcatagtggacttctatgcaataactccgatcaatctataacagcaaagaatagttgaatagtataaaactttacattgggagctctaactgatatgaatagagattactcaagtataaaaatagagattactcaagcaatttcaatcttttgataagcaaaagtatctaaaaccaaaggttcattctcatctttaaatggtacaatgattaggtagtttgttcagaatgcaaaggtgtttatcaggctcatttagttcgactatgcgttcaacattactgaataagcagcttgcggagtggataagtatttcagtgatgaccaatgtcaggataaagagcactgaaaaatatgtctaacctcaatgaagttgaaaattgcgctgacatcagatccattagcatccgtcaagtttgaaagagcttcaaatatcattccatcataccttaataaaataatggcacatcagaagcgtaacagttgcaagcagactaggaagaaatttacaacaattatgaaccgacacaggattaagtagtggctcggaggagaagaagacaaaaaaaaaaaaaaacctgggagcattctttggatcaactacaatgttaaaactatcatcaatgctcaaatcagaagatccacttcggggaagagtagcaactggagaagagtgaccactatgagtaggagttacaatagcggcagcagcagcggcagccagatgaaaagcagcagctttgatttttggtgtccgtatcttatccttagagccttgaataccaggagcaacacttaaattacgccatttatcctagacaatatgatacatcggatgattaagaatcttgttttgtaggtaaccaataatggagacagtgctaattttcaaacccaaaaggtgaaataaacgacgatactaatatttcttcagggaactaatacctatcaatacagccactaaagttaaagtctatgagaaagatcatagaacacagaagtagtcaattttcgaaaagtagaagtaacacatcatatacttcaactccaaacccagctaattaaaatcaccattggggggaaaaaacgaacaaaacgacttactcaattcgtatccgtagcatactcttaaaaatgttctcaaaccaaagcatggaaagaagattatcccaatcataaaaatttcaaatgtctgcaactcaaatacaaaaaatcgaacccaaagattcttgaactaaatccgacgtactcaattaacaaattttccattcccgttgtgccttgaacttgataattagggtttccaatgtttcaacaaca

SEQ ID NO: 9134 - DNA, 1080 bp, Arabidopsis thaliana landsberg
cccgaaaacctgggtcatgagtctcataatagtacttggagcatttgtaaggctcctaggcataactaaccattcatagaggcggtgtttggttttaaaggcggctttccattcatctccttctttcattcgcacttggtgatatccactctttagatctacttttgaaaaaatggtagcaccgcttagttcgtctagcatgtcgtctagctgtgggatgggatgacggtatttgatggtgatgttgttgatggctcgacaatcgacacacattctctatgttccgtctttctttggtaccaaaaggacggggactgcgcaaggacttagactttctcgtatgtaaccttttgacatcagctcccgaacttgcttttcaagctctttagtctcggtcgggttcattcgataggctggccggttagggagtgctgagccgggaacaagatcgatttggtgctcaatgcctcggtttgggggtaagccaggtggaatgtcgtcgggaaagacgtccgtaaatctgtctaacaaagatgttatctcatgtggtagctctagctcatttgtacctgaaagtaacccttccttaaagaccattagtagcaccgagtcatggtgataagttagttctacttaccttagaatcatttgcaaacttaatttgcatttcttggacttgtagtggggtaaggagagcaagattatacttgcgtttgtcgtgggtgaacgagtagtagttggtgcgtccgttgtgcattgtttctttatcaaattgccatggccttcctaggagaaggtgacttgctttcatgggcaccacgtcacatataacttgatcactatactttcccacactaaatggaacagtgacttggtcagcaatcttcagctcgacttcgtcgttgagccaccgtagcttgtaaggtcgcgggtgcttagtcatctgaagacctaatttctcaaccatatacttgctagctacgttagtgcaagaacctccatctatgattaaactacataccttagagtttacggtgcatcttgtgtgaaaaatgttttctcgctgtattgtttctggct

SEQ ID NO: 9135 - DNA, 1080 bp, Arabidopsis thaliana landsberg
caatttcttatgttcttttgtcgtccattttccattttccttttccattatacattgattgtttccacatgaagaaagattttctttcaagtgagcataaaatcttcataagctagctaaattgtttttaatcttagcttagttttgggtttaaatttgcagggcgagtttgatgcaatttttctatttgcttggtctgtcctacacgtcagcaactgttgcgtgtgctttggtaagcttgatgcctgcaatcacctttgctttcgctcttattttgaggtaattatggaaccatctaacttctttatcattaaaataagtactgtatttactattactatgcaatgggttcatgcaggatttattcgtatttgttatgtatacagtgcatataatttcttttgttttttcatcaagcatattatacttctatatatagaaatactcaaaagaaccttactcataaattatctatataatgggtccgtgtaattactatcttatgcatacaatatatacacatataaaatttctttaattttttcatcaaagataatacttttatagtaatacttaacagcatcttacatatttttcatgtttaatatttggaatgagccaaatagaccttggatgctataaatatatttatagcatccacacgtaaattattggatttaagtcgatttaaactcctattttctcctgtttttttttttgttttgtaacgtaaggacaaaaacatttactgtgttaaattatcatataaaattacatatcttttcaggactaaaagataaaaagtctaagaacccaagcaggaatgataaaagtgatgggaactattatatgtataagtggagctttgttcttaacattttacaaaggccctcatatatcaaactctcactctcaccaagaggctcttcctcacaacaacaacagcgatcacaacacaaagaattggcttcttggatgtctctacttaaccataggaaccgtgctgatatctctatggattttgtttcaagggacattaagcatcaagtacccttgcaaattctcaagcacttgtaacat

SEQ ID NO: 9136 - DNA, 631 bp, Arabidopsis thaliana landsberg
ttggtaagcatgttgcctgcaatcaccttcgctttggcccttattttcaggtaacgatggaaccatctaacctctttatcatcaattgataatatatattaatctagatttttaaaaagcactactgaaagtattgacaacataatatagaacattatattttcttattaattgtaatgcaatctgattggttttcttttccatcaaattaccttaagtatacgtaactgcatccactgagccctctttctaaagcttttcctgaaaaaatgtcttttcttagctatacgtcgcatttttataaactttgatggaatgatgcggaaaattattaaaaagcgactctattttgtaacgccaggaaagaaaaaaaacaaatactttctactatgattcatattctcaataacttgtttcaaaataatcattaaaattttactttttttaggactgaaaatgtgaagattctaaagaccaaagcaggaatgttgaaggtgattggaactttgatctgtataagtggagctttgttcttaacattttacaaaggcccacaaatatcaaactctcactctcactctcacggtggggcttcccacaacaaccacgatcaagacaaggccaataattg

SEQ ID NO: 9137 - DNA, 1913 bp, Arabidopsis thaliana landsberg
ccttgtactcatgacaaggtctccggctcaggtttcaatccaagaaggaatacttgtttggtaagatcgacatgaagctcaagcttgtcgctggaactctgctggcaccgtcaccgcctactacgtacagaatctacttgtgaaattaattgatttcgaatcttatatattagagtatcttttcatctcaaaaccaatcggtaataaatgtaatatttttaactcctaatgttatacatgttgtggcagctatcgtcaaaaggcacggcatgggatgagattgacttcgagtttttgggaaatcgcacaggacatccttacactatccacaccaatgtgttcaccggaggtaaaggcgaccgtgagatgcagttccgtctctggttcgatcccactgcggatttccacacctacaccgtccactggaaccctgttaacatcatgtgagtatatagtctatcaggaaaccctaaattgatagtaaattatacaatataatccagtatattaacaaacgttttattaattagttcatttattatcaattggtttttatataataagcttatgaacattgacagcgtctaatctcatatatttcctcttttgatgtgatcccttacattgagcactataaaaaaaaaaacgagttctcttgacatctatagacatatttgatatatatttcttgacattcatgttggtttcttgtgtctgaagcttccttgtggatgggatcccaattcgggtgttcaagaacaacgagaaaaatggggtggcttaccctaagaaccagccgatgaggatatactcaagcctttgggaagccgatgactgggctacagaaggcggtcgcgtgaagatcgactggagcaacgcaccattcaaggcctcttacagaaacttcaacgaccaaagctcatgcagcaggacatcaagctcaaaatgggtgacttgcgagccaaacagcaactcgtggatgtggacgactctcaatcctgcccagtacggaaaaatgatgtgggtgcaacgagacttcatgatctacaactattgtaccgattttaagagattccctcaaggcctccccaaggagtgtaaactttgattctattatgggaattttcaagcatttttctttccgttttgtttcatcttgtgatgttactttgatttattttgttctttcttttggtgtttctgagatacgatattacatgtatacgtattcttcctgagaaaataagaagttgtattactcgataatacattttatctctcaatgtggtgtgattgtttattgggtttggcgtacaatgaaagctacatcaatgtgctttagaaaaatgcatacgaaaagaaaaacacaacaatcaaaaacccgtgaggtaactaaattatctccatttacaaatatactaacaatactactaatttattgttaagctgtcagctgtcacgaccatgataatgaaaaaaaaatcatctctgttttcttctaaactttagagtttctcgaattttcccatataataaaaataacccacagttatggtactctgttgggtgaagatttgctatgtggatatgtaaaatgcttagagtctttacattgtgattttagtggctggttagtggttattaggttattacaaacgcttttatctttgtacatgatcttcttaagtagttacagaaatctcaacttttcttaaactaaacgaatatctttgatttttattttctttacatcactcttattgggtctaactcactgtaaaattcctgcatgtttatattatgaaattgagaaaatagtaaatatatgttttaatttcaaagtttaatgaacgcgttggttggtccaaataaaaaatagggcccaacattaaagactttaagacccacattta

SEQ ID NO: 9138 - DNA, 2854 bp, Arabidopsis thaliana landsberg
gcttaacaagtgttcctcaaagcgcaaatttcaagaagccaaagattgagacttgtggagcaatgtttaaccagaaacttcgagttcttgctaaatttgattgctagagaatcttttgatagcatatgaatgctcagtttaatttattagtttcttggacatctactttgtctaatcttttcattttgctactttttatttgctttttatgtaaactacattgacttagtctaatcttttgaatcttataaatataatgcaagttttatttactcttataaacccacttgtatctctttggccataagtatccttcatacaaataaccaagaaacatagaaagtgtttccgtcaaagtcaaacataggagacaagaggagaagagtcattgtattccatcttctttccatatttctctaaggagttgatatcttacagtctttctgcgtccatatcctttcggcatccactctgatgaattggttgtttccggagcagacaatatagaggtaatggacgtatctaagtcatcaagctcatcgtcgctggtatattgtttcttaaataccgatgatccggtttcagatatggacggattgttcaactctcctatgaagcgttttatggaatctgtagacggcattaggtagaccgtaggcgatgcagcggaagggaagactgtgatgcatccattgtcttcctccgttaatccctgtgttgaagacaaaaggttcaagaacacacacacacacacatactgattattagtactatgaagacagttttttctaacctcggagttcagaacatcgaatagccttcttgggattctgtgtgggttaaactcatctgggacaaagtttcgaagaactctctttattattggtggaccaagggttggacaaacctatatagagaggaaatagaattagcctagtgttggaacaagaagaatgagtgttcaagtctaaattacctcttttcttgtggatttgtctgcaagcattttgaatggaagcatcataagatcacctaacgagttgagtaaatggaacaatctgaaatgttcacactctggcttctccttgtcattgttatcttcgtctttgtttctaccagatttgtcctccttttgctcaaattgatcctcaagccatcttgaccaagttccaatctgcaatggcacttaattacatattttacataccaaaaggaatgtttttgtgattgagaacaaactctctgttcatgtgagcttaagtaccgcattttttagttgtgcgccggccccaaaacttgcttttcctgctggaatgggaagaacatttatgtcactgatcggatcagagacaggatctgtcggcatttcacccgctgactcacggagtatcgcgttgaacattgctacatcaagtctactgattaactgttccattacctgaatacagaagaaaatgaagcagctataacaatgtagttcaacattcttgattctggctctgctaagtgttttaagtaactaaatgctaatctcttaccagttttgcaagcataggtagacaaccacattcttgtcttgaacctcttagtggacaaagtctttcacaggcagctctaaaggcatttttccatagctctatagcatagagtccctggttccggtgacctaaccgcctttttcccgaaactttcctcgcgatagatcctttaaccgctggagattgcatatgcggcgtcatactctgcaacaagattaatttcacattaatggtttagatgaaaacacctttacaaatccacatggaaaattgttcttttgattacctgccaccaaactgacttaacaactcgggagaatatccaggactcgaacttctccaaagccgcgaggaatgctcgaggatcttcccattcatctgaaccggccttttctgggacaatcttcattttctccataccgcggcttaaaattgctctaagcacaatggaatttgatagccaaaaggttaaccttggaacatcatttccacatgctttggaaaccaatatcaatccagaaaccgccgctctagccgcactggcccgcttagaatgatctaagccatttcctttacaagcatgaagataaaacctagcaagacgacgagctggagcatgaaccttgctcatggagctactatgctcagcaaccacagagtaaatagctgcttcaagaaccgctgcttccttaagctcatcttcaagcgtctctgttttagaatcttgcggagttattaaacctaccttgttaaccactccactcgcctttttgtgactactatcatctttgtgtccgtcaaaatgcaactgaatagacttaagctgtttaagtcttggaataccttccattcctaaagtctttcttcctaaggcaagagtatttgtccgaagtttcatctgttttttcgctgcatcgggaggtaacgataaaggaccagatttgatctcagagaactgtttcttgagcttaaaggcatttgtatcttctttatgtttctgatcaatctctgcgctcacaatgaccggttgattgctctgtctctttctctcttcttctcttagtagattctcgatctcagagacgagtgctgcttcattgttactgtgcttaagtgttacatgtttccaacctttcttctcatctccgttcgtcatcgcctctgtgttctgctttgatacaacgggtcaaaatataagtcttacttcttttacaccaatgaaacttaaactttctacttatttacatgaaattcttaagagtcagatcatgatagcccaatcacattcatgcaaaagtttctacagaacagtgatc

SEQ ID NO: 9139 - DNA, 1602 bp, Arabidopsis thaliana landsberg
gacttgctggacatcaggcatgagattatttggagtcccacaaggatcctcaccaattttaccgttagggtgagctcccacagggttaaagtacctcagcattatgattctccattcaggatcaccacgttgtacatcacggcaaatgtcctctatgaacagctacgaaatgagaaacattccagtataaataccaatcaaatctacaataaaagcttccactttgctatcgaaaacgactgagtacctttgtccgtccataaggactcattccagacaggggagactcttctgtacaaggaacctcctttggccagccatacacagtagcggacgaagaaaatacaagctgattgagatcaatgagagaaagttaaatcatgtttcactgtcacatactcacatacataaggaataccaaaaatctgcaatacagaccaaaaggggattttacctttttacatccgtgtgcagccattacttccaaaagtgtaatagtcgcaatcaagttattgttataatacagaagtggtttcgccacgctctcaccaactgctttcaatccagcaaaatgcattactgcatcaaacctagattacagccacatagagcactaaatcacatctctggaggactggaaacaagaagcatttcactgtagattcagattttagcacgaaacatacaaaactaatttccctgtcctctcttcctaggcttttcggatcaacatatattatcataaggtctattaagaatacgaaatgaaagtcaaaattcatgagatttaaacttgaacatgtttttgcgaggaaatgagtatatcagtaagaagaggctactacaaaactcactttgtttcggagaaaaccttctcaagtgcgggtttatcgcgaaggtccacctgcaggtataagatacattagccatctaacatttgcagaaacaaaaatctcagattaacgataatctcgaacacaatttgatccagaaatccactgcgactaaaagcaatttgatcaaacataactcccaaagcattgtaagcaaatcgagatacaaaaaaaaaactctcaatttttgaggtcatgattaccgaaattctcagaatgcaatgatccaaagagcagagcaagggaaaagatagccaaacctggtggacggtgagattttgtccatgatctccggcgagatccttgacgcgttggatcgaaacgagagaggaattgtcgaggttgtctataacgacggtgttatagcctccgagaagaagctgaagaaccgtgtgacttccgatgtaaccagcaccaccggtcaccagaatattcccaaccatcgaagctcgaagaggcgatgaagaaagagagagcgagagaatcaaaagagaagcttctctggaaataataataactaaccttcttgtttgggaaggaataaaaagaggagtggagaagagaagccacgtggcttttttgtttataccttattaattaatacttcaattaagtaattaatgtcataattctctggagaaaagtgtcactttgtgagtttagcaactactaataatttaactaacaaatgcttgcatttggaataaag

SEQ ID NO: 9140 - DNA, 762 bp, Arabidopsis thaliana landsberg
accgaagtcgtacagcagagaatcgaaactaggatctgtgctttgccatgatcgatactgcgctctgcagatctatgcatcacgtcccaacaaaagatgcagtcgccacttcaatcttgtccaaacgatggcgttatgtgtggacgatgctgcctaaactctgagtgcaaagacgatggcagcgagagcgtgtgggtggtttattggaaagtcattgcaactccataaggcaccgaaactagattgtttgattgtcgaactcggtccacattgtcctattgacgtcgatgtcagaaagtggattgagaactgcagttaatagagatgtggaagagttagatttcacgctcctctggagcgcagcgcctacaagctttcctaagagcctttacacatgtgacacgctcgtttgtttaactctatccaaccagattctggtggatgtgtcttccccggctagtctaccatctctcttagatttgagtcttcattacgtggtgtataaagacgatggctctcttgttaggctcttatcaagttcccctgttctcaagaggctgagtgtgcatagacatgaggatgacaacttaaaaacctttaccgtgaaagtttcttccttagaatcattatattatgatgagaattggctcaagaatgaggtagaggataaagagattgatgaggttaggataatgaggttgatgaggtagtggataatgaggtagaggttgatgagggtgatgatctcaatggatcgttggt

SEQ ID NO: 9141 - DNA, 436 bp, Arabidopsis thaliana landsberg
acgagactgcgttttcttgcgggttgctgcaactttatctacgctccggatcataaccaccattgaatgtgcaattctttagccaccaggagctcgattatgcgctggcacatgtgtcctgcaccaattaccaacatcattggagatgattcagatgctgctagcttaacgagagcgcgttcgactgctgctgtgcttacggaaacagacccagacgctatatccgtgtgggctctgacacgctatccagccttggtagcctttgcacatagagtaccgataatcctcccaaaccccgcttggggaactactagtgcagctttactcacctgagatagtgtctgattacctgctaagacaagagatgccagaccaggtgagacttgtaacatattgtgcgtggcgtctttgatgtacaacagataccggtgctgac

SEQ ID NO: 9142 - DNA, 748 bp, Arabidopsis thaliana landsberg
taaagttccattggcgtctagctaggtatccggtatcccacatggccacatctatgggttgcttaaagtgttggtcttttttttgggatattatacacgacgatgagcatatatcaactgttccagaaaccgaaagttgtcagataaacgaaactagaatctgtgcttttcctaacgatttgctcttgcagatcttgcatcacgtcccaacaaaagaggcagtcgccacttcaatcttgtctaaacgatggcgttatgtctggccgatggtgcctagactcgaattcaaagaagatgacagcgagagcgtggggtggtttattgaaaagtcattgcaactccataaggcaccgaaactagatagtttggttgtggaactcggtccacattgtcctgttgacgtagatgtcggaaagtgggttgagaacgtagttaatagaggtgtgaaagagttagatttcaatctcctctggaccgcagaacccacaggatttcctaagtgcctttacacatgcaacacgctcgttgatttaagtctatccaacaagattctagtgaacgtttcttcccctgttcgcctaccatctctcttaactctgagtcttcgctttgtggtgtacaaagacgaagaatctcttgttagccttttatcaagctcccctgttctcaactgcctgaaggtggatggacataaggatgacaacttgacaaaatttaccgtgaaagtatctaccttgaaacagttaca

SEQ ID NO: 9143 - DNA, 439 bp, Arabidopsis thaliana landsberg
gaataagcatcgcccgcatcgggcagtgtatagaaactagaaacattattaccaatttttattttgattttttaagaaatcatagatgcattaaattatacgtagaactttaaaaagattaattagtattataatccgtttagtcaaaacacattcaatttattttatcaaatagtgtaacaacaaaaaatttaaattcatggcacgtaaaaacataatcgatacatttacaagggcgtggtgcaagcaattagagcaagccaagtagagaaattaatcaaggttggcggcaaaattgggaattggaaaataaattcatccaaaataacaaatggaaatataaggaccaggctagaaaatttggattttcaacaattttgtttggtttgatgattagatttttaagggaaaaaactaacaattatgtaagaatgagaat

SEQ ID NO: 9144 - DNA, 2136 bp, Arabidopsis thaliana landsberg
gcgtcattccaaatggaggctttgcagaacctgaggatgatggaggagcaagcagagtacgatatggaagcaatacagagactgaatgatttacttgttgagagagaaaaactaatacaagatttagaagctgagattgaatacttccgggaccagacccctcagaagaagaataagctagatgttgcagaaaaagtgaccgagatggattcccctagtgagggaatgagcaacaagatacagagttgtttagttgggttcgacgaagagagattatacatcaccagttgtctggagaagattgaaaacagagtaaatggcaaggctcatgacgataatctaccagcacaagaatctgtttctgagctacatgagagagtagaaaggctgaagggagacttatacttcctagaacaagttatgaattctcttggccatggaaatgaaggcgtgcaatttgtaaaggaaatagcttctcatttgcaaactctgcggagtctcagcatgaaaagacaagatcagactgagtgttgatgtcctgagtaacaatcttcacaaaggtatgttctttcctcttccctgattgttgtgttgattttgttcttcagataacttcacctgcggaaattatagctctttgtacaaacatcttattattcatatgtcgttctggttttttaatatgttagacacctttgtggagaggatattgtagaggaaactaaaagaagttcaagattcaagaagcttaaagaaactgtatagcatcggcttcattgccttcccctttcgtatacgataatctcagaattctttacgatttcatttttgggtttggtgttcataatttccttatgggttttcatattctttgtgtttattttgcatttttcttctagttttgagtaaaaagtgaatgtaggttttgttctgaagttctcatttgatttttttttattaggttggttgatacttttgtttagcatgtcaaaagtcatgcaactttgttaaacttgttgtacatttcttcgttataaactacttatacgtaatgtcctttgttaaactcatatttctttgttggtgttaggacctcgaatttggaaaataacaagaaggttgatacgcataatacaaacttacaaaagacaattaaaagaggaagagaagccaaaacctaatatctaaaatattttcttactgttaaagtagtgatatctaaaaaattaaaaactgtctttggcgaaaaaaaaaaagggttcaagaataataacatgtaagaccaccatgcatcattcttatttcttcttttagtttgaaacttcaataatccgtcctcctctgtcttaaccaactccttaattaatctgtcttaagcttccttaatttctacaacacttcctttgtctcaaccaaatttgtgtagtatcattcatgtcccactcttgtacatctctcacttctatgcttaattggaagattgtatcacagaacatgccacagcttgtgcccaatgcctcagtctcgttttaacctgttgtttatcatctcctgctaatttatagaatataacatcaaaacacaatcatattatgaaaatatcaatctgacgaaaaagtttaggttgctatgttacctggagacataaccttcaaagaatcagagtcgcttattggactaccaaaagaggaagatcggtctccaagggaagtaggacgggaggatgaagaagatccaccactgcctggtgtagaaaccggcgagatctgacgagtcacagcgaagtaaaggtccaatgcaggcaatgtagttgtaagatgttgcccttgctcctcgttaaacccgaaccctaactcaatagatcctttgagctcactcaagtcctcgtccgtcaagtcatctcctccttcgttatgcttctcaaggtgatggagcatctggcgacggcgacgctcccatgcgatgtctctacgggtctctaacatggagagttgcttcgagagacgtttcttagccttagctttcggtggttccaatggcatcttttgaagctcttctacttcgaagtcgtagaaagatgacgacgatgaggttgatacactcaatgcttctccaaccctcaccatctttcgctgt

SEQ ID NO: 9145 - DNA, 2214 bp, Arabidopsis thaliana landsberg
ctttctccgcactcctaatcagagagatcctaccggttatcaaattcgaagagttaacgaattccggcgaagatctaccggaaaactgcgccgtttgtctatacgaattcgaaggagaacaagagatccggtggctgagaaattgcagacatatatttcaccggagctgtcttgaccgttggatggatcatgatcagaagacgtgtccactttgtagaacaccgtttgttccagatgagatgcaagaagagtttaatcaacggctatgggctgcttctggtgttcatgattttcactgtcccgtgaccgaattattatagaagaagccacgcttttctatctttttctgtgtcccttatgttcttttttgttttgactttcacccctctacttttgatgttgcttttttcacccctcttactgacatttagacttgccacgcttttatgtgtgtatatactccttacatatgaatgagagatgagcaataaatattaccgagacaggaaaataaaaagtagtttatttactttgaaagttaaaaagaaaattaaaaattgagttacatgctaagaatatccaaaatcaataccataagtataaatttcaggtcttacatttttataatccagtcaagtggtttatttgcagattgaaagttatgaccttaaatttccatttacagtaacttatgctattttaattaagtctaagagttattaatgtatttttaaccgggagtagttaagatcttgtcagaacttgtctctgaccagtgaccagtgaccacttctgtaaattttgttggtaattatggtgataaatattttaaagacaagagtcatctttttatctttagttttttaccaaaaggatctaaattcaatggatcatggtaatgcgtaaaggcagaatctggtaacatgcttggtctgcagatccatcagtcaattctaacgtaataattcaatgaatttattttacttgaatagaaatataccagaaatccaaaaaatcttgaaaaccgaacatttctgatttatttattgtaatagttactatgattattctacaaattatatataaacataaaaatcagaagagaaaatctaaaatgaaaaactgaaattctagtcctaatgttctggaatacctatttataatcagatgttttatttttgtttttaatcagatgttttattgatgtagcattattttgactgaaggtgatcagattcattgtaggatggtaagggagaagacatgctttcactatagagaaagataattgaagagtaccagagtgggtaggttaaaaatgggggaaagtggcatttactatttgggtaatgattgaaaagatgaccaatacaaatcaccatcatctataatccatatcatgccctgttctagatttcatgtactagctagagaatctacttttataatagtctatctatctatcagcaagcaacaaagcaatttgagttggtttagattttcgtagactcgtagtccacacacacacacgtattcaaaacattaaaatatagtattatgggaatatatgttttataatgtattttgtaaattgttatagttagcagcacaagcacctccgagagcattgcttgcagttgcgcaataagaatcaggagctatgtagtggttggctccacctaaaagtcacatcgtgaactgattatctgaatcagcatcaccaaacaaatcttaacctggctggattttttgctagaattatgatggatgtgatgcaagttgtaatatctgtcatgtatttcttcttctcttgaagtgagctcatgaacttgaatttgcaatgtcttttagagtaacttttttttatataaataatgattttttcttttagatatcagtgtgagatagctatagatttgcattggagtttacttgctattttttttagaccaactaataagcatattttaaaatacatgggtgtataatagacagatgaaaagtgaaacttccatattttgtctctaccataaacatgtgtaatgtaaatgacaggcatcaccaactttcacttcacagagctgcaaaatcgccaaataaagataaagaagatgaaagccagattttaactctccaagattaagagcgagtaaataaaaaggttacttacttgtatatgaaggcagcgattcccaggagtatgcataagaggat

SEQ ID NO: 9146 - DNA, 1063 bp, Arabidopsis thaliana landsberg
  unsure (1)..(1063): unsure at all n locations
ttctatgttaacagaccgctttcacaaccaagaaattttacttttttggagaaagagaagctcaatgggggcaaggtcaaaggacattgcacggtctgcagccaaaagaagatgttaatatcttcccagagaaaggaagttacagagagctgtctgagatcgcagagcaagccaagagaagggccgagatagctaggtaagtagtgtgattaaaacgaatctcaacggaaagatgccatttgatagaggttctgattggtgaatgattaaatattatgttgtgacaggcttaaggagcttcacacattgaagggacatgtggaatcagtcgcaaagctaaagggattggacattgatacagcaggacatcactacactgtgtagttggagttgcacaacaacacatacatttaccgaaaaccaaccccatcatgactcatcttttgttttgtcttcacaaatctctctttaaaagtcattacagtagagggaagagaactcttgtgtattgccataactcttccaaaactcttttttctttttgttattgttagtcattgttcttaaaactcctactcgatatgagctttgcaaatttgcctttgaagaaacaaggccctttgcctttgaagagacaaggcactttgctttttaatggcctaatgtgattattctatcactcttttgtctgtttgatcaatttcatcttgaagataatatttaaatttaattctaaaacaagaacattcttggttttcgtatagttttggttttcataaatcaagatatttacaatgttataaattcgagcgaaagagagtgattagctagcaatgcgaactcacattcgagggatgtgttgttctcgaacgactatcatataatccagtcccgacagactctatctcaaaagactctatcatagaaagaagatgacgccatcaacatgacatttacaatgagagagcgttctaccgaagatgaagacaacacaattcttacaatgagatggcttctcagtgctgcagctcttcttatnggcagacactcatgaaaacatact

SEQ ID NO: 9147 - DNA, 1312 bp, Arabidopsis thaliana landsberg
aaaccttagcctcttcggagactctctccacatcgacgacgtaaccttcacccatcaggtaatctttcacgtaatcggcgcattctaccggaatcgttttccatggagcgagattgtttgtctccgccgcgaatctccagctcgtgcaatgtagattgacattgtcgtttatgttcttgagctgggtttcgaagatcaatggtcgcgcaatgagatacgagctggagttttcattggagaacgccagaggaatcaaggagaagagaatgagattcacgaaaatccgcattgtatatcgccggaaacgccgggagaaaaaaagttgagattttttcaattgggtcttcaagagattcaggacataagcgaaatccgaagaaatatcaaagagaagaggagattttccattctccaatgatgaggaagtggattataagaaccctagaaacagtgaaacatttcctctcaaggtccttttttcaacggagaaatgaggattctcggagaaaagtttctgtttctttttgggcaatggaaaggaagagagaccaaaaagaccaaaataccaaaatgaaaaataaaaggcaatggttttgtgttcttatttggaggcaaattaacggatggatccgaatattcgtttacaagatgattcaggtttcgtttcggtttatatttttgattcaggatgtggtgaaatgagagcatgtgtgttgtgtagttcaaagcaaaacgtcttgccgtttatatatccacaaaaacgctacacagtttggcttactactgtcgtgtagacctccattccatgatggctgtgtaaagagtataattgggtaaaaggttcttgctatgcaaaggtgaatccgtcatcggcgatgtgtcatgttcctcaagccactcctctatcgcgtgacggtcatatgtgtatccgtctgctgcaacgcacggctcgttcatcacgtcctgcattataccacacaagctcacacattttcaccacaacacactgagttgagatgtttcaacattgaacaaggttttgtatagagttacctttagtaatgggcagatgaaatgagtgggaggctgtgttgacaagccagaaaatgagttccttgccttttcagctactttcttcaggttatcgagcgctggaagaatctgatctttcaaatactgcctatctttcccgcgcagctctgtacaacacagagctgatgcggccaattcccgggtttcttcaatcggacagttaccggctttatgatctaacgatcttaggaactcatgattactatgcattgcgctctca

SEQ ID NO: 9148 - DNA, 1731 bp, Arabidopsis thaliana landsberg
gtaataacatattttgtttttctaattaaattaaattaattaaattcgtatttgactttttaacctttaaatagatgaattaatttaatctttgaaattttatttctaatggcatacttatgtaattacttacaaaaaataaggttaatttttattatgtacttcccaaataatagtataggatgctcaaaaagtttaattggagtttaaacggttttaggcattttaagtgtttataaaataaaatgttataaacaggatattattaaaaatatatataaaatctcttctaaaatatatattaaatcaaaaataatattgtggacaaaacattggttaatttatgttaaaatatatattaaaattataattatgtatatgaagaaaaacttagttaattatttttaaaaaaatctatactaaaataaaatatttatttatttaggcggtcaagacgattttctaaacactacttgagtttctaacacctagtggaagtaactaaaatatatttgtactataaattgatttttgtataatttaaaattttccatatctcttacaagaaatatcttagtgagttatatactatttaattaaaatttggattttcaattttttttactatagtaacactgttttgtgttgtcttatataaaatctattatattaatattggtaggctttatgataaattgttattacaaccactccgaagcaactattgcccgcaagcgcacctgtttccaactgaaatcagaaaaagtgccaacaagatatccataacaacacaaacaaaatcacatagaagactctgtttcaagttccaacaacacattattcaaaacccactctttacttacttactctcttctgctaagattagccaagctcattcaagaatcaatcccctgacgataataatgatcctacagcctcctccatgctcttcccatttggattcttgttccattccaacatttttctaaaagtctccacgaatttcaccgcgtgaaccactctccattcctacacacacacacccacacacacacgaaattgcaacattaaatacccgcaaaagatcggtaaaaacaaaatcgagaaaaccatcgtttgaatcatcccacaacgatttcaatactgctagttaaacaacaaaacaacctaacattccacgacgatatcccgagattagactaggtcccgtattcaaacattaactacctacaaacaaattggtaaaaaacgaagtcgatataacaatttcaatatgttcagccactataaatgctttaaacaacaaaataaactaacattcccagatcatactacatttttcatcaaccattaacaaaaagaaccaacctcgaaatcccattctccatacattctaggatcatctttattaacccaaacataagtttcaactttcaccttctcagaattatcctgcgaatatcacaagaatctcaaaattcccaaaataacatcacattgtaattaaataaataaaaacaaagatcttattacaaaacacaaactacttaccattcttacaacttcaacagttactctctcataatcattaccttcaatcacatcgaaattatttaactcagcatcagacactccagttattaccttcaccaaaaacccaattcgatttatttaataataataaaaaaaccaattttcacagatcaaaaatcagaaacaaaaagtcaaacc

SEQ ID NO: 9149 - DNA, 1613 bp, Arabidopsis thaliana landsberg
tatattggctttcacaatttcacaaaaatgtgaaagaatttttgttggtggcattatgattatgaacctaaagttgaccaaatcttcgttgttgtgttctttttaaatctcttttggtaattgtccttacaaagtcaaatagacaatgtatagaagataaaaatataaagttcacaaaggtctctccttaaacttatccccaccacatatatacttattcttcctcctcttttcgctccacgtttcgtactttaacacaacaatacaaacacacacacacacaaaacacacacaagccttttggtctgaatctgatacatcaatacaccaacaacaatggagttaccaaaactattaatctcactctttctcttctcattctcatctttcttcttaggtaattatactcatactcatctaaaaagctcttaatcacataaatgggttctctgaaacccactactaatgattaatattttgaaggtgctgaatcggattatcctcagcatagtaacttgaagagactgagaccgaatagactgttcgtgtttggagattcctatgcagacaccggaaacataaggaaatctctctccgattcttggaaaattccttacggcatcactttcccccaaaaaccttccggtcgtttctccgatggccgcgtcgccaccgattttctaggttttctctctcacacacttttttttgtgacaataaatgaggatatggtgatgtgatccggccaccagattcaacaccaacactaacaaaccgtaggttacgtagattaatgtgttaattatcgaaaaaggaaaaagtatgggtatgttactagctaccatcatgctgacgtggaaatattagaaacctttataggtctgattttgtcgttagattagtaaactattcaagctgtttgtacaaaataaaaagattagtaactgctcaactttttttgaaaattgtgagttatgttttgaatttcatttttgaatcacattaaatctttagaatcgaaccaaaaaaaaaaacaagaaattaattaaactagcctctccgaatacaaacggctgattgcaaatagtgtgggatagtcctgctgcttaatctatgatctacacggtttatttacatactacgattattacttttgaaccatttataaagttttgattcaatttttaatgcatgtgtgcagcaagatacttggggataaagtcaccaattccgtacacgtggaaggattatgccggaaaggaacggctattgtacggaatgaattatgcgtatggaggaacaggagtgtttaagactaaagataatccattgccaaacatgacaactcagattgattatttccaacgtgtcctcgccgccggcaatatctactcgccttccgatctcccctcctccctcgctctgctcagcgtcgccggcaacgactacgccactttcttggccctaaaacgcccactgaccgtaagtaaaaatatcagattttgtgtgcacgtacttacattttgtatacttaagcccgaaattgtatcttgcaggagttaccggcattcatgaagcaagttgttgatcaaattgcggttaacgccatgcgc

SEQ ID NO: 9150 - DNA, 1233 bp, Arabidopsis thaliana landsberg
aagagaagcgatcttgagaaattggtctagacaaagtggattccttcttccatttcgtatcactttcttccttgcaaaattctacaccctcttctacttcttctcccagacggatgagaatctgaagaatcctgcactggaagctatagggtattgcatcgatgggacagagagaagtagcaacaagaagagtgaagcagatgagaagcgacgacctctagagaaagggatcattgaaactatgcatgagagtgacgtaaccatcacacaatctctaactgaaaaaggtgttcatgttgctagagacgatggtgacaatgtgtacaggatcagatgcgatgcggttgttgtaggctcaggaagtggaggaggtgttgcagctgcaaacctagctaaagctggattgaaagtcttggttctagagaaaggaaactactttacagctcatgactattcgggtctagaagttccgtctatgctcgagttatacgaaaaaggcggccttttgactacggttgatgggaaatttatgctcttggctggttcagctgttggaggaggtacagctgttaattggtctgcatctataaggacaccggatcatgttttgcaggaatggtctgaagggagtaagatcaagttttttggtagccaagaatatcagtctgcaatggatgaagttacgacaaggattggtgtcacggaaagatgtgtcaaacacgggtttcagaatcaggttctgcggaaagggtgcgagagactcggtttgcaggtagaatcagttccaaggaactcaccagaggatcattactgtggcttgtgcgggtatggatgtagagcaggagccaagaacgggacagatcaaacctggttggttgatgctgtagagaatggtgcagtgatcctgacagggatcaaagctgagagatttgtattagtagacaacactagtagtagcaatgagagaaagaaacgatgtgtgggagtgtttgctagctctgttggaggaaagattgggaagaagtttattatcgaagctcgagtaacggtttcatccgctggatcgctgttaacacgcctctgatgctttcgagtgggctaaagaaccgaacattggaaggaacttaaagctgcacccggttctgatgacatggggatactccaggagaaagattctgagttctctgggaaaatgtatgagggagggatatcagtccgtcgacatatgaatga

SEQ ID NO: 9151 - DNA, 1689 bp, Arabidopsis thaliana landsberg
acgacatgcgcattcgttataatcttccttccagaaatcacaaatcctaaatcaacaccaaacagaaaattcaatctaattatcaccaaaatcacacttgaagcaattccaaagagactaagtattaccagagcccatagattctcgttgagacttattctgccaaggaagaaagtaactaggacttgtagaaacagtgaagatcttcaccactgagtctaacgccaaatcaaccgcatccgccgccggcgagattgataatgattttcccgccttcctccgccgtgaaatctttctgttattaaccctccgtgaagaaaccggtgatggtagagtcgtgtgtcgattctcattttgcgaattcgcgctctgagaagaacagaatcgagagatgtgtgaagggaaaggactctctgttgttgttactctgtgtggtaaatagctttggaagccattgcaccgttgtaaaagtgaaggagaagttcgatatccagagactgaagaagtggagattcggcggagaagctcgacggtgcgaaatgaccggagcagcattattttccggtactgcttttttgagttccaaatgaggttttaaggggctaggttattcttttttaacagagtttgttaaccgatttgtaccggccggtttattttgggttaagttttgatgcaattctgtacacaataaagtttaaatgcaattacattggggaaacttttcttttaatacgtgaattttcaaaaaatattatttaatatgtgagtgactatttaatacatgtgaaaatcgttgatggactatttcacacaaatttaatcatcgactataccaaaatttacacaacgttatatagcgttaaccgactgataacaactttaaattgtggccctttatatatatatcaactttacatgtgatcatttcatatatgagctaaatgttgactaactgtttgaaatatgagaatgcgttgatcatcctaaaaagacataccgttatctaagctagatattcggattttggttcggaattcgggtaggatagtttattatccgtttgaattttataactattccatgtcggattcgagtcgatttaggatccggtccaccaatcagcaagttttcacagatagccttccatttgctattttagtcgccagattcaacatagtccaccaaattcagcagttcaaaaaatatacaatagtccaccagataacatttagaccatttaggtttaaaaaaaaaaatacaatgcctatgagcagtggcattgaactttgtatttacacaggataatccaatctcaaaaatatattattatacagattttgttgaacatattttacaaaggaaactcccacttccttgagcttccattgatggtttcatgtagacttaagccaaagaatgtccagaagtgcgacgaatctcctggagatgagcagtggagacataaactgcattcacaagagagctgtttcttctcccatagaaaatgtaaacaaccactccgaggaacagccaaaccgatacacgagcccacgtcgcagctctaaaacattagcaaaacaaatgtatatcaacagtgaagtcatcggttagtagcattcacacatctggtgtcatgatccataactcacccaaggtttaccaagagatacatgttgataagaatgc

SEQ ID NO: 9152 - DNA, 1337 bp, Arabidopsis thaliana landsberg
  unsure (1)..(1337): unsure at all n locations
gtgattatagttctattcgttttcactcttggtaagggccagcattcgcctgtgctagggttacatatcagtggcttagaaattgtctttcccttcaaattcgtatgactattgaatccatatatgaagccacaaacaggacnnnnnnnnnnnnnnnnnnnnnnnnnagagaagctcatatgaaaattgaccactaaaggagaagaatcaccaggctttggtgatgagaagaagaatgtttcaccgtctttggggcaggtgaacaatagcttcgggcgtgacgaagatatggtgaagaacgattcggtgaaatctggattgttaagtgtggaagcacatagcttcgataagcaacgaaatctcgctatagacttcaccggcaatctcgtgagtatctcgataacgagatcgaacgggatcgtttctgaatttttctcctctcttttccttgaattcgaacaagatcgtgtattgcgccgtgttttcatcgttaactgaaagatttcagagatcaatcttgtttgtgttactgatcacgatcgaatgtgtacaacataaatacagagcctttacaacagaacccgtaaactcaggaaaatctatacatttgagaagatctaactctatctttcgatgcacaatatcagcatctgttaaagcatattcgttgttgagtaacccaagagaagaccaaacataaccggtcttaaccatcctctaatattaaccctagataaaccctagctagtctactcgacgatttaaaaaaaaaactagggcttttcagatatacaaagatggcataaaacgtaactcaggagttaatcttcaaacgacgtcgttttcagaagctggctattgaaaacgacgtcgttggtgattttatctataaataagaacatttacgtcattttgcatgcttcttttgtagctgtgatattcaagaaaagaagtaaaagctagtataaacagagcaaatcattataaaccgaaaaaagttatttacatacatataaaatcgaacctgacgaatgtacaatcggaatccaagaacgggataaatgttaatattcttacatgattattagtggtgaagagaataaaccaatggtttgagaggaaaataaatatcacgagacgtcgagacccaccaaacagagacgttcatgttaatcccgtgatgcatgccgtgagcccctctctagacaaaattcaaattaagaccattgaagaacgatcgaacactttgatatataataaatctactacgatttaatgagatacaatactttaaagattttagattttcagatttctaatgtaataatgtagaattt

SEQ ID NO: 9153 - DNA, 900 bp, Arabidopsis thaliana landsberg
cgtctccggcggtgtctactcaaagacagccaaacagaagatgctcttcattatctttctctctttgctctcatgctgttacatcttcagcttctcctctttctctcttctaggtaatattaccttactcataatctctttcattaattttttctagatttttctcataacttcgattgttaattttcttgtacaggtgcttttagcagagaaagtaaaggatttggtccttatgaactgttcattgcacctctttgttcaggaacctctaatggtattttatcttttcaaatctcttctttttaaatttgaacaagctctgtttaatgatgtatctcaatcacaggaacaatttgttgtgacagaaccggttctagatccgacgtttgtatcatgaaaggagacgttaggacacactctgcttcttcatcagtcttcctcttcacttccctcaaaaacaagacaaagatcactaaaaagatcaaaccttacacaagaaaatgggaaacaagtgtgatgcaaacagttcaagaactcaatctcgtttacagagatgaagaaaacaattctttagtcgtctcctctgttaatgacatctgcgatgtgttctataacgttcctgctgtgtttttctcaactggtggatatacaggaaatgtttaccacgaattcaacgatggaatcatccctttgttcatcacttcacatcatttcaacaagaaggttgtgtttgtgattgttgagtatcatagttggtggattatgaaatatggagatatcgtttctcagctatcagattatcctccagtcgactttaacggcgacaagagaacacattgtttcaaggaagctattgtgggattgaagattcacgacgagttaaccgttgagtcatcctta

SEQ ID NO: 9154 - DNA, 481 bp, Arabidopsis thaliana landsberg
  unsure (1)..(481): unsure at all n locations
aaatctgctaggaatgggtggcgatgggatgcggatgctgcatacatccaagattcatgcataggcattttttaaggcaggcacgccaaagcacttcaccaccattgtggattaatggtcatcgtgggaaactgnnnnnnnnnnnnnnnnnnnnnnnnnnnnnnnnnnnnnnnnnnnnnnnnnnnnnggacagacctcacacgtgatggcccaaattgactaccttgtcctacgttccccagcacagcagacgatgctgatagatgggacagaggcgcacctataacaataaaagtatacatgattgactgaggaaacaagggctgcatctgtgaaagaccatagggacttatactagatgcagaccatggacagggatgggactacttacatcatatcaacccattggagcagattcacagatataagcagggacatgtgataatgagtagccgaaaccctgtgagtagaagagattcag

SEQ ID NO: 9155 - DNA, 1701 bp, Arabidopsis thaliana landsberg
attgattaattacccctaattagactgaaactagatcttcatgattcaacagcacttctagtttataacacaatcctgattcctgactactattagaaacgtggtcaatagattatttgaaagcagggtcaagttttatgaggctccattttttgattaggaacatttaacaacacagtcaaagtttcctacatatgtgtgtacgcggacacatgaatgaatgatagcaatcgtgattagtattttatagttttcatacacatattcgccatgtcaaaagaagagaggaagatacgaccaaacaaaaatcaacaactcatcagaaaattacaccatcaagatttgagaaaataaataaagagaattgaaacgttgtcacatcgaaactctgtgttgccgaacaagaaatccttccaaaacgacttttttcttataagccacagagttcaaatccaaatcaccttgaaacgacccttcttcacctttaccgctaccactgcgtttgcggttgaccaccgcaaccgcagtagcagcttctttgagacgagggaaaatgtagcaccaagtggatgtacaaagtatcgcgcacaaacgtccccacgtcaacattatcatcagcgttagcattatgattgatatcccaattaccgggtcaagtttagagacccgcgaccgttttctaacccttgacgacttctcccttatttccttcggcttggaccccgacccgacgatattagtcgggtcaagttttccgtctgttgatacccgttcgtaaaacttgtcatcgtatcctaagaaactcaacggctccggatttatgtctctttgttcgttcgtgtctttctgataaaaaaaaaacgttacaaaaagggaaaatatttgttattgtaaccaaaaaaagtagttcagtaagaaaaattcaataaatacctctttagtttcatgatcaacggtcttataaccacttgtcgcaacattttttcgatcggtcacatgacgtatcacccgaaacagattttgcttatcatcttcaaaagtcaacttttgtttctccgacttgtaaatcgacgtcggtgtgatctcctccttggaacgaaattttgttggccgtgaaaaccaacgagttctcgtcttcttcttcgtcttctggatctcttgaccagcgtctactattggtttgtccgagtgaattttccgggaaaccccgaaacatcgaagaaaataagaagatgaagagttaattctctctcggacttttctctccggtttgcccattataagatgaaaagaagtatccaaaaatgtaacattaatttgtgtgaagacttgacattatatatatgactcggaacggttggaattatatcccattttttattaactgaaatacttgtgatagtgttcgcacgctttcggaaatacgataaaaagaataagatgaaaaatatagtatctactacctccaagttataattacggtcgtgaaaattatcttgatcattgctgatatattttgaatcttttcacaagttgtttgtggtagcacatgaatctccctacccgaccaacaacaagtcggaaggtccaaagctcggggcctcgggcctcggggttcgggtggagacatgcccgacccaaacgatatgtggtaattttattcgtgcttacaagctggataacatgtacttgtgctaatag

SEQ ID NO: 9156 - DNA, 515 bp, Arabidopsis thaliana landsberg
actttatctctatcgaactcatcagcagagttcttaaaatacggatctggtagggtaagctcacctttcacctctgcaaatggatcagctaggtccatggagattgacgcctatcagacaaatcctgaagttcttcctcaacatgaaaaccagaaactcctttgcggcgttatcgtagtgctttcttgcgaatctcttgtcgttgtggatcaaacggttccatggtttgcaagtagctcaaacgtttcagatatgtggctggaacaaagctgagaatctcctctaccaactcctttggaagattcggcatcgtcatcgttagtcgccgaagaaaacggcagcaggtggctctcaatgttatgttatcatttgatctattaggataacgtggctctaaatattattttagggttttggttttcagctttcctcttttggtaatttttaaaaaattaaaccgatgcgcaatatttatgtttccaaaggaatttaaaggcgaactttttatattgatt

SEQ ID NO: 9157 - DNA, 1469 bp, Arabidopsis thaliana landsberg
tgatgtagttctttgctcactttaaaatgaaactcatctcttcatctgtaaactttctcataacctttgctggatttccttccccacacctgccacatgaaactgataacttatagatatgtccttgtaaatatattctcagaaagtagttcaaaagaatagcaatataagaaatccgtctaattcctcataaaacattggaaacacaagaaccttctgttactccccactcaccctggtttcatatacaagtgaaattgcaacggaaacaaaggtggttctcagatttagacaatatagaaatactatttactcttcttattgatcaaaatataatactatttacaggcaaatcatttcattaactaattctgtatccaccaaattataagcaaagcaaaagtggatctacttgaagaagtttcaactggtcaagccttagctatacctcagcctaggactaaatgcagcagactacagctggtgttacttggttaaatagcagttcgttataaagagagctattaggcttggtagatcttcagggtccgtgataactaaacctagctagagttctatttttggttcttgatactttggattttcttgttcagtttagtgagaaataaagcagtttccagttccagtcttatcacaaactctgtaagcagtaaaccacaaaagataaagtgaaaagaaagaaacctctccagaagggattcgcgtgttctgtttcacaagggaaccagcagcaaccatggcatgtttctcaaccaccacaccatcaagaagtgttgctcccatgccaacaaaagcatcatcctcaacagtacacccatgaatgacagcactgtgacctgctccgtttcattttacaaacaaaacctttaactaacaatcgtgtaacacaacataaaaacagatacttcaaaactgataaatcgcttgttaaggtttacctactgttacattgtccccaatcagagtaggtagaaccttgccacttatgttggtctttgcaacatgtacaagcgtattatcttggatattcgtcccagatccaacactgatgttattcacatcacctgcacaagttagaaacccagattaacatacaataagtttcacagctacttcatgacacattttatcaacagtacaataaatctatgtccaatgatcaggacagtaacgtataacagcgatacaagattattagaaggtaaagagaacttcatttcctaaaactaaactatgactactttgcacaatatactgctgcaaaatttggtacttctatcgaaccaaaggccattaagactttctagaagtaataaagcctcacctcgaagaacacagccataccaaatcgacgagccttttccgatctgaacatcaccaataacagaagcactcggagccacaaacacatctttatccaccaatgggtgatttatcaaacacattca

SEQ ID NO: 9158 - DNA, 1692 bp, Arabidopsis thaliana landsberg
ttctttcacgattaccttgtaaggatcttgagacagatcaagatccaatttaagtgaagcttcttctcgcgccttaatctctgttatcttgtacaagttcgaactttccaagatcttcttcaccgtcttctttattttcctccgcagatccttgtcgatctctacttcttctctcgctacttcctccattgatgatgtctcgccgacagagagaaaccaaagggtttttgttttgttttttcttacgagtgataaaaccttctttagggtttcttaactattgagccgtaaaattataaatgggccgataatatgtttaggcccaatcatcattacacatttccaaaaaaagttcttcttggacttgaaaaactgggctatatatcacttgtttgaacttttgctagaacttgttggctttgtctggctgcaaaacaaacaaagagagaagaacatgatcatcattactctgcaaggttctcaaacccattttgacattcttgtacatgccaaagacggtttttgttgcggtccaatttgtttcattgttgattgtaagtgtatataaataatactaggcattaacataccgtagtagtgaatcactggtgtctacagaagtggaggatttagagtcaccacgaccaaatgcaacctcgtccatgctctgccctatgcggcggtatctacctccggcctcaacaaacgcgggacaaggcctgtaagctttaatgggccaccaaccgaaaccggggacagttgcaatgccaccttgaatccgtccgtcaccattacacccactctctttctcttctttcccacacgctctgcaaccactgtttcattcctcatgttatgatctattgactatagagagatggatctattgactatagagagatggatccatcacaattcacaaatgacaatataaccaatcgctcaagccaacatgagaccacaaagaaatttatgaggttagttattgtagagaatcattttaagagattcactagtgtaacaaaattgaagattcatataacactaacaagttaacagcagaaaagagtctctatgatttcatcatttacgcattccctaatctatcactaactctaaaatccttaatgtcaacgaaattggattagctgagaaaggtttaagctttccaatggaatcgatgaagagaagcaaaagggtacctgaaagtgaggtcgttgtcgtcgtcattatcagtttctacgacggaagacggcgaagaagaaagagagagtagtggatggggatgatgctttgatgatttgttgagaaagaaactgcttgagcttggccatggccttgatttgtgactaccattgttgaagatgaaacatcgaggcagagatattgatgaaatggaattcgccatttttctttcctctgtgagctaagagaagagagtgtgagaagataatggccacaaattcagaaacgcaaaacaaaataaaaaagagtacattacaaatttttattttaaactattagaatttttttcttattggtaatcatatttaaatattatattctttttttgggtaggatgtttaatattatactattgttacagaaaaattatcatatgcaaaaaatacaatgtcattttatagtaattaaataaagggaatagagaaaatctaatctatgtggatgtta

SEQ ID NO: 9159 - DNA, 931 bp, Arabidopsis thaliana landsberg
  unsure (1)..(931): unsure at all n locations
gcatattcgtgattttttttttttttttgcttttcgtcacaaatcatttttttttttttttggttttttgctgaaatatttacgatcattgccctcagactactatactacgagaccgcctcaacttggccagtctatctatttccattgtctctatctctctctctctttgaagcagtttgttacttcttacttttgtgtttcttcatattcttcagaagcaagcacaaggctannnnnnnnnnnnnnnnnnnnnnnnnnncgtatctcactacgatcacattaatggatagaatgtgtggtttccgctcgacggaagactattcggagaaagcgacgttgatgatgccgtccgattatcagtctttgatttgttcaaccaccggagacaatcaaagactgtttggatccgacgaactcgctaccgctttgtcctcggagttgcttccgcgtattcgaaaagctgaggataatttctctcttagtgtcatcaaatccaaaatcgcttctcatcctttgtatcctcgcttactccaaacctacatcgattgccaaaaggtgatctcgctgctttcgtgttttgtcttttctttttcttgttgtgtatgattttgtgctttcaaggtgatttagattaagcgtcaggaattttacatgtattcatcgtcgtatttaaagatagttctcttacttttttttttctattccactttaaccctaagataagattggagaactagagagactgtgtttatatgtgagagtgattttttttttttttttggttattgattgacaggtgggagcgcctatggaaatagcgtgtatattggaagagattcagcgagagaaccatgtgtacaagagagatgttgctccattatcttgctttggagctgatcctgagcttgatgaattcatggtttctcac

SEQ ID NO: 9160 - DNA, 2245 bp, Arabidopsis thaliana landsberg
  unsure (1)..(2245): unsure at all n locations
acagacagagagagtaagaaagattcttaaagcacatgattttattttttattttccatttaaaacccaaaaaaatatcgggggtctgttaaaatgggcagctcttgttaaaccacataagcagatgctctgtatatggacctacgcggattgtgatgctgctataagattacaaatcctttgtgttttggagtcatgtgtgattcataagttttagttaagagttatgcaaaccgaaattcacgatggagttttgcggaaaatgggaaataataatcatcttccatttttagctgagtttcaaaagtgctaaattaaaatccgcaaaaaagaaagtaagataatttgcatgtcccattagaaacaagattatgtgttgtcaaaaaacaagaagacaatattatatatttgaacttttgcatgttactattattgcaagttttgttgggaatttcaggtttcgttttcaaatgataaattaagttaatgcttttttactttagctaaaaaggatacgaggagatatcaaatgattgggatttggaagtctctaattaactaactaatttaaacaaagttaagttagttgagaagagaagagagtagctctgctaaaatctaaaacgattttgggggcaatccctgccacaatgtgccaataacaaagagagagagagagagaagaataataagaaagagaagagacaaaggtccaaaaatatttgtaaaacacgtagtcgacaatgattggattggtgacgaggaataagttggttgctagtctatttttttctccccattatttgtttctaacaatacatatatatttcaacccaactatatgtatccggtttagctaacctctttcggtttgctttcctgattttcccccaaattataaagttcaacaacgaacataaaagaaaatctacccaattttgttttatagttctaacaagaagaaatatcaagattgttagctaataattttgtttttttggcttcaactccaaagaaagccaagtgcgtgagagaaacgtgcttctgatacgcgtggacttatcagctcgagaaatacaggtccactgaaaactaaatggacccacgataggcccataaataggcccaatataagatatatcatctttagaaaatgattggtaagaaaaacagactcgcttacgaaaacgtatcactgacttgttggggaagaggacacgagaaaagaggaacttgactcgtttacgttattgcgttatgactatgattcacaaaatacattaattgatataataatacgaacattaactgaatctgacgataggttcacatttcatttcctgcatgatctttcatatcctaaagtctctttctaaatcacaaaacaaaaagtcgaaaattttgaccacaatccttaaacataacaagatcatttagtgaataaaacaacgtaaatcttaattttaagcacgcagctaactatgcaggacacacatcaacgaagaaaacagagacaagaagagaaaagagaaacctagtagaaacagtaggaagaggatttgtttggatgaaggagacgaaggaaacgtctacggcggtagaaaaacgccgttttcagccgcgaccaaacgacgcgtttcaatcttctagcagatttcaacctcatacaaacaactttcttcaccactctcttcatggatatcttaatcttctctgtgaaactctgtttcctcgagaattggtagctcttaaggaatagttgtctcttctccacgtatcctcctccatatccatagctatagtaaccgttactattgctctgccaaacgccgttgctgctgctgtttctgctcatcggaattaggatttgagaaagtaaagaattgtgttcaaaagggtggattgagatttcttgcactggattccggtgatggcttatttggttaacttgtaaaacactaaaacacttagccgccgccgccgccaaatccgccgtagctacaacgaatagggtttttggtttggttggatatatctcaatcgtgttttcaagtgcttcacgttgttgctttaaatattttctggcttggcttttgccttttgacgtactactctctctctctgcttttaatggagtctctcttttttttttactaaaaataaaagtgggtctcgtcaaaatcaaatacactatattctaggtggagacctttaaatctaaacttccccaacaaantaaaaaaat

SEQ ID NO: 9161 - DNA, 889 bp, Arabidopsis thaliana landsberg
ctttttattttaatccatcctcgaaaccctagaatttgcgaagattactacatcgcttgaactccctcgagagttactgaaacccaatcgagcaccgtgaaccctaaatttgcgacggatttgtaccgatcccacgcagaattggagcgatttgattggtggtttctcggttcttcgcgaagccctagcaaatttgcgagcgatttatgaggcgttttatttttatatatacacagcgaactgagtttgagcgaatctcaaacccagccgcttcccaaacaaaccctaaattttttcttctctcttgaacctttcttagtctccggccccgttccacctcgcctctgtgtcaccgtgttctccggctagttcaggatcgtcgctcagacccagccgatttcttcttctctgacttgttcccgatctctgttgtgtcttcttccccgcctctactgtcccgcgaacaaggtaatgtctccaatctctcagttcttcatttgattttcacttgttctaactagggtttcactcaaacgagtttctctgtctctaatctctcagttcttacatcgattttcacttgatctagttaggttttcaatcaaacgagttactatgtctctaatctaattagggtttcgatcaaacatgcaaatctgtcacgagttctttagatctatttagggtttcttaattttctaggtttttcttgtagatctaattagggtttcgtgttttcgatggatttcggtttagatctaattagggtttgattattttttgactactaatgatttctttttcattgtaaacgattattcaaggttccggtctcaacagcgtccaagcacgcctctcagtgaagggaactcttctgcggttcagggta

SEQ ID NO: 9162 - DNA, 4469 bp, Arabidopsis thaliana landsberg
ttcattaaaagaacttcacatgactttgaaccttttggcattgaagctaagtcctcttcaatgggttgctgggcttccacttcacatggatatgtcttatagaagatttttgccgttttcaaacaaagcgcatggttcaggagataactcaccagatccttatctccgtatctccctgtgtaccctttccactctagagcttcaagactggacaacaaacattcgggaaccaaacttggcggttcccaacgacccaacggggttagtaagtaaacctgcgatcacgagaaaaaatggtaaaactgctattaataataagatcgttgaggtcgaatattaaacactagtataaattacaatggtaaaggaaaaaagggagaaaactgaatacatgttcaagcttgaggaccaccaatttagtgaaacataggagcaaatctacaagcatttccacagatctttcactacatatgctcagctccagatgcacgattcgactgaaggtacttgcatcctagaaaaaaaaaaagaaaaaaaaacacgatatttcatttatgtgatggttccaacaagatataacacgagaaagaaacgacatggaatgaaaaaagttacctctaattttgatggaactccgagcctaacccgtacaatataccggtaacggcttgcatatgccaactcttgaatgctgaagtacttgaaagaaggtgcaataatcgcaagctttcgagtgtagtttttcatcaaactaaaaatatgcttggaatctgcatcgactcttgtgataatcgacaatctttgtaagtaaggcatgtcgatatccaaattcaacaaaacatcactggttttttcttccagtgttaggtcggagagaacagggcaattggataaaagccgacaaaaggaatcattgttaaagtcctccatgcgggcaacatggagagttttgaggagtgggagacataccgcggaagaagaagaaatgcttatcacatccttcaagccttcgagtttcaaggccataagtgttttacaccaagaaacgtcgtactcagcaaaaaagaaacgagattctcttatgaccattaggtcagtaagaaaattgcaattggataaaagcatttgaagggatccaaagtcgaataaactcgagtggtcaatgtgcagagtttttagggatgggagagagaccgttgtaagaggagcttccacatcgatcactatacctttgagtttcaagacaacaagtgttttgcaggtaaacaattcaggaggtaatacggtatggacaatacaagcatctatctctagctcacggaggtggcaatgatgatgatgaagcgcggttctaatccatggtccaatgtctttattccacagggtcacacttaattcgacatgaaggctttctagaacatgagattggtgtgagaacagagacttgtcgagaaatcgttcaaatctagtgtgatcccgaacatcgtacttgagtataggcacccttgtccaaagagattttcatttttttgacaaaagacttgtcactacaacatgtttagtagaaacgaatgacaaaatcttcaagatcaaatcgtcgggcaactcgttgatacatgaacaaaccttctttgtcattgtctctgtttaggtcgaaaaaacattagactatgtttaaaaccctaattacaaataacttgtttaggtcaaaactttttattgcttatcaagtttctccaataactaataaatataatttccaactaatacttacgagatttcgtgcgaggtagattctgaagatctggagtctggagtctggagtctggaggaagaggattcaccggagttatgagatctcacaaacccttcgacttccccacaaagaagaagataaccagttagtatgaacttaaaccgatctgattaatgttctggttcaatttcttggttcaatcatatccctcggtgtgtttatatgggccaagtagaaaacagagtcttaaagccaattaatttccttcttttcaatagaaaaggataaaaaatccattacataaaaatgcaaatgagaaatatcaaaattgtgctttcaataaatccccttttaaagaggaagaaacatagaagttgttgatgtgttgtgtagatatactaacaaaaattttattaaagtttgatatgatattatttggtaaaagatatatagtaaaaaatttcttctaagtttttgcttttgtaaaatatttcttttttatgttaagataactttgtaaacaaaaattccaataccttgccagttgccacccttcactacccaattttttttgttatctagagctattaaaaatgttatgaaacatacaattgcaatcgttcggttgcggaaaaataatgaaaccttttttcaatttttttttttaaaaatatttctacaaacacctaagtatatatctatgtacatacgacgacaaaaaaaaatatgtatgtacatacatctcctctcactctaagcttattttcgtataaattatagtatagtcatattcttttaggacagaacccaccgaaagaaagctccaaacccaacaaaaagggaggcggcggagaagcaaacaacagcaacaaaaaaatgcagccagagatttcagatcaaatattttatgccttcctcaccggaggattatgtgcctcgtctacttccaccaccgtgacgtcgtcgtctgacccttttgccacggtttatgaagacaaagctcttgcttctctgaggaaccataaagaggctgagcgaaagagaagagcaagaatcaattcccatctcaacaagctccgcaagttactctcttgtaactccaaggtacacaaatcttttactttactatctcactactctactctaaacttataatgaaacttagatagagacttgaaccggaaaattataaaaagcatagaagataaaaatggaagattaagcatgatgaaactattaattctttgggttatttaagatatgaaattaacttctaaagttacatattcttcagtactcgtctaaacatgcatataatttaattaggaaaagatttatgaaatgaggattaaagttttgatgttatctcaccagacttttgtgtttttaattaaatctttatatccaaatgacaatttttttgtcttaatcagattaatcttgcttatgtgatatacgttactacagtctagtgtctagctaagattttatttattggtgagaaaggtggaatattggaagtatatcacttatagaaaatgaaccattttaaaactaacatcagtcaaatgtaatgttttcgaattataaaaaagctgcaagtactgggaatatctagaaaattgaggagatataaaaagcttacaagtccctttttttctctgaagctgataatcactttgtcgggaaagttatcgagcttttttttttctcatttgaaaacaattgaaacgtcaagacaaattttctcgaatcaagacaaattctaatgatctgaccttttctctttccttgtttcctttatttgttttaattttctttacacagacagacaaatccacactactagcaaaagtggttcaacgagtcaaagaactaaaacaacaaaccctagaaatcaccgacgaaacaataccgtcggagactgacgaaatcagtgtactcaacattgaggactgttccagaggcgacgatcgacgcataatctttaaggtatcgttttgctgcgaggaccggccagagctcttgaaagatctcatgaagacactcaaatctcttcagatggaaactctctttgccgacatgacaacagtcggtggtcgaacaagaaacgttctcgttgtggccgctgacaaagagcatcacggcgtccagtcggtgaattttctacagaacgcactcaagtctttactcgaacggtcaagcaagtcggtgatggtgggacatggtggtggtggtggggaagaaaggttaaaacgacgtcgtgcgctggatcacatcataatggtctgatctcgatatgacttgagcaattatttagggtttaactttattatataattaattaacgtgagtataattaccacaaatcttttgttttttttctgaaaaaaaagaagactttatatgggtttagttataagtttgagtaatgggtgtaaacatgtgttgtaacttgtaagtaggaatttgtgtgttcttttctgattcttttagaagaaaatacaaaaaaaaggaaaggaaactataattttgtacaagttaaatcaaattttaggggtacgtaaagtatagggtgatgacgaagattattagattgtgggaatatttgtacagccagaagaatctaacaaagagatgtgattgggtaaagtacttgcagcgaaacaagactttcaaaacagtatatgtattttagaacttaaaagcatca

SEQ ID NO: 9163 - DNA, 3667 bp, Arabidopsis thaliana landsberg
  unsure (1)..(3667): unsure at all n locations
cccaggtactaattaaactcttctctttttctcatatgggtatttcaagtgtggtgtgaagtttatttctttttaacaatagtgtatttggggtttatataaatcggaagtggattcaagtcagtgaagccattcagatcaggctactttggagcattcatcaaactccaacctggctacactgctggagtcatcacatctctctatgtgagactagagactcacttaagaaactactttttaattacattagtgatcttaattaaaactaattaaattaattttgcagctatcaaataatgaggcacatccagggttccatgatgaggtagacatagaatttttggggacaacatttgggaagccttacacacttcagacaaatgtgtatattagaggaagtggtgatgggaaaatcattggccgtgagatgaagtttcgcttgtggtttgatccaactaaagattttcaccattatgctattctttggagccctagagaaatcatgtaagccttcttctacttaatgtctcctacaaaaattgtttttatatttttcattttgttgaatctaaccctttaataacgatagtgtatataagatccgtgttcttacgagaagatacgacaaattcattttttggccacggacctaggtggatgtatctagagccatatagtaaacaataaaaatagatatacgttacataacttttattttattttagatttgggaaaagatctttacccttaggttgcattattcgggcaaggaaagatgtaattagagacacgaacaagaaagagacagtgattgtacgacggtgacaattatacttgattttttttggagttttatgaataattaaattattttctcatgtggtatttgtaactaaagtttttaattctcttaactaagtatgagtccttcaagtctatgaggtgcgagtgcgacaacataaatgggacattcacaatctacctaccaaattttagcatttatatttattatttccaattattttatttttaaattctcatacttttatcagaatgctactatgtaacattgatattttaatctatttcttgtataaaaaaggttttttttttttttttgaacaaagaaaaagtaggaaactatatcaactaatatagttattttgttcatttgtaatttcagatttttggtggatgatattcccataagaagatacccaaagaagagtgcgtctacatttcctttaagaccaatgtggctttatggttccatatgggatgcttcttcttgggcaacggaagacggtaaatacaaagccgactataaatatcaacctttcactgctaaatacaccaattttaaagcgctcggctgcaccgcctactcgtcagctcggtgctatccgttgtcggcttcgccataccgttctggcggattaacccgacaacaacaccaagccatgagatgggttcaaacacatagtatggtatacaattattgcaaagattataagcgagaccattctttaacgccggaatgttggcgttaggaaatattcgatgaaagtcccaaagtttgagagttttaatcacatcaaagttaataccagaaagagcttggtataattttgggatttttttcattactattattatgtggttggttgtttcacgaaaataaattttcttttttttttgacttatcatcttgtcttatgtaaatgtatccagtacggtaccatattgttttgtcaatcgtctgtgactgngctcataaacaaaactgtttgaaatgttgttcagttattccataccgtgatcacatttttttttggttacgtataaagtatcactaaagtggagtgtaaaatgttttgtccttagaaaatgataagcaaaaaaatgatgatgaagcgaaacatatatcacaaattatctgaaaaagggaaatgaaattcacatttaggaaaaacagtcgacatattttaaaatgcatttgaaaaaaataaatgcaaggaccaaaatgacaagtcagagattgcaacctatacattgtaaaaatatgaaattcataatatgaattcgattcttttttcaagctaaaaagttttgattggtaataacagttaggatgatctagtctttacaacattcatacactattgttttaccaattctaaattaaggattgtatcaatgggattaaaggaattttgaagaatacacctaatatggattcaggtgagcctaggtaacgaaaatgatttatgctgtatattctatggtgatcctagtatctactgttactgtataaataacaaatccaagcgatccactgtcaaagaaatatgcaaaatcatgcacgaagtggccatcacacactacttttctaaaaataaatggacgaatacgactaaacaatgggaagtagctttatatccgcatttggtagatgcgcacaagacaattgaaacaccaaacattcgtctagaaaactagcccacaaagctttagtgacccattcttctcttttcctcctttggtgttttatgataatgttttcacattcaattatttatactaataaacaaatatatatatatatatatatatatatcattaataaaaaactttttactcctaacttgcttgatatatattgatatgtttgcaaagttaacgataatgtttcttcacatttttttttgaaagatacatcataagcagtttagatggattttatcaatatcttgtcaattttaattagaaacaatatcgaaaacctcttgaactctttaaattcatattttattgtaagtttagtatatgtttcttataaatttactgaattttgttgtacttaaaagatttgttgtaagaaatgtctttaaaaggtagtgattgtagaaagaaaaaagtaatgtgattctgcgtccgaacaagtaaaattcgaaatatttaaggaggatcggtggtgtgcagttaagtgatatttatgcgagtggcagagtaagtgatggactcgaaggtaatggaaccatgtgaaaattattaattaaatatggatttgtaggtatttacttatttcatactactagattactagtcaacgttttgacttttgagaaacgtaaagtttgaacgaaatatctccaaacaattcgaaacaaaaagacatgaaaaaatgttgcttaaaattgatatcaagctttccaaagccaataaatttgcacttgagataccaaatgtttctaaattgtgacataagaaatcttatgttctcaatggtaatgacactcaaaagacaaaacatttcatttgcagacattacagtgtgaattaactaaaaactttatcctgtaaagtcatctcccaaaaaatacactgtagtacgtagagcccatggtatggcatttagtggtacatcatatttatggtaaatttaagcattggaaacattgatgagattatggacaatatactacaaatgggcaataaatatcgcataaaacaaacaaaagaaaacttaagggctttcgaggttccacgtcgaaatgatttcattggacattgatgagatcatgagatctgcaaattataataatgggctagccttgtttttgaggttcgacagacattgttttctttttagctatgtcatttt

SEQ ID NO: 9164 - DNA, 1633 bp, Arabidopsis thaliana landsberg
agagaaattgagtgaaagatctaggttacagagtaggagagagttttcattatgaataaatgacattttgtgccttgacctttgttagtttaggtttagattatcctctgttattgacttattgcgctttctggttgttagggtttctaaaagacatagttgtttatatatatgtctgactttgtattccggatttggttctcttgtgtcattaacttgggtttagccattattacttaagagtggcaacgaaatcattcttgactctggttggaaaacatatgtcatctttcaaaactgcaattagaaaacagttaggatgatcctaagtgacaaatttctagaaaaaatgtgactaatttgtctctgctcactcaaaaagagagaccatttggtggagagtgaggggagccagtctcaagcagaaaactccggctacaatgcgaccttgaagtagtactagaggaagaagccaagccacggatgtctccactttggaaccctgagtcacctctcagtgaccgtcctttgttctcttcaactgccattgcaagcccgagatgcaacggatcacagctttcgtacaacagcctcagaacttgcttgattgatggcctagccacgccttctttctctgtgcaccatcttacaactgccactactgtttcaagctgttctccatctatgcagtctttgattctcggatccaccagatctatgcgtcttgattctgataccagcaaaggctgagacagttctaccaggttcctaccttcatcaaccgctcttttcccagttatgatctctagcaacaccactccgtagctgtacacgtcgcttttctctgttagttcatgtgttacaacgtactctggatctacatagcctgaaattcagatttcatggttttagattttgctcaatatttcaagagtagttaattccttagtatcctgacctggagttccgcggatatcagtattaacaggttcaaaacaaatggagccatctctagaagcatgtgcaaggccaaaatctgcaagctgcaccacataaccccacacccacaggtcaattctttaagaggtaaaacgaattgataagtcagtgaccagttgatgtgaaaggatgcagacgcaccttagcaacaaagtgctcgtcgagtatattttgcttgacttaatgtctctgtgacagaggggagggtcacagtagaagtgaaggtattcctgcaggaaaggaagcatatccagttaagaactaagaacagtaataataatataaaccatagactagagtatcagttttatggaaatttaccagagcattagccacatcaattgcgattttcatccttgattcccaacttagtggagatttttccgtggctgcagagaggaataacaacgttcaagattcttagtcaagtctaaaacagaggaatgcaatctgaaaatcatgagcatacagtgtagatgatccttcaggctcccattttccatatactcgtagacaaggaacctgttattctcaggttagatgagcaaagggcaatccacacaaatggggagaaacgaaatgaaggtcaaccgtaatcattcacctctcgttcttcttattacaaaacccttta

SEQ ID NO: 9165 - DNA, 1189 bp, Arabidopsis thaliana landsberg
  unsure (1)..(1189): unsure at all n locations
acagctattttaaaagtgatcaaagtttatcaagaaagcttaatataaagacatttgattcaaggttttgtatgtgcacaatatcaagaagacaaaaatgactaattttgttttcaggaagcatatatattacacgaacacaaatctatttttgtaatcaacaccgaccatggttcgatttacttgcttaaatatatgacatttgcacttttgagatgcatgttatttacaccttataaaacttacttgaactttaataatatttgaccatatatcatcttggaaatattaaatgtaaacacgaaacacaaaaggaagttttcgttgtatttgcatctatatttctatatttccaaagactaaaacactatcaatgttgtgttcaattttgaacgtttaacatgtaagcataaaaacaaactcatacaacgaagaaaaaaagaagaaaaaaatcatcaaggcatgtctggtatagctgccacaaacgtaaaaataaaataaaaagcatccataataatggataaaagcatcgtataaacgcaaaatctattagatttttgtttttatgggacacgtataccaattgataaacagaggacggcaccgaaccattttgacttccctcttcttctctccctataaatactttgtacttccccttacggaccctacgaccttttgtttctctcttctctattaatactatagttttcctcaaactctctgattagctcataattactaaaccagttgaccatttttttctgataaacaatcaatggcaaggtcaccttgttgcgagaagaacggactcaagaaagggccatggacatctgaagaagaccagaagcttgttgactatatccagaaacatggttatggtaactggagaaccctccccaaaaatgccggtacgtgtcttaattttcatttattattcatgttttagttatgtttttcgaaagtttcaaattgtaatatgtttttttctcttcannnnnnnnnnnnnnnnnnnnnnnnnnnnntaggttaaggtggactaattatctccgaccagatataatgcgaggaaggttctcttttgaggaagaagaaaccattattcagcttcatagcttcttaggaaacaagtaagtttgcttttttttctcctccgacaatatctactatgaaaatagttcaagattct

SEQ ID NO: 9166 - DNA, 2530 bp, Arabidopsis thaliana landsberg
agcttgaagcaaacactaaggaagctgcgcggcctaagcgcacgtgatctcgaaaccaccttatttctatgcgattatagcagccggcacacgttacgaggtactcagctcagcttctattggttacatctctttgctagccaaatacaaaaccgtcattaaagaaggactcgaggcttctcagagagtacagattgctcaaacccgagccaaactgctaaaagaaaccgcaatggagaagcagagaaccgtagactcggttttcgcagcagcaaagaccactgctcaaagaggagactcgttgcacatcagaatcgtagcgatcaagaaactgttggcaaagctagaagcagagaaagtggacgttgattcaaagttcacctctttaacgacgagtctgtcggagcttctcaaggaggcttcacaggcttacgaagagtatcacgaggcggtgcataaggcaaaggacgagcaagcggctgaggaatttgcggtggagacgacaaaaagagcagaacatatttgggttgagtttcttagttcacttaattgaactaatgagattcttgattgtggttaaagcacatttgcaattagttgtggttcttgtgttttattttcttgtgttgttttgtttgagactttgtttggtgcttatatcaggggagagaggttgacaaacctttgagagagatagagataaatgagagatttgtgaaacacaaataatgttttagtcgtcttataataaaacttttttttttttatatatgctcattgataatactgcaaaaaggtaaaatcatgaattttttttttaaatatgaatcatgttattcaggcatgttttttccaagattgacaattatataggccagaactggcaagaaataagagttaaagtgctaaaatcagaaatcacgtgtctttatttcttgcaattgcagtttattagtaaataaatcacataaaacagagattagttcatctaacattttcctgataaattgacaaaaaaaggacgttgtaaccacttcaatatttattttctgtcggctactaattttatttttaaaattcaacagatttaagtaatattacatttgacttgagtgaggaaaatgttctataatgttgtcattttttttataaatcaaatttaaattatatcattgagttaatattttaaaaatgtcctagaaaaattcacacgtaaaaataaagaaaagagattatcccacacgagtcgctaacacgtgtgacccaaatcatactcgggaaaagcaaaacgatcattatttgaaattaataatgacgtcatcaaaacaacgattaataaagaaggaataattggaagggaaaaaatgaacaaataagaatgagccacctctcaccgctctctcctcgtgcacagctctctgactccgttaacttccgagtctccgagcattctctctctctttctctttctccatcgccgcgattctgctcagctctgagaacggcgcaagcttagattgccggagaaaactttatgcattgtaatgtcttcttcttctttttttttcgtttctttctaattcgtcttcgtctgcttcttccgcaagctcgtgttgttactcatctctctgcatcgacgattttcttctagttttgttgactttaggttttctttagatcttcgatttctcaacatttctccttaatctgattgcgttgcttttccagttttgttgtacttgggagcagcttcaacattggagcatcggcgatccaagtcggaagttcacttaccttcggaaaacgcgactctgacctatcggaaatagtaagatactcgcttagatcttgatcttcattgtgacattggtttttctctcgcggctttttattttccataaccgaccaactttctttatttcgtcaacgcgatttcaatttggaattcgaaatccttgtaactggagcagttagggagtacttgatgaacttggatcaatactgtttctatatatagctgatgattgatttctcttcctaaattgcagtttcattgacctcatatggagtgtgtctaattgctagtggttttgtggcttattgaagtcttgggaatagtatattgaggatgctattgtagtaaagaaagtatggaagatcttcggctatcaccgctgaaattaggtagctttaagtcttcattgtcagggaggtctactccaaggggttcacctacacttaggaaagtgcattcaggcaggactccacgtagagagggtaaaggtagtggtggagctgttcaatggttcagaagtaaccggctgctatattggttactcttgattactctttggacatatcttggattctatgttcagtcaagatgggcacatgatgatgataacaaagttgagttcttgcggtttggaggcaaactcagagaagatgttttgcatgtggagcagaataaacgacgggatttagttgctgatgagagttctcttgctgtagtagataataccaatatagt

SEQ ID NO: 9167 - DNA, 582 bp, Arabidopsis thaliana landsberg
  unsure (1)..(582): unsure at all n locations
ctcaccttgtgtatggtttcaatgccctcgttcttagctgatgtaactgatacacccggtggaggttttggtttaccatcaagctcggcgggggaaccagccccaccgacaaaactttcaaatccccaatcaatcggtctcgtggtgtnnnnnnnnnnnnnnnnnnnnnnnnnnnnnnnnngaacattcctaatggatcatggactgcactcgaagaatggggaccacttggnnnnnnnnnnnnnnnnnnnnnnnnnnnnnnnnagctaccttctgatgagaatgagtttgatttaaaagcctgtgaaacccccaaagacggtgattacgagcagtggttcccgtagaaccgccactgttaaggtatcgacactgcttgaaaattgccacaagtatgaatctgtgccttgatgataacctttgctgggnnnnnnnnnnnnnnnnnnnnnnnnnnnnnnnnnnnnnnnnnnnnnnnnnnactattatgaggtagaccatacccattagagtgcccccaggcatatcctttattgatggacctccaagattagccttaaaacccccggacttatgtacccccca

SEQ ID NO: 9168 - DNA, 1964 bp, Arabidopsis thaliana landsberg
tgctcgcggcgaaagtgaatattccatactattaatataaagacacaacttgtataattgtaatttatctcacatagacaactttgaatcattaattatcgctaagaactatactattatagtatcatttacgtaagacgaatcccacttatagccttttcgaatctccatcggctcttacgaagtcaactgtcgtatctctatataaaaccattcttctccttcttgttccctaaaccaagaccacaagaaagaaacataaaacaatattcacaaaatggccgatggttttggtgaaccgggaagctcaatgcatggagtcaccggcagagaacaaagctatgcattctctgtcgagtctccggcagttccttccgactcatcagcaaaattttctctccccgtggacaccgaacacaaagccaaagtcttcaaactcttatcctttgaagctccacatatgagaactttccatcttgcttggatctcattcttcacttgcttcatttccactttcgctgctgctcctcttgtccccatcattagagataaccttaatctcacaagacaagatgtcggaaatgctggtgttgcttctgtctctggcagtatcttctctaggcttgttatgggagcagtttgtgatctccttgggccacgttatggctgtgctttcctcgtcatgctctctgctccaaccgtcttctccatgtctttcgttggtggtgccggagggtaagcattcttgtgaattgtaaaatttctcaaaaaacttaagattaacttcacttagtcctatataaatatatgtactaatgtacatatgatatgcagttattgaaacaattttaaaagcatttttctaaaaaaccaaaggatttcatctcaaaattaattgacaataaggaaagtagtttatataatggattattcttaatgtgggtttctaacaatattttggccatatataggtacataacggtgaggttcatgatcgggttctgcctggcgactttcgtgtcatgccagtattggatgagcacaatgttcaatggtcagatcataggtctagtgaacgggacagcggcagggtgggggaacatgggcggtggggtcactcagttgctcatgccaatggtctatgagatcatccgacggttagggtccacgtccttcaccgcatggaggatggctttcttcgtccccgggtggatgcacatcatcatggggatcttggtcttgactctagggcaagacctccctgatggtaatagaagcacactcgagaagaaaggtgcagttactaaagacaagttctcaaaggtacttcatcagtacttaagtaaaataaatgttaattcttcttggatcctttgattcttagtcttatatattagggtctgcagatcgttgtttaaattatattattttcattgaatatataaagaaggttgttctgatatagatcttagattaacatttagatagagacattaaattaatccaagaaagcgattcgactaactaaaaaaaaaaaaaaaaaatcaattacgttttcatatagaaaaagcgaaatccttataatactcttccatagattttttgttttctctgtttttttttttgttatagatctttttatttggttaagagtaagactcacagttttctggtggacaaattaaccaggttttatggtacgcgatcacgaactataggacatgggttttcgtgctgctatatggatactccatgggagtagagctcacaaccgataacgtcatcgctgagtactttttcgacaggtataattattaaaactggtatataatttatcgaatccatagtcagtcagtctctaaagtataaacaataataacaagggtttgattgcttttagcatatatagtactattattattgcaatatacaaggattttggttttttcctaaccattaaaatc

SEQ ID NO: 9169 - DNA, 585 bp, Arabidopsis thaliana landsberg
  unsure (1)..(585): unsure at all n locations
tgattctatcgattagcttcagccatctattcatctcctttatcctagttttgtttctttttaatggtcatcacaattntaattngngttaaacatgtatctgcacttataacaaagtatatatccaccttgatagttaaaactctgatactacatatatgttggtacatcaattttgttttagtctagtctgtgtctggttcttaatgagtattggttctcatgttacatagatttattactagattctaaatggttttgaaatttagtgtatgttttgtgaatttctaaagtttatagagtgtacaaatcatttttcaggttttgatggataagtcatggataaacaaactacatttatctcaagattatatattaggggtgaaacattttttagattatgcatttgataaattcaaagtagacgtgatgaaatgtccatgtaattgttctctcgtcgaatataagtcaagagaagatatcgaaggtgatttgatgtgctttggctttttaagttcttacacaaattggatattacacgaagaagatgtatgtctcagttctcacacgaaatgcaagagtacc

SEQ ID NO: 9170 - DNA, 1178 bp, Arabidopsis thaliana landsberg
acacatgtgatgattactgatgtgttgcttctacttaatgttgtggtggcccttagcaagcacgagggggatgagtaatggccggcagataaagatggtagagtgggatccacaaccaaagaaagcttctaattatttattagagagttatttgaacatgttatcagagaatctccattttatacaagattttcagttaacatgtttttggctgagtcactttatatatttcaatccattagacatttctatctttaatttttaatatattagacatctcctgatgattgaaactgaatattaccaaggactcaaattgtgacttagataatcagcaagttttatataaaaatgtcaaatgtaactatggaatgaaggagatccatttgaattatcataactcaattacattaattatctaaatagtgatagagtcttactcgaagactcttaactctgagtgaactaaaaagccgacacaccaatccagtgaggctcaacaccaacacacaatgaagtaagatcttaacgaaagttgctgcaagctgaaattcactagagatcatggagatgggccaaaccaccacatgaatcccacatctttcctacttttatattcaatcaactaactttaaaatccatgattgattaacactccttcatgaattgaaattgaattctctagattttacaattcgatattattgtgtggatttcaaaatctatacaattaccttgggtttttattctaataatttacttatgaaactttatgcgatttcatttcaaatgacttcatatacacatatttcaaaagtaatttagttttgaagaacattggattttaatgaagtatttaaattttaaaatatattaagcacaattaacaaatataagattttgaataacagtgctatttaacacttgtagaaatgggtaagtcgaaacttctaagatttcaaagtcaaaagacaacattgttagttattgacatttcttttcaaactgaaattggagttgacgccattaaagaccaataggcccaaaattaaagggcctataccctttttctgagttataaaatttgtagcctcaactcttaaggacccaacattgactcttatgctaaacttaaatatccccaagatacttttcaccgacaacttatggtgttcaaa

SEQ ID NO: 9171 - DNA, 468 bp, Arabidopsis thaliana landsberg
taaagtgaaagttttccttaaaagtgtaaatagcttagagtcaatgttggggtggtaccttgaggctgcgaattattcagggaaaagtctctatgccctttaattctggcctatttggcttttgtggcgtcaactccaatatcaatttgcagcacgtacacaatattttaaaaataatcgtaccaaaaagaaatttcaataaccaacaacaatgttgtcttttgactttgaaatcttagaagtttccacttacccatttctagaagtcttaaatagcactgttattcaaaatctttttcattgtacatcattaaactctatgcaaaaggagaaatacattataaattcccacaatctgcattcattagtatggaaaccagacttttaagaatttggtttattttgtcaaagttccacatcaaaaaaggaattaaatatagaattacacatacaaagcatatgataatt

SEQ ID NO: 9172 - DNA, 1585 bp, Arabidopsis thaliana landsberg
actatgggtccataagctcaaaaattaagtcctctttgcaggacacttaccaaacacagcagtttctggaaaagaacacagattatgttgatgcagatcatcaggctctgctaggagcttctacgtgcacttttattgcaggtctatttcctccattaatggcagatgctaacacacagtctgagatctattctatagcttcacaatttaaggtgcagtgaaatgagatagtttttatgtaaaaatcgagcggatacatcacaggattactaaattaactgtcttacttttatgcagcaacaattggcatcattgattgaaggtcttaatactactgagcctcactatattcgttgcgtgaagcccaataatctcctgaagccttctatctttgagaaccaaaatgttttgcatcagttacgatgtggggtgggatttccatattttagttttctaataaatgtgcttgtcatagttacatgcaagttttaaattctagatatgcatatctttcagggcgtgatggaggcaatcaggattagctgtgctggatttccgacaagaaaaaagtttgaagaattcctcgagagatttagtgtcctggctcctgaagttttggataagaggttccctctcttcaacttaaagttatgaaacttacctagatattgaaaacgttctaacttttggttggcctctttctagtactgatggttggcctctttctagtactgatgatgtcgcctgcaagaaacttcttgaaaaagttgcactccaaggataccaagtacgtttttgaagcgccatgtgttgaatactttgcattgtggccgagctttaaaactcttatgttaagcgtctgattgatcctccttttatgacgcgcctttgtttttccagattggtaaaacgaaggttttcctcagggctggacagatggctgacttagatgctcggaggaatgaggtcttaggcagagcagccagcaggatccagaggaaattccgttcctacttgtcccgcaaaacttttcttatgcttcgcaaggttgcaactaatatgcaggctgtgtgcagaggtactttaaagtcaatagtttctactcaggcaacttgaaatgttactaattattcatcccctgctttgttgtacgtgatttgtaggtcactttctcggcttactttgagggcatgcgcagagatgcagctgttttgaagattcagagagacatacgaatgcatcagtgcgcggaagtcttacaaggaattatattatgccgctgtttccattcaattaggaatacgtggtatggcttcccgtggcaggctccggttccaaagtcaggccaaggcggcccctatgattcaggtactgtacacgtttctagagttgtcagtactacatgtttcttgttttatgcttggtccatccatcaattgaaatgagatggtcttctctgtcacatactgcttggatatttatacttgaatctgtctctggtataagacagagtcatagtggcaaattcatggcccacatgcactcccagaggctcgagacagcagcagcgccaacacaaagtgca

SEQ ID NO: 9173 - DNA, 1435 bp, Arabidopsis thaliana landsberg
agactgtcagaggattgccgaagctgagtcatgatagttcgtttgtttgtggaccatgtaataaagggaaacaggttaaagtctatcacaaggtggtcccagacattgggactactcatgctctggagctgattcatatggaccttataggaccaattaatgttcagagtcgagcaggcaagaagtatatctttgttatggttgatgattttactcgctatacctgggtccggttcttgcgagaaaaatcagatgcatttgagagttttcgagttttggctttgcaactaaggaacggacgggcaggtattgaaacaattcgaagtgatcacgggggtgaatttcaaaatgaattcttcgacaagttctgtaatgatcagggaattgttcatcaatactctgcgccaagaacacctcaacagaatgggcttgtggaaaggaagaataggactttacaggagatggctcgagcaatgttacatggaaatgatgtacctcagcatttatgggatgaagctgtcaacaccgcttgctacatcatcaaccgggtgtatgtcagacagggaacaactaaaactccatatgaattgttgaaagggaagactccaactgtgacatatttccatgtcttcggatgtacttgctatatactaaatgacaaagatcaccttggaaagtttgatgcaaagagtgatgaaggaatcttcttgggatattcagaaagaagcaaggcgtatagagtattcatcaaacgcacaaaactgatccaagaagtgattaatgtaagctttgatgatatctatgttccaatactaccagttattcaaccaacaaacaatagtgtatcagctgatcgggaatctgaatcatctactcaaaagtctgataaagaaaacagtcatccagagcagatggctgaacaggaggcggatacctctgagagcgatgattcgactgctgttcctcgaaatcactccaaaaaggatgttataggagagattcagggggaagagttacaagaaacatgaaagtagactatagacaacttgcgggcaagcgacagacaatctcaccgactaacacagaagtagttcagtttgcgtgctttgtgtctagtattgagccgaagaatcataaggaagcactgattgatgaatactggataacagctatgcaggatgaactagaacaattcaaacgcagcgaagtgtgggatctaacccctcgaccggctgagtcaaatgttgttggtataaaatggatattcaaaaataagattaatgaagatggcctggtggtcagaaacaaggcaagattggcagctcaagtgtattctcaagtggaaggggttgactttgaagagacatttgcaccagtggcaagattggaatccatcaggtttctgtttggaatgtcatgtgctctaaatttcaaa

SEQ ID NO: 9174 - DNA, 1927 bp, Arabidopsis thaliana landsberg
agaactccttttaaaagtagggaagcctagtgtttttatgtcgccactcgtatcgtttccaccaggtagagtaaaggcagctgcaaagaccacagttgctatcagtgttgatacaagcatgcatgcagtcgcagtttctttcatccatttctctccttctttgcgtaagttgtcatgctctttcgtaaatagatcatgcgccacctcctcttttttgttctttgttttgatgtatacacgaggaactatctctttaacagcctggaaagtcattagaagttttgaaagatatatacaagatgttaaattatacccattgtggaatatgtttagcataccttgtaccatagaatctctctttgcatctgaagtgctgctcctgatacaacttgtaacctatttggaggtggtaaacgtgccacaagatgcaacaagttgttgttggatcctttctctttatacatagctatcaaatctttgatggcccgagttcatagattatattaaagattttttcatgacgatttatagcagcaatgtggaacaagcttcggttcttacgatccaccgtccatatcagatctggataagaacgaatgagaataagtaaaagctcaagatttccagattgtgcagcatcaaagagtagcattggagatgatcccacaaattgcgaaatttcctccactggcaattttataacaaaactccatagctcctctaccaccatatgagctaaagtccgcattttggcttcacgaaatacccctttaaaaactaaatggaaagagttcttgtcaggtgtgatgttcaaacaaaggtttagactataggttatataattctcaaactttggtcacttctgagcacttgttcctactacttatatatatattttgatatgaaaagaatgagttaactaagaggtgtacttgtgagaaactcgttaccaaacgacctgttcaccccaaggttaatttgatattatacctaatgttatacttaaaaaaaacattaagtgcttttgtccacttactagaatttgcaaatttctgaaagaagtttagatgttttcgacgaccaactgccgaaggcttgcgagccatcaagtgcaaggctgtctctttgttactagttttccaaaggcctagtacgtgtttcctttccttgttctttaacatctccagagctacatctgtgaatagacctcactgagaacatgcaactcggaagaaatgaaaaaagaaaagaaagaagagaaaactatttaagagctgattatatatttaccatagatatcagctgatatcacagcatgaaagagatttacaaactcttcatcattgaattctctaaagcgtgtattcttgtaaaggtatttaaccatttctccatgaccgaataaggctgccatgtggattggagtcgtttttccacctccacgaatcatcggaagatctttattcttctcgatcagcattttagcaatctcaacgactcccgatgcagcagcaaaacataaggctgtgttgccgtccacgtttcgcaaggccaagtcatttgactccaagcttccaagtagatttcttacaaacccctcgtgctttgcagcaacagcaatgtgaagaacagtctccgatttactggtgattttttgatagataatatctttttgttcaatgattataccattggctgccttccaatctcctttcagagcagcttgatagagttggacacctttggctcgtaatttatctgtaaacaagaaaaaaagcaatgcgagaagacaatagatcaaaagaaaaaattgaatcaatcaagagaggttgtacatgaagtgttgcataccatcacatgaaaagtttctttgaacattgtgtagtggactgtgatgtttattaggacatgacctagatgtctgtcc

SEQ ID NO: 9175 - DNA, 554 bp, Arabidopsis thaliana landsberg
actgcaccacagaaacaaatcagtagcaggttcatttacaactcctaaatgataaccttgaattgctaaactataatccataacaagaaaatacaaaacaatttctcccctacctgaattactaccatggtcccaacagcagtagcaacatgagcagctcttggactaggtggttctccataaggtgtaagcctataccatcatttcatcatattaattcaacttcacacttaacaacaaatcactagatctcctaccttaaacagcacaattcatatcttctactcacctcgaccacttattagaaagaacatcataacaatgaacatcagcggttgcaccagctaaccctgcataggaaacattactcttatcacatcagggcaagtctaaaactgatgcaaaatcatactctaacatcaaggaatgatttcagaaactaaagcttatagctttatacgaaactaaagcaacgagaaatcgaaaaacatacgaatgcccgcactttcgctgagtaggtgttcccgtccttcagaatacccttagagcagtag

SEQ ID NO: 9176 - DNA, 1118 bp, Arabidopsis thaliana landsberg
cctcactatttcttcagctgataggcttggatctttcttgagtttagctgccaagcttgccatctccgtagcttcattagacatgaacaaggaagagaaatctttctccacaagcgatgaaagcttcattcgagcttctgtccattcgtaatctctcactggagagcttgcactaacgggaagtgatgatgaagactcctgtcctgcttctgaaggctgttgctgaagaagattctctagagagttcagataactgtcaaactcttctgggtttatatccacaggagggtgagagactgcaatgacaccgttcatagaagaaacatagatatgcggaacaaaagcctcttcttcttcttcttcgtctgcatagttacctctgcgtttcttcatcctcttgctgcctttctttgcaactgattccttgttttcttcagtcaagtcaaacacatcaccttgttgctgtcttgtgtaacgtttcgaggaagattcccgagctgacttatgttcagcagctggtgttgttgtggctgtctttttcctgttgctagctcgcggagttgctttaggttcattagtctgtatctgcacctgttttctcttcctctggctgtaacgcgaagttgatccttctttttttacatcctcagcatcctcatcttgattctgtccttctttggatgtctcttcaaacagagacgcagcatcaactacagaaaaaaagaaacatcattcatgtgttgcagatagagttttatggctgacgcaacagaagagtgttagttgctacctctttctgcaggctgaaacaaagccggaatgttccaggtaaaagatgcaaagaatgcattagcatccatatcagggaaactagtttcgagataacgcgaaagagtgtttttgcttgcaaaagatttgggtacattcttgcccttaagcctctccgggagaatgagtaagcgatccttatggaacccggcattattcactctcctcccaactctccaagtccaaacatcgccggggctcgggaaatcgacaggtgcaaaccgcaaaccttgaccactagaagctggcggaatcccccggagttgattttaattagtgaatggagtctt

SEQ ID NO: 9177 - DNA, 881 bp, Arabidopsis thaliana landsberg
ctcgatgttggactcgccgtttttattatatgattcacctttgtcgatccatagtaaccctttgagctctctgagcacggcggtatagagatttttgagaagataatccggtggatctggaccgctgaatccgtcgtaaatcccgacgaaaagccaaccgttttcctcggagagaatgacgtgtactcgatcttcacctgctttcccctgtgcccattgtatctttggctcctctaaagcagactcagtcttatcttcttcttgtttgattctaggtttctcatggctgctcacaatcgtgcttaaggagttgatctcaggtatgtcacgatcagtatctgatgatccgtcgaatgaatcggaaccgttgattggcttaatcacactcttcttcgaaaaagttaagttggtgagaacgtttttgaatgtaagaaatttcctgtgagattttggtttcgtgaatgatttgcttccacttttcttcagttttgctttctcctttttctttttccctgaaaacaatccgctttctatggggccggataagaaccggcgttcgaatagacccgactcgtgacccagtttcttaatcggaccacgtggcacaggctggagaggcaaggaagcgaatctattggagctctcgaacgcggaggctaatccagacgcgtctgttgacggagaagctgagagcaccgttgaagtatttgcgctaacagaggcgccggagattgagcggaaagtggtggtggttccgggtatcgggtcgggtcggaggggcggttccggcgggaaagaagattttgatccggtgagaactggacgaacgtagcagaaagagtggccgaggttttcttgaaccagtcctactccggttacga

SEQ ID NO: 9178 - DNA, 759 bp, Arabidopsis thaliana landsberg
acaccgggatgatttttatttttttttgctaaatttgttaatatcattagaatgaacaatgtgattttacagagcaaaaccaaaccaaagcaatcttggcaaaaaagtaaaacaagattacaatagagttacgtaagatttgggtggattaacggatccaaagaagcattaacgaccgccaacgcgcccggtgccttctcgaggtgatgatgtttcgaatctcgcggtcaatgaacttgaagatgagggccggagcaagacgctgaagattgtgaagcagattatttcgctgcctccaaatattgtagaccacatgatttcgctgcctccaaattttcaccttcatgatattctggttttgtaagagtttcttctgcacataattttcgactttataactcatttttatgacctattaatagtcacctctgagcaattgattttcacaaaatcagaaactggaaaaatctaagcaaaatctcttagaaactggaaatatgtctgaagctcacaaaagattgtcgtctctacttaaaacactcaaaacaccaactatttcgcgtttcgttgaagacagatacataaccagcaaaagtgataaatgatcttcagacaatggcgttagcagcactagcaatccttggccagagatccgcacactctttcccaataggtccagtaattgcagaacctcaaaaccaaaacaaaccaccaacatatttcagaaaacaatgtactgccaagatatgtttgacaaag

SEQ ID NO: 9179 - DNA, 1244 bp, Arabidopsis thaliana landsberg
  unsure (1)..(1244): unsure at all n locations
taaaaattcactacaagaacaaaccagtcgagatcagacaaacgagaaaaagctaggtacggtttaagacattttcttacaacacaattaaagagaggaaaaacgaagcaagacgatacaaaaaacaggatttatagaagcaagcttacggcttaataataacacagcgtgtgtttgtcttacttgatgtattgagaaacccatttgaaaccttctccgtaacccattttcctgacaatgctgcacatgaaaacctccaatggcctaacgttcgaatccgttagattcactttaccctttcctgtagtgaagttggagaggccgagatggtaacggagctcgtcctctgatgcagcatacggtatgtctatcttgtttcctagaatgaggaatggaacgctggctagggattcgtctgagagaagtgcatcaagttccttttttgattctgcaaatctctctttgtcgtaagcatcaactaggtagaccacagcgtccacctgcaaaaacagagtaatcatcaaaaccgacggttcataaaactcttccactgaaatagcttaagtaggttgaaacatttggagtttctgaatcctctatgactcaatctttgacaagtactcaataacaagtgaatatatgatgcattgcgtgtgagctaaactggtataacaaatgagaaatctttaataccaaccttagcatagtaatccttccagaccctgcgagcaatctggtgaccacccaaatcaaaagccttaaacttgattttcccaatgctgagttcttcagaagttggatgctgcgtaggctgatgctgtaccaatctctgtttcaccaattcaaccatgttcgattatcgatcagttaagcaattaaaacacactactcaaggactcaaaattcaagcagtaaactcagattcctaaatcaaatttaagcatctaatccagaatcatataaaaacaaaattggagatcgaataaggttagggaattggatcgattagataagaaagatctgaataagaaagtgagagcgaacctcgtctttcaacatgtgaagcagagtggttttaccagcattatcgagtcccagaaacaagatcttagcctctttctgccataaccctaacgaagcgagaacgccatagaaccaatcgatcatgaacatgactaactcagatcctccaaccacaaagctcanatattatccgatcgagagagagagagagagagagatcg

SEQ ID NO: 9180 - DNA, 1117 bp, Arabidopsis thaliana landsberg
tgatagttaatgacgtggggaacatgtaccgaccgacggccgatttccatgatacaataaaaaaatgaaaattagcaatctcataacatgcgacgacgatacttatggtgttgccacgtagcaagcatcttgctcttaaccatgaggtgtggcaacctcagaggacaacacggacaagaccgagaaaccgcatactaacgcttgcaacgtaaagcacaacacccctaaactccgatttttttaattttcttttaacctcaacacaccacgcagctatacacgtttcaatgtgctaatacgtgtcttcttctacgccgaccaagacacactacaaatgtcccgatggtttggggagacaaatcacagtttctactacaacaacaaatacttttacgaaaaaagcttttaaaacttatctagtttcgtttgatacacatttgaagaaagaaatggcatccaaccaacagagctacaaagctggtgagaccagaggcaaggcccaggtaataagaatatatttttgtgtatgtgtatacgtaaaaccacattatataagctctaagatgatttgtctgtgtaataccaggagaagactggacaagctatgggaacgatgagggacaaggctgaggagggccgggacaagacttctcaaacggcccaaacagcccaacagaaggcccatgagacagcccagtcagctaaagataagacatctcaaactgcccaagcggctcagcagaaggcccatgaaacggcccagtcagcaaaagagaagacatctcaaactgcccaaacggcacagcaaaaggcccatgagacgacgcaagcagcaaaagaaaagacatctcaagctggcgacaaagctcgcgaggccaaggacaaggccgggagctacttatcggagacaggcgaagccataaagaacaaggctcaagacgctgctcagtatacaaaggagacggctcaaggtgcggcacagtacacaaaggagacggctgaagccggtagagacaagacgggtggattcttgagccagactggtgagcatgttaagcaaatggcaatgggtgcagctgatgcagtgaagcaggggatcctctggcctgcaggcatg

SEQ ID NO: 9181 - DNA, 1005 bp, Arabidopsis thaliana landsberg
accttagaatatgtagaatatagtaactcgtatgaataatagtaaagagatattctggaaatatatcaaattctgtacatagtgactgaaaagatggtcaatctctatcaaatagaaagcagtaactaaaacagtatagcataaagtaattttatcgccacacatctcaacggaaaacatcagccatacaattagcacggttcagtctaaattctaaatcaactaataataatacaaaatccaattcacagaataaggctatgggaaaaataactgtgctacatgtgttctgttctcatgtgcaacaatatccataatctagaagagtttacaaagaacagtgtccttttaaaagaagagagaactctacctgcgccttttgtagaccttcagaagcctcgacaataattttacggtccacacagatgtcacttcctgattgcaagcattttttgaaatacctggatgcatcttcaatctccccaagtgaaaggtaacaactagcaagacaaggggccaaaatcagtcaataagacatcataaaatggtaagatattattacttattgctagctgagaaagagcatgaactagcaaggtatccaggacaactccagcttagagcataaatgagaaaagataacatacattcatttctcagttcaagctctcgtatcaaaactaaaagtcactaataagactttttggcacggctcaatagaaaatataagaagttttaaggaaggtcgatatttactttgcagctctgacttgaactttaaggaagttggagtctattgaagaagccatcgtacaatctgctattgcttctctcattcttccaagggccatgcgtgttgcagcacggttgctatagcaaagcattaatgccctgagacagtttctagaagtttcgattctaggcactgaatcaatcccttgagtgtaagattcctcagctctggaaagatctccaattttataagcattgtttcctctggagaaa

SEQ ID NO: 9182 - DNA, 983 bp, Arabidopsis thaliana landsberg
aaatttatgttaaaatatgaaactactactataacttatatttataacatatatatctaccatgaatttataaatttgattcataaaataaaatttacaattaactttaatttattgttatttaagtttaatttctttgttccaaacattttttaaatagttacctagatagtttattcctatttattgtttgtactttcatattctgattatccaaattttctgtttcttaatttaattcctctttattagtttcattcatttttctttttgtttcttagtatttcttctagtggtcaccaatctaaaacttcatataatgcagtctaaaaaaggatccttatatgtaagactaattatgtatttatttattattatatagattttatatttatatttatttgaagaaaaaaggactttcaattgttctatttaaacttgaaaactagcttgatgatgaaccacttctgcctagcatctgttaagagctaccagaaaaatcaagttcgtcattttcacacctttttttttttttttttaaatttctcatcgatcaatttgtatggtttacgattacgtgccctctaagctttctctgtatttcatgtgattttaattgacaacttacaagctttaagtttccagtttttcttcatgtgattatattttccttttctcaaacatcgtaaccatacacttatagctttttcaacgtttttatgttgatctattagctaataattaacattttacgtgaaaaatgaagggtttaaggaaatttcagcaaatggccaacgatcagaagaatagtgagtcttttccagcgaaggaagatcataagaaggatgatgcggcagcttcagcagaagtagaccataatgatgaattctgggcctcacagacacattcggtcgaaaacatagtattagttgggcgtacaggggacggcaaaagcgccacggcgaacagcatcgtcagatcaa

SEQ ID NO: 9183 - DNA, 1364 bp, Arabidopsis thaliana landsberg
catcccagccaaaagaacatcagtcatgtaggttggtgcccatttcatacggtcttcatataaagaaatcatccattgatcatctttgagcccgaatctagcaagattcttataccattttctcgcaaagtcttcatctttccctgatttatagatgcacttctcaaacttaggcataaaattatcatgttgcttaacaacttgaccaagattctcagaaaccttcatcaatacatgccaaagaaaaaggcaatgccgtgtattggggaagatttcgggaacaatggagttcattacaacgtctagctcagtgatcaaaacctttggagcttgtccaccgattgctctcagccaggtctccattaaccaagaatatgttgctgcactctcatcggatattaaggcgcacccaaggaccatatactggtagtgctggttcactccaacaaaaatagcaagtggcatcttgtacttgtttctcacgtaggtggtgtctagagaaacaacatcacaaaaactgccatagttatgcctgctctttgcatctacccaaaatacattcttcactcgctgatcatcgcccagatctactgcataaaagaagttggaattcaaggattgcatccgtgacaagaagtcaagcaggattttgaaatcccctgtttccactgataaagtccgacctttttcgaaagaacttttcgaatcgctttttagacttataacagttttgtactcagcaaactgcttagccattgcagcatatatctttctggtctgttcactcacagcttgtgcaggtaaaagctcatgattatgctccctcacaaagctgtgaattacccatttcccatccggccttctcttaacatgcatactagctttgcaatcggttttcgcacatgttctcctaccagccatattctctggatcttgcttactttgtctagctcgtggccgattaaaagatttgtcatattctcttttagtgccatacctagagcaagcaaacttcgcatcaataaactctcttgtagttttcgatctacgactgttctgtatcgcagtgttaaaccccatagctcgagaatactcctggtaaaacgaatacgcttcaccgtgtgactcaaactccataccattaagaggttcaagattcataccctcagtgtactcaaccaactccccagttggaacacccatgcctacactgtcatcagtattaacctcaacagaaacatcctcaattttgcccatatccatatcttcttcattgtgtaacacattatcaagtcctctatcctcatcatctcctttgcaaggtcacctgaatgtaatccaagatcttatccatgacaaaccta

SEQ ID NO: 9184 - DNA, 1845 bp, Arabidopsis thaliana landsberg
ttcttatttcttcaaattgatcaactgtcttagtcaattatactacaaactttccaaaaaatcacagagactaacataaagagcaaaaaacagaggaactgattatagagaggactaacctcgaaatgaacggtgcgacaagttttagaagcgtcaagagtgtagtagaaagaagtgccattgttccattcgaggtcataagtgagcttaccaagctgcttctgaatgatgttaaagttacgtccattgacccagtcataccaaagatccacaatctccaatgaccctgatttgttcatcaacatcaacgcgtggaactgctccggccataccgcaggaactggctccttctccggctcagtaccggcggatattttgtcaccgacggagagaacgaggaggaggataacgatgaaggaatggattggttttaagaccatgtcgcttgatgagttctggttcagataaatgatattaactcactgtaacgttatcattcatatatctttccacggtggaatatattttattaaatacaaatattttatactatactttaaataaaatttgataccaatagaaaaaaattaagttaaaaatttaggtgtagatgtaaagataatatgcaatgcaaaattttgaagtaagaaaaaaaatattagataatggattttaaaacgaaacggaataaaccatttttatagaagaggacgacaatttacagcataataaatttattcttatgtaaaaatggtttatagtttatccaaaaccgatttcttttacttttttccgatttgcactactacaaactttaatgatgataaacaaaagcgttttaattcacaaacagatttgtccgtctcaaccgtcgtaactattcgaaccttacatatataactcaaactggaaaatacacatcaatatgttggggaaacaaagaattgtcaacatttcttcttttttcatgtaaatgataatttgttgatgagatattatttaattaacactcaattatggaaaagaaaaaaatagcaatacgttctaccaagtttgagtgaacaattggacaaagcgttcttggtcgcctttgaaccaaccaactaaccagtcttctttaacctttcattaacgacactaattaaaaaagaaacaccaaagcactgtgagagttcaagaagcaattaatagtttgagctaaaagcttttcttgcatgaacgattttatactaatccttaaacacacttccttaatctcttcttaaatactcctcaacaagctctcttctcctttatcccaaatcacactcaccactctctcttctcaacatttttctccaacaaaaacaaaaaacaatgactccttttgctctgttcctcttcactctccttgccctttcaagtaagtctccttatatatacattaagattacttaaaccataatctttctttttataactcacttatgtttttttataggttcatgttgctctgccattggtccacaaaacaacagaacagtgttagcacttgcaagcagaattgggatcaactatggaaaattaggcaacaatcttccttctccttaccaatcaatcaacctcatcaaaaccattaaagcaggccacgtcaagctctatgacgccgatccagaaaccctaaagctcctctgtacgaccaatctttacgtcaccatcatggtccctaacaaccagatcatctcaataggtgctgatcaagccgctgctgataactgggtcgccactaatgtccttccttttcacccgcatacccgaatccgattcgtccttgatggcaacgaggtccctagctacagttctgat

SEQ ID NO: 9185 - DNA, 800 bp, Arabidopsis thaliana landsberg
cctattgcaaaagcaaagctcctaagtaatcatcaagacatcaacataacataagctaagcaaggccatgatctgttacttatatatgctgcaccaatgtcgatacttcaacatcttccatttcaaacagcagatgacattttggcggcagaaacatcaacatcatacccggctctaggggagtgccagaggtgctagtgcacatggtcctcatttttttttcttaattttaagtcttctagtttgcagattttttttttgtttagggaaaaactacaaagaaaacagccaccaaaataaaagataataagtttaaaataaaaatacagtaaacacatgtcacataagattattttgtttagatttaagggccatttttgtttgtagcacagggcccaataaaatattgagtcgggcctgtatgtatgtcatgatcagttgatcacaaagagcgcctcggtttaatcttgttttccctgccgagggtgaagtagattgattgatcatgcatttgcttgatcgccttgttcttcttctaggtttagtatttatccattttattcaagtattttgcatatcacacgtttccgtttcatacattatctgtttgtgtcaaatttttgatgaaaagtcagttccttcacttcattcttctattaaagaagacaattaagaaaaatattaattatatgtgcctattggaaacgatttccatttcttttttttttgccgatttaccattttgcaagggcttacattaattaatttctttgaaaggtttttacaggaaaaaaaaggaa

SEQ ID NO: 9186 - DNA, 1193 bp, Arabidopsis thaliana landsberg
tgaatgttgctcgtgctttattctttgagtccaagatgccattgtctcattggggtgactgtgttcttactgcagtgtttctgatcaatcgaactccttctcaggtactctctaataagactccatatgaagttctcacggctaaacctctagattacactcgcattcgaacttttggctgtttgtgctatgcttcaacctcacatcagcaacgtcataagtttcagcctaggtcaagagcttgtgtttttctgggatatccttcaggttacaaggggtacaatgtcatggatttcgagactaacaaagtctatatctctagacatgttgagtttcatgaggattcctttcctatggcagatttgaataaagaagctacagtgaacgatgcagataatgatcttcaacagatgaattctttgccctcaggtaattcgatcattcctcatcttccatcacctcaaatttctccatcaacacaaatttcttctcatagagcacgaaaaccacctgctcatttaaatgattatcattgttactctcttgacaatgatgtcacccaacatcccatttcctcttctctttcatattccaaactctctccatcacatttgctatacattaatagcattactcaaattccaatccctcaatcttactctgaggcaaagaatttgaaagaatggtgtggggctattgataaggagattggagcaatggaaagtacagatacttggaagattactgtgttgccaccaaggaagaaagttgtgggttgtaaatggatattcactgtgaagttttatgcagatggaactcttgagaggtacaaagccagaattgttgctaagggttttactcagaaggaaggcttggattataatgaaacattttcacctgttgctaaaatggttactgtgaaaatgcttcttaagatctcagcttctaagaaatggttcttgaatcagttggatatctcaaactcttttctcaatggagacttggatgaagatatctatatgagagttcctgaaggctatgctgagagtaaggggatcattttaccaaagaatgctgtttgcagattaaagaaatctatctatggtctgaaacaagcttcacgacaatggttcctcaagttttcagcttcacttcgtcagcttggcttcattaagtgtcatggtgatcatact

SEQ ID NO: 9187 - DNA, 1501 bp, Arabidopsis thaliana landsberg
  unsure (1)..(1501): unsure at all n locations
tttgggttgcacgtgaggatgcaattttaatatcgtgaacaacccaattaagaatttgcttttttgcaaacggtcaatttggtcacactgggagagttagagggcttcaaatgatgaagagattgagctcccgtaaattcactttggttgcttggaagctttggttaatgaactcacaagtcacgagtgtcgcatgtgtaaaactagctagagatctagcactagtttgagatctcgaccgtgaataatctctcacttctccaagtactcgtggatgtgcccgcgactcaccatgagtccgcttgcgccaagaagctatcaagctatattgccttcaagtgcttgtgaagcaaaagtggaattatctttacaatctttatattgcatttatgaatgtttttccactttcatttacaaaactttggatatttgaatccttgtactatgtttttcatttgtctttgaatgaatgaaatcaagtattgacacactaaaaaaaaaaaagtacatactattttgagattctgattaaaatcgaaatacactataaggtctttagaccatccacattgcacatctgaatgtttgtgtctttctttaaaaatataattattaaaatgtttggatgtttttaaatgatatcactctcaaaatgtcttaatgtgtctcaattaaaacattttgggaagggagtctctatttaaaaacaactttcacattttaataattgaattagtgtgggaagacacatatgttagttatacaatgtggatgctccttagagaatagtgaattcttgtgaaacagctttatatatatcaccatcaaaacgtagatcgtcgaattgtatcaaaaaattcattcccttcttcgtgttcgtgtgaaatcgaaaaatatatagtttagaatcatcaaagtttgagtcgtcaactacaactaaacatataatctcaatattagccttctcagtttttttttttctgaataactaaaaaaaaaagggtccatggacaatttgtgaaagaggtaaatctcatcaatcattgaggagactcgtgaaagagacccatcactaacgtccaagcaaaaatttaggaccaccaaataaaattataaaaagggcataattaagtacatacgcaatatgtaacaaacatgaatcgaaataacatgtttttctcttttcctgtttaaaatcaacaaacaaaaaaagacggtatttgttttttggaacttcaaataatttgtcttctttgaatcaatcaacaatggtacaatgaccacatatcggtactaaaaagggcataattaagtacacaattatccactttaatttggtgttttactacgcatcagaatttatagttatcatgaggtctaaaatacaaaagcgtgtccttattggtccaactttagggaaatccaacacatgtcctaatagattcattggnaatataggaagcactacatatatatgacatttcagcatttctagatcagt

SEQ ID NO: 9188 - DNA, 1495 bp, Arabidopsis thaliana landsberg
cacgggcttatatgctacctcaaaacgggggatctatgcctcaccagaactgtgtacattgatcgtgcttccagcataactgctttctgcacagcgaatcatcgcgttcaactctacaaccttttaagtgaccatgacatttcacaggttagcttgccaaaaggcttattgagttctgtatctgatagatgaatgattgtactatgtaacaaacctaacatatgcaggttcaaatttgcgatcatcatccagacgatggtgatgaagtccgggttagtacattttgtttcttctctgtaagatgacatagctgttactagtaaaagatccactctctttcagttttgtaataatttgaagaattatggaaaataggttctcgtgactgcggttgctctctctcgtaatggctcagtaatgactacagctgaggccagatttgctggaagcaatttcagtgaaggcatagtttctctcaagttttgggtatttgtaccggacagcaaaactttcagcttatcgacagtcataaatcaacctcacaggtttttacttcaatgttcttataaacttttagactccttgattctcatcgtgagtgtaacttttgatccttcggtattctcacagggaagctgcaattacagccattgcccttaaccccgcccgttccatggctgttagtatatcttctgctggggacttcaaggtaggattacagagtagtgaaaaatggatcatttccttggaatatcgtttgaccttttgtgttactgatatgactttatgtctgtcaagatttgggtttgcagtagcgacaagaatctgacacctgaggactcaaactggatttgtcatggagttggctcttataagtaaaagattaggaaccttttaacatctctcattacttagtcgttgtgatgtcaaatgaaattgatgtaatatttttcaggagaacgccaataacagctgctgttttttccggggatggttcttgtctggctcttgcggctaaaacagttattacgatctggcacccgttaaagaacgaactcctgtatgtagttggaaaggcaaatgcggtaagacttgtataacacacaaaagcaattccatgttcattagttacagtcattgttgaaatcttaaatgatatgtaaatgtttcagccaattatggaactctcattcactggaggaggcttccttattgctgcatcccatggttccacaccgcacttatctgtctgggatctgatgacgttctgcttatcatggtcatatagattatacatagaaggtttattatttatctttttgatcatgacatcttgatttttttggttgtccaagcatatttcatttttcctgtttatttgcagccattgctactgaagtggactcaccatactttgcagttttaacatggcttccagaatctgataggttgggaaaatctaacgaacagatattccgcgggaaagatggtgcta

SEQ ID NO: 9189 - DNA, 536 bp, Arabidopsis thaliana landsberg
tttacatacacgcgcttaggggaaattataactaactgtttttcaattcaattaatcagagaagattttcgaaattttgcaagagtttgttttgaaaatttcggagacaaagttaagatgtggacaactatcaacgagccttatgttataagtgttgcgggctacgacacgggcatcaaagcggttggacggtgctcgaaatgggtgaatagtcggtgtcaagccggtgactcggccatcgagccttacattgtatcacatcaccttcttctttcccatgctgcggcagtacaagagttccgaaattgtaacaaggtatactatatacaaattttttctaaatcatatataactcacatatatacacattaactatcgaatttgaatctggattacacggcagtggtcaaaaatatacaagttcatatataatggaaatattttgatgatattgtttaattgtattaagaaataaatcaagtgtgtttcatgggacagactttacaagatggtaagattgggatagtgatatctcc

SEQ ID NO: 9190 - DNA, 1085 bp, Arabidopsis thaliana landsberg
tgatgttcagattttcttttcttcttaattggtatagttttattttctttttaaaatgtttggatttgtaattcatttagcattccattctaataagatttatctttttctttttaattatctctttacatgatactactatactatttgtttaaacaaaaaatatagatatacatgcatattccatatttaattaatgggatcgaaattcgacattaaattaatgtacctgtaaaaaattaaatgtacaaaacgacagaaaaactcaaaaaagcagattttaaacgttatattttccaattttctactgcctcctgaaaaattggatttggacatgtctgaacattactcaaaataaataaatttagctagtttttgaaataagaaaacatagtaagtaccgctttgaaggagaaaaaacaaataaagtactttttacacacgaaaaaaaagaaagtaaaggaaagagcttgtttcacatatatctgcagcgtggactttctctactgcgaacccaaaaagtttttttaatctttttatgtttccagatccgttttaagaccagaagtacaacaaaaaaaaagaaactcgaaatctccattaaaagagcctatcgataataaaaagaaaaacaaaacggcaaaaaagtgaagcgaaacacgacacggattcacacaatactcagatatatacaaaaaggattttagattttgattcagaaccaaaaataaaaaaagaaacttttttatttctttgtttgatttttttgtttgttggttttttttttgtttgttaattttggggatcgatgtcggaaaaggaagaagctccgtcgacatcgaagtccaccggagctccgtcgcgtccgactttatctcttcctccacggccgtttagtgagatgttctttaacggtggcgttggattcagtcctggtccgatgactctggtctctaatatgttccctgattccgatgagtttaggtctttctctcagcttctcgctggagccatgtcttctccagcgactgcagctgacgctgctgcgacggctagtgattaccagagacttggtgaagggacta

SEQ ID NO: 9191 - DNA, 1015 bp, Arabidopsis thaliana landsberg
tctacctgaggatttagtatgtccattaggtttattatctcgtcctgccacaaatgaatgtttcgattagtattttcatagagttcgaaaccatgatggcaaaaacttattgggtggaaaatggagaagtatttacctctggtataccgggattttgcatcacggtaccaagaacacggcgaactagtccatcaaagacaattttatttattgacccatctgcgtttacccatggatatataggcacaggtgacttttcagaagttgattcctttgtttcaccttcaatacccgttccaaaagtaacagatggagctttgatagatgcttcatgcaaaccgctcgtttgagccgtttcaggaaggttaagaattgtaaccttgtgaacgctattcccagcgacatgctctcgcatgtcctgtgaagtactgtagctgctagcaatgatatctttggacctatgttccccaacagctctctctaggtagttcactggtagagactgttgacttttttgggaagttccatcttcctccaatgtcaagaagtactttgatcggtagaaggaatggacaacacggaaattattatagccatttacctgaataagatattgtatggttaacaagttgcttgtaaaacgatgtaacatgaactgagttcacaatccaggtaagtaaaactagtaaaccaagcactgcaactttcatcttaataaaggcaacagggtttgtaaaataagagataatcagacaaaccttcaaagctaccccaaatgtttgaagtacatctacaatgcagtcacaagtttcttggcctgatgaatacacaaaggttaaataaaaacactgaaggaagtcgccagcacatgcaaaaataaaagcctgttaaaaaggtttgcctgatgcttacttgggatatcaataagacggtggacttcttcaatgctcagaccttggtcaccagccttctgaagggcattggaaacggtttcaaaaaccctgggactgaatac

SEQ ID NO: 9192 - DNA, 557 bp, Arabidopsis thaliana landsberg
  unsure (1)..(557): unsure at all n locations
gagaacaattcagatttgataaacgttgggctgaggatccatccttcttgcatatgctaacaaaggcttggaatcatgattctcctgattcatcctcttccttcaatgttagagctgaacattgtcgtcaagcgattctagattggaagaatcatttctggtccaattcagcacgtcgtattcgcagtctaagaggagctttgcaagcacaggatgaatctccttctccctgtttttcctgaattcgtcatcttaagagtgagcttgccattgcttttagggaagaagtggtttattggagacaaaggagaacagagaaatggcttcatgatggagatagaaatacaaggtttttccgtgcttgtgtaaattctactaggtcaacaaacactcttcacaatctcattgataatagtggagttgatcatttttctgagaaagaaaaaggggaagtcgctattcagttcttcactgacctttttaaatcctcggtacctcctgatctgatgagtcgaaattgtcncttccacactcgagattccacgnctatgaatgca

SEQ ID NO: 9193 - DNA, 754 bp, Arabidopsis thaliana landsberg
ggagaattgtaagtccgggtgggaatacaagtccaaagaaatctaaggttgatctcagtccatctgctgttgctgctactaccgagttatgtggaaaagtaaagggtgaagttgtctctcaatcttgtgcagtttcaccaagagaaaagctagatgatgttgttacgagagcaggtaccctctgttttggttaatatggaatgtagtgatttttcagatgtttttggagagtgtcagttgaattacctttggttgtaatatctgatgttgtatagatattgaaagcggcgagaaaagcggccttagtatgggagagaagcagcaaacttctgttacggaaaggctactggaagagaaaaatctcactgttaattcagagcttgtagatgggcatacccgtggtgtggtgaaggaagtaccagacaatcaaactattaaagaagctctagaaaaagtagatgatcttacgggaacaatagaacaaggtgaattttcttttttttaactatgattgagttttgggatcctttattagttgttatggagagttatggtatgcttacccttgataacatttctgaatttctgtagatcttgaaaagggaggaaaaactgctgatatagtcatgattgaccaagagaaggatcttccccctgcttcaaaacttgtagatgggcggattacctcacaagttgatgagagaggtgagggaagaaaatggctccaagtgctgtcgataatcttcaaactgct

SEQ ID NO: 9194 - DNA, 1610 bp, Arabidopsis thaliana landsberg
atacaactggatacagaatcacaagtttccataatgaatgcaaaaattagaatgagacgtgttgataaaatgggtccaagtcatgtaaacgtgttcagcattatccactagtcttctcttcgtactacgaccccaaaccccacaagcctacaccaatcaaacctacaccaatcaattataatatttgtcagacgagctttatgccaatctaatggctagttgagtttttgttttccaaggtttattgattctaaaacttgagccgcctgaagctgaatttgatacaacaaacaagccttggaaaataaaaattaatgtttaaaaatcacaaaacttatgatggtaagatattacttagcattatacactaaataaccaaattgtgaaattttattttgcaaaataaagtggtgagaaaattacaaaataagtaggtgttgattttttcggattgttttaaacaaatactagcatttaatttatctgatgatacattattcttaaatacaacaatccacttattcataatttcacgacgacataaaaataaaactatatatcctaattaactcatatgttttacaagaacaaaacacaatactatttctatacgtcccaaaactttgtattaaacttattaaatgtttctaaagttatagcaatgtaactaatgtaactgtcaataattttacaaaaatttgcaataaaaaaaaagtacagtcgaagaaaaaaaagtcgtcaatattaacagagctttataataataaaccaaaaaaaaataatcatcaatattttaaagaaaaattgggatgaaaagacataaacggaaaaaataatcgtcaatatattaaccaaaaataataataaaaagatataaatgaaaaacgtaagtgtcaatatttcaccacgacatattttagaaaaaaaaattaaaataaaaaaactatatatcctaattaactcatttgttttacaagaacaaaacacaatactatttttatacgttccaaaactttgtatttttatgtttcaaagttatagcaatatgactaatgtaacataattttttttaacaacaaatttaaaaatgacattttttaacatcttcttttccatttatataatgagatttatatcgtgaattttgcaatgtcaataattaacaaaaaaaatatataagaaattttaaaatgagatttatatctaaagttttgcaatgtcactaatttaaaattaccaaaaaaatagtgatttagaaattaaaaattgattgtgcttttaatgtaaagttaaagcaagattactaatgtgatataaaaaaaaattaacaaaacaaaacatataaaattaaattacaaaataaacaaaatgtgattaaaatgatataaagagagagtcaaaaaaattgtagaagagggaagaagaaagaatcaaggagcaacaaagaaaaagtctgtctatcatcttcttcaaatcgagatcgaagaagaagaaccaaaaaaaacaaaaatggagacgaagcctaaccctagacgtccttcaaactcagtgctaccatatcaaacacccacgattaagagatcattaccttcttgggaaaagctaggcca

SEQ ID NO: 9195 - DNA, 1241 bp, Arabidopsis thaliana landsberg
cgaacatgtgagtttgcttcttctattgcaggtgaggtgttgggaaatatcccgtagtggagcctctctagccagtgctcctaaagcatcaatatcacatgatcagccggtaatatgtcattcttcttcttatcttacctttttttttcttttgcctttgaatctgatgcatatacgtcctttcttgtgttgaaggttttatgttctgcttggaaagatgatggaaccacagtctttagcggtggatgtgataagcaagcaaaaatgtggcccttgttgtctggtggtcaacctgtaactgttgctatgcatgagggtcctatcgcagctatggcttggatcccgggaatgaatctccttgcaactggaagttgggataaaactttgaagtaagaatgattgttcattatttcctatgactgaatgtagcaaattatagaatgttgactgattcatttatttgctgccatgaatttaatgatgtatgttggttttccttccagatattgggacacaagacagcaaaatcctgtacatacccaacagcttccagacaaatgttatacattgtctgtgaaacatcctctgatggttgtcgggactgccgatagaaatctgatagtcttcaacttgcaaaatcctcaggttagaatttttccttgttgttccatgttataacttgcgcatgagagttctaagtgctaacaatgctgtcagcatcacatggttttgggaattcgtgatcaatttagcccatgtgctatcttacaaagaatagatgaacaggctttcaccattagattaacagtttctcttgtgtaaactgtagactgagtttaagagaatccaatccccactgaagtaccagacgaggtgtgttactgccttccctgatcagcaaggttttttggtatgtcttcttatttatgttctgttgtgttttggttaattcagttttacaggaattagcttgttcgttagatgcttacattttaggttagacattgcaatgtttttatttgcaatctcgagaagattttatgtatgtcattctagcaaaaaatagagtaattttatatgggagattgttttgctagtcacatctccagatcctatctaaatcacaatggtgttgaatatgaaaaattaaccagatccaatgatctctatgggtgggtcaattgaggggcgggttgggggttcatcatctgggtgattctcaacagagcaaaaactttaca

SEQ ID NO: 9196 - DNA, 2950 bp, Arabidopsis thaliana landsberg
ctctacgtatctccattagcaccttttaaaagtcaattatttctcaaaaaaacattttgaaatgccaaaacaaagaaaagacaaaaaaaaaaaaagtgaaaacattagatgtctttgtttttataccgcattcattcaacaccaaaaatctgtctgagcttaaggacttgttgataaactttctcagattcaggcaatgtagcagcaacactgtttcgttcaacacatctctttccccaagccacgatcttcggacactcagcttcgacagagaagtcaccacatttctcgagtgcgtagaaccaactgtaaaacgggacaagagttatgtctacataaccaagtgtctctcctccaaagtaagatttgtctccaagctcagcttcaagaaccttcaagctctcaagaaactctttcttgcctttctcttgttcttcccctttcttgtttccccaaatctttcttcctccttcaaatgatatctgcattttggtgaatttgatcaaaaccaagtagacatataaagcaaaccgaaacagaaacagatgaattataaacactaattaccgttttatcagcgtaatcagcccagaaccttgcagtggctctagattgaggatcagagggcaagaaagatgcagcatcagtccacgtctcgtcgatgtactgaacttggatgagcgattcagaaattggtgtgttgttgtggataagaacagggactttcttgtgaacagggtttgatttcacaacagctcactcttgttccacagatcttcttcttgaacctcaaactcaactcctttctctctcaacgcaaccttcgtcctcatagcgtaaggacttgcccagaagtccaaaacaacaactttgctattttctttccccattgttggttctaatagctccctgacacaaagcactagccaaaaccatatatatacacactcatgtatgaaattaagaaatggatatggtgaagacgtgggaaagagattggagtagataaatttaagaatgtgctgtctaaggagatcgtgaaatcaactcaaagtttaaaccttttgatggattatagttgacttacatacaacgacttaatacgaggaaatacagtggatataatgatacagtatattatgtaatatgaacaaatccttgtaccagaaactctcaatctcttgttttctccaatgcgttaagtttcagagcagcactacaaaaagcacaaaaacaggaacttagagaaaactcgaacagagtcaaaaacattcttgatcaaatgaaaggaaaatacttgcttggtttcagaaaaattgatatctaatttcaattgtttattcacaagtaacgatgttctgatactctttttgcaaatttaataaatagatcaggatgaatgataaacctgttgaggcaatatcgtttataacggttgggcgtgaacagtcatcaaagacatgaccaagatgggcgttacaaacagcacagacaacttcttgtctaggcatgaagatgatagagaggtctagctttgtcttcacattgtttccaattggttggtagtaagatggccaccctgttccactatcaaactttgttgatgaactgcaagaaatgattactttgatctgttaataaccattcattcatatgaatcatttgagaatttttgcttcattagttcagtacaatttcatatttacaataatagaaacttactcaaatagaggtgtgtcgcaacatacacaattatatactccaggggtctttgagttccaatactccctgaaaaacaagaaaatactcatttgagtgtgacctccaacatttcagacaataaggtcattgtgatgatgttaaaaaggcgataatcttcgatgagcatttcattacatacccagtgaaagctctctctgtgcccttctgtctagtgatgtagtactgttctggtgttagccgtttcttccattcattttcacttagagaagcaaactcattcttctcagcgtgtgcaccatgataaaaatctctcaaaatgcaaaggattgttctaaagaacatggcattgaaagtaacactgtacatacaaacaaatgcaaagcatggattggtgatataacttataagctctcaaatctctttcactaacttctgagaaccaattgagtaaacttggtgacctaaatctctcttccaaaacatcaaacataacatttggaaaaagacaaaactcattaacctaaacccacaaagaaagaaaccatttttacgcaaattacagtacacaacatgaaatgggatttatgggaatcatcggataatcagagagaaactgaatcaattcaaaaaggttaaatttttaaaaagaaccttggacgttgtctggtttcggagaagaactagaagaacccatagaataaacagagagactcaagtttctgggttttgaaagagaacgacaagcgaacccagaatgatttgtcttggagacgtaattgagtcttgttcttgcggagacgaagcttgattgaataatagttaatctagtagaagaagccatcacacaatcacagcttataatggttttcgccgaaacttgttcaattaacaattttgaagaagtcttttctttcttctgtgaatggaagagaacacgtggcacgttgaggatgtgagatgagatctggaactctagctgccacgtcgagactcactggtgccgttattgggctttttaacatcacaagcccattaactaaatcgagagaacatgaatttttattttttcattgccaattatattgtctcttttttgggtgaaaaatacatggaaatctgaaattgttattgagttttgtttaatataatggattgttttttaacgtttttaaaaatcatttatattagtataatttcagtaatcaaaatgacgtttaaaatgtcacat

SEQ ID NO: 9197 - DNA, 1298 bp, Arabidopsis thaliana landsberg
atcccgcaagacccctccggctgaagttaagcccgggttcccccgtgaggcaccgtccgtattgagtttgtgccatcctacagttggagccgtccattgtattaacctgcccactcgatccaccaccggcctaagttccctttttttcgaattcgctagagaaacttcggcagctacatcctttaagaaacgcactctatctcgacatctcctgttatcaccaaaaacgttcccacatctccatttccagccccaccaacacgccaaggcgaacaaagtcgaccaatcactaccttctttattaccactctgtcgcagattcgtgtgaatccactcaagtaaagacatagtgaagaaccctggttgcatgcgcctaggtacaatgcggagccaaatacctgtcatagccggacaatccctgagcacatgtaaacttgtttcaacgcctcccttacaaacttgacaaatatcatactcacacaagtgtcttcgttttcgctcagaatccatcataacgacttggtttacaactagccagagaaagactcttacccgttcgggcactagaactttccacacacttccatagaaactactcatatcttgacgcggagcctcatttccagtcaacatatgataagcagatgtaaccgtaaagagcccatctgaggactctccccaagctagcctgtctaaaactcccgtgaggccatctactaccactgccaagagttccaaccacttattctctgtgacaaacggcgctactctcaacatgtcccagcctctccattctgccaaagatctcgggctgtacaattaaccaaattcggtggaattggagctgtaatttcatcaataagtggagtattagataaccacatatttgtccagaatcgaatttgtctcccatccccgataacccatttaacaccttgcaaaatgcatcacgcagccccaggcctacactcctccaagtcgaggaccagttgcttttagcgagagcccatgatccatcatgaacttctccaactcgatacttgcttcgaactacttgagcccaaaggctggaacgatcatgtaatactctccatccaattttagcgatcaaagccctattcatgttagttgctgaacgaatgcctagacccccctcacatcttggtaagcacactctgtcccaagcaactaaatgctgccttctcttctccgctgtgctgccccaaagaaaagagcgagagattttatcaaattctcaagcgtagactgaggcagtttaatggtgctcatagtatgaa

SEQ ID NO: 9198 - DNA, 1269 bp, Arabidopsis thaliana landsberg
ttttgggtggtcccaaaattgggaagggtttttaattgtaatagaattgagaattaatttaaaaccttaagttgattaaattggagccaaatgggggggttttcccttaagggaaaaatagcccccccggaaacggcattcctttttaaaacaactaatgcggacttgggaaatattttttttaaagggaggctcccccacttattccaaaggggacctggactggcattttttcaaacattccaaatttatttaaatcaacaacccccacaaataatccggttacaatgtaagtgaacctaatgcattactgacaattacaatctttacaagaacaaattcatactctgacactgtttatcaacatctctgaaagaaaatctcatcctacctaaaaaacatgtcctcttccaacattcaatgataaaacagtctgagacttaacacaattacatcctgtgttccggtaagtaacctaaataatatgcatgaatatatgaatgatcggaagagaaaagaatataaaaaaaaagagcaagacagaatcaaaaccaagatatttgcgaacacaataacaaagttctcaactaggaaaaaagtaaaaaacattcaggggatggcgagagaaaagtcttcacaatccgtcataccataagagtaataataaaacaagacaaaattaagatagagagagtagcaaccattgggaaaaaggctagtacgaggctttgtgaagcttaaagcttgtcttcgaactcagatagtggagtcatcgcttccttcaatcccttcctcttcctgatatcagccaccaaaactgaagcctgagtacctggctcaagagggtcagaagacatcatttcccaatgatcaaacacacactgtgggaaagcctgtcctgaggttgctgccctaagctgacttgagaatccgaaagactccacaacaggcaggtacgccttgatgttgtacaagggagttcctggcctctgcatctcctcgaacacgtgtccacgcttctgattcagcacactgtagattcctccaagagctccctctggtgcctggatctcaaccatgtaaaccggctccaaaagtctgggcttagccgtgatctgggaagcatatatgacccttttggctgtggggataacctgaccaccttctttgtggatggcatcagagtgaagccccacatcacagacctcaaaacagatacctttcatggtctctttagcaagaggacctttcttggacgcccactgaaac

SEQ ID NO: 9199 - DNA, 379 bp, Arabidopsis thaliana landsberg
aatcactgctcatttcagccaaaaacattcccatgttagatgtcgcagctgcagcttgaatccaccatcccaaccaaactcctcctataactttaccgatatcagcgaaatacccgtcagtccatagcttctgatcaagagctatagctcctgtcccggtcaaaaccgggaagatgtaagaaaacacaacaagaagcagagcataaaacagagctcttggtaatgttttactcgggttttcaacttcacccgtaagcgtactaactgaatcccaatagttgagattccagaagagtgtattgagatacaagctccagttaacacctttcatcttcttgctaaccacaagccatctcgaaggtttaagctttggaatcga

SEQ ID NO: 9200 - DNA, 1566 bp, Arabidopsis thaliana landsberg
aagttaatgtatgaattttgaattatgtaaacgcttaggcatatattagcacagagcaaactgtagggtataaattgaacactgatactttggttggatataaaaaagcggactttccactgatgatgttactccgcaagtttgaaataaagtacatgtcgctcataactcgagattctccgttcatgtcaatgaatgatattgaccctttttatttcatgtctatgcataggtcgtcaccaaaccttactttttctttgattgagttgtgaatcatcaaaaaatacatttggtcaccggtcatgtgattacttaccccgttatcaagataccaaatgttctcatcatcgttgtttgtttcataatcacttgttttgcaattcttttcgcttaagaaaaccacctcatgcatcataagatcgtttgcattttgtgtgtcattattctgttgagcttcttgtaacttaagtagtcgatcatgacaattagaggcaaagtgacctaacttatcacactgataacatgttacctttgaagtgtctcttcctccgttggaactaatgaaacgaccttaacgagcttcctcctcgacctcttcctttatataatcattgttataatctcggttgtactgattcgtttgaacctccaagtttgcatacataagtttgccttgaccttcctgttttgtttctttttcgtcaattattcgttctttatacactttcaaacgtcccaagatgtcttcgaaacttgtagcattcgggtctaggacatgttctaaggatgccacgattttgaatgtacttcttgcaacgtagactctttaagaacttcttaactaggattgattcttcgatattgactcctaaagctgccgattttgatgagatgacacagagtctttctccaaaattgttgattgtttcagagtctttcataataatacaatcaaattgggctattaacgtttgtagtcgggcctctttgactctctttgctccaacattctttgttttattgtagtcccatactttcttcgccgtgtttagttcaccaacttgtagaaagagcttcgggtatagattggaacaacgaggaggaggccatatcatttttctctatatcagttgagttgttctttatcgtgtcccagaccttatggaccttaagcgtacttttcatccttatggcccatacagtgtagttgattgaatttaacatcggacattgtatcgatgaccgatcgcctccgcctcctgggtttgttcggcatcaccgcaggatcgctcatcgtctttcttgtgtttagaactcaaaaatcgctccgataccaatttttgttttgccaatattgttagaacacacaaagattaagaagtcaagatcaataaagaataattttctttattagctttagaaaataactcaaaactaaagctcttaatctcaactcttataattcacgaggaataccacactttggtatctctcttttataagagaaggattagggccaacttcctaaaatttaaatatctaaattcctaaatttttctttttttc

SEQ ID NO: 9201 - DNA, 480 bp, Arabidopsis thaliana landsberg
  unsure (1)..(480): unsure at all n locations
cactactgggctataaattaagaccgcccgcagttccattgacttaaagggctacctacttttacccaccaaatgtaacaaatggaatgcctctgagctagttccacatgtcaagaagtacttgatgtgcgggttctgtatccgaaggaacccgtgatttctcatcatcggtagaagactcaaaggttctgtaaacccnnnnnnnnnnnnnnnnnnnnnnnnnnnnnnnnnnnnnnnnnnaattttgtatggactgtgcccaggctccaactgattttgtttgactagctcactgaaaagcttgtatacatctattgcctgaaaactgacgcaatcagcacgtaccaactcctcaaatgcatcacctgcatgagagactccctctttcccaatgatcttgttgaaacactctgaagactcttcgagatctttagcatcacagtgcccttcaactaatgatgccattgctgtatcatctaa

SEQ ID NO: 9202 - DNA, 1600 bp, Arabidopsis thaliana landsberg
aaacaatcatatgggccaatacgacttcgatctatattgcttcaacttattacaataatcatgcatgtctggaatttggctatgtcatgtggatggataagcgttggcagagtcttcgttacgttttcataaattatctaaacaacttaattacacaatattctcaggtattggcaagaaaaaaaaaagaagaagaagagaaaaatcataatataaatatacttctggacacgttgaagagacatatttgatgactagtctaagcaagattccacaaaaatgaagcatcgattttgatcaaattattcggacttcaaaatatgaaaatagtatagaaatattttgtttatgtaatattcaagccgcattttgacaaaaataattaataaaaaaaatgtaagagtatccccatctttagtttttaaaataatagaaaaaataaatttggtcaaaagacaaagccgtcccttccggttcacacgagccgcacgtgtgctttccttttttctccttccccgttctctagccgattctctctgtctagggctcctccgtcttcttcttctcataccttcacataccacagaacctctcttctctctctattgattctctacgaagaggaaagtgtttttgaaccatcttgatcggaaacggcgtttcgaaactggaggtcgaagacgaaaaaaactcttatctcatcgctccggtgtaccgaattcgagaggtttttgttaggtttcgtagttattgattgattttgatggaagatagtgtggcggatgatgttataaagaggttactaggagcgaaatacgggaagacgacgaagcaggttcagttgacggaggctgagattaaacatctttgttctaccgctaagcagatctttctcactcaacctaatcttcttgaactcgaggctcctattaagatttgtggtattcattcatcaattttgttctctcctcttcaaattttcttttctacgaggatttgcgtagattatgtttgattatccatagaactagagattgattagctaaccagagttgtttaaatttagataaattcgtatgaatgatatttgtagaaatgcatatgaatctgttgtttacttgatcagttatcattagtgagatactaaaagaagttagaaatgatcatttgtctccatatcagagattcagagctgatagtgtattgttctgtgcatcttgtgtatcattttgatgtataatggtatcagaaagttgctaatgtgtttactaatacataagtttgttctgcttcattttatagcaaccagtagtagcatatgcttgtgtggcttgtgtttctagtgaaatagcacttctataatgggggttggtttcatgtttttaataggagatactcatggtcagttctcagatcttttgagattgttcgagtatggtggctacccaccagctgcaaactatttgtttcttggggattatgtagatcgtggaaagcagagtgtagagaccatatgccttcttcttgcctacaagatcaaatacaaagagaatttctttcttctacgtgggaaccatgagtgtgcttctataaaccggat

SEQ ID NO: 9203 - DNA, 664 bp, Arabidopsis thaliana landsberg
ggcagccgtcatttgttccatcagaagaacatgtcacttcggtaacttgggtatcgtctaaaagttctcgagaactgacagtagaacgttgatcaccatttttcttggtttcgcttaggtcaagtctagcaaaaggtcctctgaattttaacttcttccgggtataaactagaaagccattaacccgaacaccaatagatttcccactcttcttcctccggctatacgtaagtaagacctcagatctatctccatttctcttggtttttccaacatgactttcagtaaagctcccattagatttcactaactgctttctttggctgtaaacaagttgatgaccacttttcttgatttctccaggcttaggtctagttaaagaactatcagctttaactatctgtcccatttggctacatgcagaagagtcagcttgatcatagcttatcttggttcctccagtgacatgtttgctaaaactacaactattaaatttcactctacctttcttcctgctatacacaaggcaattatctgatcgattgcctcttctcctggtttctccacagtcatgctcagaaacaaaagcatcatcaagcccatcaccccttatcgtagtttctccagtaaaagtacaactggattcccctctcctttttttccg

SEQ ID NO: 9204 - DNA, 1259 bp, Arabidopsis thaliana landsberg
atggcggcatgactaagactatcactgctattggtgtcaccgtgctggatatcgccgtgattgagaactgtctgtctctctttttcagatgcctccgactctgtattcacgcatttgcttgactctttaccacacttatggaggagattgagagaatgtcaattatgccccactggtcttttgagtatatacttttttcgtcggtacgaattatgaattagctaatttacaattatgttacctaatgattagtatttttattgatttatgttcttctgatgtaaaatgagtaagcggtgaaaccgctattacgatttgttattatcaactaataatgttccagaaggtttttggttttgtacaatgttgtaatacgatcattttctgaagaaaaaaagtagtgtatgtgaatattgaagttattatctatagaaaatatctatgttcatatcataagagtaaaattcagagttttcatttcacaagcattttccatcgaagacgaacagtaacaaaaagtaaaaaagggtaaaacacaatcaccgtaaaaaaagcaattactggcaaagttgttcgacggcagtgacgatctgagctggctgaacaaccgtccattcttccaatgtaccggcgtaaggagttgggacatcttgagaagacaaacacatcaccggagcatctaagtaatcatgaaagttctcgtttattgcagccgtcaaactggctccgattcctcccgttctcatacattcctccacaatcaaaacccggtgtgtcttcttcaccgagtttccaattgtgtagagatcaaacggcttcaacgaccttatgtcgataacctctggatcataccctttgttcaccagcgtctttgcagcctgcattacatggtacctgatacaagtactctattagttctgtgttgtttcaatttcaatgaagaagagcttttggttgtgatttagtacctcatccttgaatacgtcagtatcgtgatgtgttcaccgggtctgaccatttctgcttcttccagattacatatgtattcttcatccggaatactctccttgaggttatagagcagaacgtgttcaaacagaatcacaggattctcacttcttatcgccgctttcatcaatcctttagcgttgtaaggtgttgagcaagccaccatctggatcccagggattgactggaagtaagactcgagacgctgggaatgctcggctccgagctgccggcccacacctccaggccca

SEQ ID NO: 9205 - DNA, 607 bp, Arabidopsis thaliana landsberg
aaaacagagttaagttctgtttttgtgttctaataagaccttgtctgggtgaagatagactttatcacgaaagatcaagacaacgccagcatcgtcaagaacacgagcaaagacatgagcttcatcgggagatctagcgatacccattccttgagaagcttctaaaagtgtagagtaagagacaacatctctatcagccacaccaacaagcttcttcttcatgtcttcaacattcacaagcctcattagtttcttcgcttccgctatagttatctctttcttcttctcctcttcatcctccgacggtgttttgacggtgacgcagcttcttaatccaccgtgaccaagccatgtcctttgcgaagaagctctaatggcattggacattgccgtacgccttatcaaacccattgaccacattatttgacccacgaatctgaagatcttagctctggatttggtgaaagcgaaattgaataaaagttaggttcacagatcaaacgattaaaagatatgagaatcggagaaagagatggaataatataacgcgcctaattatgattcttctggtattaatatcataagattacacgattaggataatcga

SEQ ID NO: 9206 - DNA, 575 bp, Arabidopsis thaliana landsberg
  unsure (1)..(575): unsure at all n locations
actcggtgaagaaaacacatcgggttttgatcgtggaggagtgtatgagaaccggtgggattggggcaagtcttacagctgccatcaacgagaactttcatgactacttagatgctccggtgatgtgtttatcttctcaagacgttcctacaccttacgctggtacactggaggagtggaccgtggttcaaccggctcagatcgtgnnnnnnnnnnnnnnnnnnnnnnnntaaattcatatttatccgatgaaccattatttatcatttacctctccatttcctttctctgtagcttagttcttaaagaatttgtctaagatggtttgtttttgttaaagtttgtctcctttgatgtgtcttttaatatggtttgtaactcagaatgtttgtttgttaattatatctcccactttcttttatttagacccttagaatcttctgtacactctatatgtgctcatggagctcgttacaataaattttaacctgagaattttctttacacttattatatacacatacacaactcatttccttctgattccagacaacgactttattacatgaccccca

SEQ ID NO: 9207 - DNA, 1223 bp, Arabidopsis thaliana landsberg
caagcaaacacgttggtgttccgcgtcttcttagttcttacagtgaattatttacacgtagaccaaacccactagacctcaaaaagaatatgtaaaactgtatcacacacatcccaaattaacttttattctctaatgtatttttacagtttgcttgcaatccaaagttcaaggatcccaaagttatatcgcagaaagtttgttcatcttaatccaggtcaatacattgtacaatatcatactagcttttaacgataaaatttctatatacagtaactcattattaatttgctcgaaacattattaaccccaaaataacataattagtaaactgtttttgacatttttgtaatgtcagtccagattaattattggattttattcacctactaaacttcgatattacttcaaacaatttgcggaatattttgtacatatcaaaaccgcttaatatttaatttctttctcttattaaaaagaaaaactcaccttttacagtgtacggacaattgaaaacgaaacgtttagaaacataaaatgatcttttattaataccaaaaatgaaataaaatgatgcatttaaaaatctcagcaaacaagaataaaacacgtgtcagtgtagggagagtttgtcgttttcacctgacaccgccatactctcaccttcatttgctttatgagcttcttcgcctcacaaaacctccaaaaaccctaaagaaccagagagagagagagatctcaaaaagcaaaaccataaccctaaagagcctctgaaatctccagccgccgaaacatgtctatcccgcacatcgctccggtacctcaccctcgcggtactgatctttaaacccaaagattattacttcaccatttcaataaaaatctttgattttgtcgactgatacatatacatttctgtttttgtgtgtatgtgtgtgtgtagatgggtattacgctacaaacaatccgtaccaagtgaacggaccaaaaggttttactgagttcaagtatctggaagagacccatgatctgttcgtgaggcttgatttccctggaatccagaaagagagtgtgataatccttctcgaaccatcgaagaaagctgtcattgtgaccggagaagcacccaaagagagcaaacacgattcttctcaccgtaagtatggaatcgccacgggtcaaatctgtgactgctgtgaaatcagaaacattcagtgtattgc

SEQ ID NO: 9208 - DNA, 323 bp, Arabidopsis thaliana landsberg
atactaaagagagaaaaaaggaagaagatacatacaatagagttaggagcatcatcttgcttgcacataatccatgggacaccagtggagagtccttgtgccatttcagctacccattttgtgtatgccttccctggtgctcctatctcccactctattggtccatactcattctctatctgcccatttaaaacatacaatgtaaatatcatctttttttctttcaaaaacaaagattcatttggatatacactactgacattatgtactaactaatacgaaaacaaacaaacccgtgacagaatgatgggtcctccttgagt

SEQ ID NO: 9209 - DNA, 983 bp, Arabidopsis thaliana landsberg
ttttggcacctctgtttgccgacatcgctgatactgtctacgacattctccatggttagaaccctttctacttttggcctcttttgtaactctgttgcgtttctgtattgaattggaaagaaaagttttgtactttcctgaactttgagctcttggttgaattgtctcttgaccaaagatagtagtatgagtgtatgaccaagattcaagctttatgtgaagttgtgttttgatgttgggggatgttgttattgcagggaggatttgggcaggtcataacatattgaggtttgattgtgcaaggatcagagaagcatttgcagagattggtcgtcaaccacccgagccaaaaggcgccattgattcattgggtttgctaactcagaagtttggtagaagagctggtgatatgaaggtacaactaaacattcgaaaaatgttaatattttcacgacatcagaatgttacatgatgaaaatttatttctttgattgagttttaaggtgatttaaagtgtcttttaagtcctgtgtgctttgtttctgtagatggcaactttggctagatatttcggactcgggaatcagacgcataggtatataaaaggcataagacttaagaatctaattatttacctcaaaactatcaaaatactggtgtgctttaattctttgtttctcttcaggagcctggatgatgttagaatgaatcttgaggttctcaaatattgtgctactgtcttgttcttggtatgttctgttaagtcactttattaatggagaatctttgtctcctattagctatgttgtaaaaactggactaatcagcggcactgcatttttatttcgcaggagtcgagtctcccatatgcacatgtagataattcggtatctcctggaactattagttcaaggagacgtattgatgcatctcacgagggtaatactgtaacaacctctgttaggctaccatccattagcgag

SEQ ID NO: 9210 - DNA, 1225 bp, Arabidopsis thaliana landsberg
tatcactgctgctggaactggaatcgctgtgctcttctctgtcgtctgtagccttgcttcacggcgtgtacccttttgcgcaaataagttcttcgacactgggcttggtttcagtttggtaatactgtcatgggctgtaaatagactcagggaggtgattgttcatgtcaataggaaagcgaacaagccatgttcaagtttgaaggatgacgaaatcataaaaagtgtggagagaagtatgaaggaggtttactacagagctgcaacggtaatcgcggtgtttgcgcttaggtttgcatgttgagaactcgcggtgggaggtaaaaaatcttgatttactactccatggaaagcttctaaaagatcttgtaaatgactaaaaagttgtttagtactgagctgtaaatgtgaagatgatattgtgttgtagaacctaaagattaagaggtgaagaattttgaagagaataaatgttttgcaagaatgcgtttgttccatcactacaagctccaacatttcttcgtactcaaccatatcaattttgttcaagaagcacacaagtgatggaacaccaacctgtggcaaagcaaatttcgtctactatgctcgtcctatttgctttgtttgaccccttcttgtaatggaagttgtaacacacataaataattacaagagcgaacgacgacatttattatcttttcaagaatataactagttcctaaatctaaattgggagtgtggaacctataaaagtagtatcagtaccaaaatttaatgttacatacaagcttgtctctcaccacaatctagcatagcatcataagaggaagcatacttgagcaaaagatttgctaaacatgaaatgaatatttcgtttctggtcaactgaatttaataatcgcaaattcatgatttcttaacatttggcttaaagaaataaaaacaaatacttgacaaacaaggaaagtgagaaagaattggaagtggctttttgaaagtttcacaaagtaggaagcatcaaaaagaaatagacgtttcgtgccctctgccctaatctttctcattggaaacataaattaagtttctctctgtttatttgatctaaccgaagaaatctcaaagcagcaaaaagaaaataggaaaaatctcgaaattgatggattcctagagaacaaaggagaagagaatgtgcttttgagtagcttaggtcatcacttttgataca

SEQ ID NO: 9211 - DNA, 1543 bp, Arabidopsis thaliana landsberg
ctgatatttcgaaaccacgggttgggctctcatcagttgccacttttgtcacaactggggaacattcattctcttaacatggatgccaacttattaccatcaagtccgttatattactgtcttttaatcaagaggcttgatgttttatttgttttcttatcattaatcatatggacggttgtgaggcaggtgctgaagttcaaccttatggagtcaggacttctctctgtatttccatggatgacaatggcaatatctgcaaatgccggtggatggattgccgatacacttgtcagccgaggtttctctgtcacgaatgtccgcaaggtactttgtatatcacttcttctgttcttcagttccattttgatgcaatctagtaaaagtgatacattcgataatcagtttctatgatgaaattcagataatgcaaacaatagggtttcttggaccagcgttcttcctaacacagctgaaacacatagattctcctacaatggctgttttgtgcatggcttgtagtcaggggactgatgcgttttcacagtctggtctatactctaaccatcaagacatcgctccaagatactctgtaagtttagtcaattactcccaagtcttaatgaatcatgctactcaaaagaaaatggattagcacattgatgttgttggtcttctcagggagtgttacttggtttgtctaatactgctggagtacttgccggagttcttggcacagctgcgactggtcacatactacaacacggtcagtactctcaaaacacttcgtaattctgacaatgctttgcttaatctttataaaatctcttctaagtttcattttttttgtgttttctcaatggaattaacaatgacatgaaatgcctcaggttcttgggatgacgttttcacgatttcggtcggtctttacctcgttgggaccgtcatttggaacctattttcaaccggagagaagataatcgattgatccattccgagaatagtaaatagttcggctccaagacctctcatcaggtgcaacttcacctcacgccagtctctgattatacaagtatcattgcagtctgagagctagtcggaatattccttttttgccagaaaattcttcaggatctttctgctcgttgatttaggccaaacgcatatgaataatactttgtagatgaaagatatacagatgattttttgtaaataaacaaagctcacactttctcaagattactcaaaatctctcttcagctctatatatatttgtatcataaagatattacacgcaattctctaatatgctattgcgtagcaaacaagtgaccaagaaagagttttcgaaacttaaggtcataactaaaacttaagatttactgccacaggtagaatttgatcttgtgaaggaggaagaggagtttatgaattgtatgcagtcttctattgccgctgatctgtgattattatcattaacgacagagatgactgaaggctgagatatcccagaagaagaagccttcttcaatggggagatctc

SEQ ID NO: 9212 - DNA, 788 bp, Arabidopsis thaliana landsberg
aaatttggatctttattttagaaataaaaatatagataagttgaactgaaataaatacaaaaatatagtataaagataaaaatagagttgagaatactctaatatatgttctaaaatagagtttactctaaaatagaggaaaaagacaatgtatgtctctttaaagtaatctaatgtctctcctctattttaaaagaaattatatattagatatttatattaaagcaaaaaaatatctaaaatatagttaattctaaaatagaaaaacatagagatgaacattagagatgctcttaacgccgcacaactgtgaaacaaaaagtagtttagagatattgttgtcgagtgatccacgaaaacaaaatttcttcttcttttaatatatttgtataatttttaaataattagatgtcagtttttttgggttaattggatctccggtctctaagcctctaagactaattcaaatgaaaaatatatacatttggataattagaacattttatagtttgtcacataatataatttgcaaaatgtaaagaaatgttttataaatgtcttgtgaatgatgtatacttcagctctaaagaagatgcctatagctatcaataccgagacggcaaagactcaacactatgaattaccaacagctttcttcgaacatgctcttggaagaaacatcaaatacagctgttgttactattcaaacgattcaagtagcttagaagaggcaggggaagctatgttggctctttcttgtgaaagagctaaaggggaagatggtcaaa

SEQ ID NO: 9213 - DNA, 1832 bp, Arabidopsis thaliana landsberg
gtaactagattaactaaaattaaaaagaccttcttacaaaattcgattgatcattcagtttgtagaagaaatgtgttaagttttaaaatgtttttttttctccatcccagaaaggagagacgattttgggtatttttcggcgagggataggaagggctgatgaaagagtcaaagtttaaatgttttacttaaaaaaaatcgcatatttgtcgataatccagagaagtcttgcttgtggtatgctgaaagttcgatgatgtatgtgagtggtgctaacaaaactttccataagacagttattaagttactagaacacatttgatgatcatattaatagttattctctaatttatagtcatttgaccaattctctcaaaaatatcccgaatataagaatatgaaaagaggagacaaaaaaaaaaagaaaaagaggagacgatatacattatatcatctctttactaattataaaatcaaaggctgtaatgaataaagcttgatattcataggtacaacgaggacctaacgaacaaaaacgaaagtggagtgaaaacccaaaaacccaaaaaattaaaggtatcaaaaaaggaaagttgtcaagagaaatgtgtggcttgcatcattctcaaaaaatgttttaagtcctaagaaaagggtaaaactcatatctaaagttacagcttgtacccaaaactctccctcctggtttactgtcgcaacatttgggatactggctgattatcctttccaaacactccttacacattgtcttaaacatgaatacatctctcgtacactgaaccattgcgtacagcttctttgtcccaaccatcttctccctggccgagtatagtgccatcatgccgtcctccatgttgtctttacgggttgcttccaacgccagctgttctagaaaagccatagtctccttgttgaaagactttgcatcacccattaccttgttcgggttgtgcatataaaaattgttatcgtaattcacctccatgacctcgattgcagtaatctcgacaaaacactggtcgaaccatattattccagctttgtttctcggacatctcctacgaagcttacataaatacatatcaacacaacaatctagaacaatattttacatattgtctcaattaagaaaccaaagcagagtatcaagagttatcggaattattgccattttaagaacaaaactgaacgacactgatttttttcaatcgaagttatgtttgttttttcttccaagcgttaaatctgagaaattaattaataagtagatgaaaatcaaaacaaaaaggataaatctcaaaaaatcactaaaatgaaatgccatcactagtttttattcctcaaaaataccacaataccaaaccttaagttctaaacaacaaaacctaaaaactaaaacataaacccaaaccaaaaaattaaaattaaatcacttttatctatggtatttatggactaaataatttgtaatggtaattttgcaaaaaaaaaaaaaacaagtttattaaaagtgataatattataaattaacgtgtttcaaaaactagaatttaaatttgtaacgaaaagattgcttttaattatctcttatagttttataacaatatacaaatcaatgccatatttttgaaattcctccgaaattatcgaagtaaacattctgttcgaaaatgactttgcaaattatgtatgagggatattggataaatataaatgacatttccccggaaatggctgggggaaaacaagaaccgcgcttggactggtaggaatcttcacgggactggaatatgaaggttaccatattggga

SEQ ID NO: 9214 - DNA, 1246 bp, Arabidopsis thaliana landsberg
tgatcatttactgcctccaaaccttgatgattatcacatcatgttgaggtcaatgtttataacaatcttgtgtactaattccatgtcttatgttttggagatcattcatatgtttcatcagatgctcaagtattattcgatatgaagtagagagagaacattgtttgtttcatgatttttcttctttatgcagattcctcttcgctaggaaatttgatctaggaaaagcaaagttaatgtggactaacatgatccaatggagaagggattttggcacagacacaatcttggaggtataaagttagttactttcgtgtgttgtgcaaaatattatttgttacaacggccttagagagttgctgactgagttcttcactccaggactttgagtttcctgagttggatgaggttctcaggtactaccctcagggatatcatggtgttgataaggaaggaagacctgtttacatcgaaagattaggaaaagtcgacgcaagcaaactcatgcaagtcactacattggaaaggtacctgaggtatcatgttaaagagtttgagaagactatcactgtcaagtttcctgcttgctgcattgctgctaagagacacattgactccagtacaacaatcctagatgtccaaggcctggtatacatgttgatttttaaaaaaactagattgtggaaccgttctcttgtgcggtttcctttaggcttactgaatcttctaaatgtatttccagggcttgaaaaatttcactaaaactgctcgggatcttataatccagttgcaaaagattgatagtgataactaccctgaggtattgtcggctgccaatgatatttattagcaaaacctgtttctgagcattgtttgataatatgtgatatgacatgtgcagacacttcaccgtatgtttatcatcaatgccggttctggttttaagctactttggggcacggtgaaatcgtttcttgatccaaagactgtctccaaaatacatgtaacttagctgtggtttttatgcatccatttttacactttattgtatagaactaaactgtattaatgtgatctgaataggtccttgggaacaagtaccagaacaaattacttgagatgattgatgcaaggtatgagttttgagtccttaactggttttttttttcttatcatatctcccagaatataattaaaactttgactatatttggaaacttgttcacccagctgcccagattttttt

SEQ ID NO: 9215 - DNA, 596 bp, Arabidopsis thaliana landsberg
  unsure (1)..(596): unsure at all n locations
ccacgagcagcccaagcacttgagctacgacgttgaagacaactgctgccttcnnctgaatccagcagcttggcacacatggacgctactatttagaacacatgatcgtgcatggcccaaagtaatttcccacatctttgaagacatacccgtaccaagaacctgcaaggaacatcaatcatcattacatgtagacaagttaaaactgtgtatttctcaccaggtgagaatcaatcacaaaccattattactggtgacacaaaagattcacgcccaccacagaagccttagtcacataggcacagagtaaggaagacgaatcttacttgtcggagttttgaagagtttaaatggaaatgtgttaagaaatccttgacagtgtttatatttgacaaattcagtcgtctgtgaaatgctccatctttccctatcttttccaatctccatacttcatcgaaaagagaaggaggatgatgttttttgtacactacaaataagagagaaagagtcataagaaagaaacaacttcttttaatttacagaaaatatgagaacagggaagtaaattggttcaatgatactcaatgtgagagaat

SEQ ID NO: 9216 - DNA, 941 bp, Arabidopsis thaliana landsberg
aaacacagttttgaatgtgtggcgctctttcaccaaaatattagctggtggtaaagaacctgcctaccccaagagttgtaagcttaatccatcatttgagattggtcctgacgttgtccgatacactctccagctcacgcgtgaagatatccaaacgcttcgcgagagacttaagagagaagtttcctcctcctccttctcaacctcatcctcaaaagagcttcgcttgtctacatttgttattgtttactcgtatgtattagtatgcataataagagctcgaggcggggaaccacatagaccggttggatatgcgttttcggtggattgtcgaagccttatgaatccgccggctccaaattattttggaaattgcatcgctggttgctctagaatgatgctaacggcaaaaatgtttatgggtgaagaaggacttttggctgctgcgacaatggtcagcgattcgatcgaagaatgggacgagagttttgcgtggaagattccggattttgtagcatatgcaactcttccaccagagacacaacttattttagtttcagggtctaaccgatttggagtatacgagttggattttgggtggggtagacctgataaagtgatggttgtgtcgatcagtccaggcaatgggatttccatggcggaaggtagagaccaaaacggcggtgtggagattggcttatcactcaaaaaacacgaaatggactcactgattgatttgcttcattgtgaactaaaataataaatcactttttctttacatgaataaaattgattctctaaatgatatcttcaaaacgataatgccaacttatctaatcaatttatttttagtaatacaatttgtgagatagtcatttgttcatgagttcttaatttttttggagaaagttgatttaatataataaaaagatttccttaaa

SEQ ID NO: 9217 - DNA, 2090 bp, Arabidopsis thaliana landsberg
aaactttttacgcatttaataagagtaatgtcaaagaatataccagattttttctgctctgaaatgatgaaatctttctctttcatggcatattgagatttcttcaattcctcgtttgtggaagcaagcactttgcatgtttggctcaagtttttctagatagcacagctaaagtctcagagcatattgatatagtcataaagcccaacattcaatccaaacaaagtatcatatacctcggtgatatcaagcttggtagtcagatcagagcactcccgcacttgaccgacatacttatcttgcaactcctcaagttgctggtcacaacaaatatgtaaataaccattgttcacatgtaattcccacatataagtgtaaaattttgatctacagagtaagaagaaactaactttttggtaattctctatctgaccacccatctgttcaatctgctcagccattacctaaaaaaagcaaaaaaagaagataatattagtaaaaagtaaggaggaggcaaagagattattcagttacactaaggtcagatgaaaatttagtttcttcaaccaataaactcaatacctttctctcactctcctcttggtagtatctctcttttggcatataaacaccatttttctcacgggaagcgtatacctctaaatagacaaaaaagaaagcatatgagtaatagataaacaaaggagtcagagcaggagactttgtagcgagtaattttgttaagctaagtgaaagtactccatcagtcatccgtctacaatgattctattcactgctacagagaaaaatcctcttacccgccttaagtcgttctatttcaccataaaggtcctttatcaaagtagatttcatcattttctggttaacctgccaaaaaaaaatgtacaagagtacttttcaatggttggcctgaatggaaacaagaaaaatggaatcgagagataatacctctggtttgtttctaatattcttagccctgtgtgcataatcaagagtacttaatgtttcctccagacaatgaacggcaggtgaaactgtggctatgatacatgtctttgttctcccaccaagtgaatcacgtagtaaacgggtgagcttactatccctaaatttcattgcagtaaacaattataggattcagcataacttgaaagactgctatgtgatcgctaacgtaagaaaaagaaaaaatagaagttaaacctgtaaggaacgtgtccaagatgttcaaccaaagcgctgatcactcgtcctaatgtaagaagacttttgtttatttcaccagcttctcagcccggccctaatagagaaacgctattgagtaaatctgacatggccagaaatgaaatctagaaacatagaagaaagacattccaaacttgattgaacagtgagaaactacttacatccctagcaccagaacgtgatatattttctgaccctgctaagtcaaccaagttgagcttgccacacttgattagttcttcaccttctggagtagcttctttgatatgtattgttattgagaagagagaatgtgaccgactgcaagtgaaggatttcattatttaagtgaaatctcgactaatgagcaacgaacaaaagcatcaaatgcattaccttgattgtttattcaagaatgtttctgcagttctccgtttagaggaacctctctcaagcaaagtaaagatttcattggcacttgtcacgatttcctcttccaatcctctaacaagaacaccacctttgccgtcctccatgagaggcaacggcttcttttgtttttcttcagcagcaactctggatagatcttcaggagcaagcaaatcggtaatctcttcattgtagagttccaaaaacgtgactttaacactgtactcagcttgctgaccctcaagcgtatcaaatatttgtttcacagctctaggtataacacctgcttctgccggaagacctccacaaggtgcgctctgtcccaatacacaaaaggtacatagcttagataatgaaccatcactagaaaaccttataaatcagacacactgcatcaatatacagacctttgatct

SEQ ID NO: 9218 - DNA, 741 bp, Arabidopsis thaliana landsberg
tagcagaggtattgcttaaggaattattagtacatttaccgtatcgccattttcgacataccagtggagcctctctacaatctgcatcattaatttctattaaattggtttctaaaaatcatcactagactgtgatggatcaaggtaaagaagagttaacaaaacaaaagagataaatagttcacctctttaagcttctctggatttgtgaagtgacgaccaaacgatgtgtaacgcataccatggagaaaaggcgaaagataaatttcaagctttttctgcagttcataaaagacatgaatgttttacactctgaaagccaagtgattctcattgaataacataccagcttccagaataagttaagtgataaaaatattaagatagctaaatataatttataaccttatgcttcatgagttggagtaggctatctgggtcaaatatagctcttgcatctttgccacgcccttcttcaaacatctttaaggcagctcgagcagcctgtagaatagttgttaagattcagggagacaatactgctaactaaattacatatctatgtttcataaaaaaacaccgcagtcatagtgacatacattgacatgagtccgaaccaatcctgttgtgatgttcttactaatatagtttcctgagtggtaggattttatataaatatggcctacgagacttaacgaactcatcaaagttaaacgaggattccacttcatcgattatacc

SEQ ID NO: 9219 - DNA, 1371 bp, Arabidopsis thaliana landsberg
tttcaggctctcacgccgccttctcaccaccagctccgtcgtgtacggattacaaaacatctctcccacaacactcaccatttttatccaacaaaataatgaacaagtctgtctgatacaagatttctaattaaaggatcgcattgtcttgattttttctcaattttttcttttatattacttaaataaagagaagaaaagtagagcttattacttaaagttaattaacgcggttcttagattgcttgaagcagaaggaaatattattcatttactattttactcttattaaagaagtttttttcttttttcttttttgtgtggtttatgaatgcgacacgaagagaggaatacggtgttctagctagtattttatcaagcttcttggtcatgtccaaatccgaatttcttcattgactaagataaaagagggaatactttcttaagaaacagagatcattgtgtgattatcttgatgatcaatagacaatagtcttcagaagattaacttcatcagttgatgttgatgaacgaatatgtttgctaatttgttatttgattctcttatagtattatctcttccaaaattctctttcttcttgaaaaatggaaaaccaaacacaacaaagtgttcagaagttcttgcgattagaaataagattcttctcttagtataatatgtttagatataaattaaatagaatgaaataatgtattattttactgaaatggagaacaatacataagaaaaatatatgaaataaatgatccttatgattggaacttaatagcctaaatctcaaggtgtataaaatactaaaatacttgaacaagcttaatgttctctacatggtttagatatatgtaacatcacttaccgttaagctcttccattccttggatttcaagtcttatgatcgtgttcctctcgatattgtagtagaagacgtaggaaggcataaatgtagatgggtacttgtacgaaaacacaatttcattggtgcaactgccaaccattccaagaagtcgtagcttggtctcttctccaactacattcttccacagaggaggcaacatgtatacatgcttcgaccaatcatgttttccagcgtcttctaggacccgcaactcgaaacttttacttgttccactaacaatatcggtagactcttccgtcatcaacaaacctaatttgccattgtagtttatcatagttgttgaactagggaaatctctatcgaaagttttcatgactttcttaaagctgaacttccccgatccaatatcaaagcaaactaccgtagtaaacattgaagaccctttttcgactgcagtataatacaaaacactgttggatgcatggttcataac

SEQ ID NO: 9220 - DNA, 1560 bp, Arabidopsis thaliana landsberg
tcactgaactgagcttaaacatctcgtccgttgattcaatgtcatgactaatcttggtttttgtcgacacattcatagctgatgaactcaaagacctgaattctcaggaggcattatttgaagagcacagattagctataaagaggaacaagcgggaccagttgagaaccgagtaagattttgacgaatccgctttttagtcttttttgggcttcatatttccgtctttatgttgtttgaatgttcatatttacttgttagatttaacaagtagtgattttgcttatgctctattttttgttctttgcaggacaaagcttcctatgtatgcttctgtcactcgagttataccaaacattgatgattcattgaagacctcaggctgtatccttttgctttaaacaaatttctatctactttgtgaactttctaaatttaaatctcgttcaaccttgtcctaagggtttttaatccttaatacgacagatatggttggtcgagacaaaaggctaatggacaagttcgaattcgattcaaacaagagtacttctgtctacgagacatgtaatggtatttgggatattataaacaggcaatagacagccttaacaaccaaaccgcctttgtttatgattcgttagatgtaaaaagcttcatggcctctgtactatgaacaatatctgatgttatgagttccttttttgttcttgttgaatacctctctgtaggtatcagtgcttaacttttttttttttttatctactgtaacctttagcctccaaaatcttcagaaacatatctaaatattggatgttgaaaaagaatgcatcttatatttatctatttgtgcagattgttgcaaatccagtcttaacgtgtagaacgaattggagaggagcaaattctgactggtaagcagtttctgatttcccatacatttcagtgcattgaattatcttaggaattctaaggataattcctaaggatttttgattcaaatcttagtgattggaatagcaaacttggggactgttacttagcttctccactgaactattggacctgcttagtgtctccaccgaactgttgaggatcctgcacgcttctggtacttggttacttccataagcattgcatacatacatgacaaagttctggtagttctgttcaccaaagacatataaatgaaaagttttctttctcctttgatcttgaaagttattagcttaatttataggactaacctcttgaagtggtaggttattcacaaccacccatggtacaaatctatgtgctggataaagttcagaagtttcttcagcatacctctgttcaagctgcacattgtcacatagatgtcattttttcttgcttattatatgtttagctttcctgttgtggctgtataagttaactaatgttctctcctctgagcaggatttacctggtttccgtatccgttaatgtaacaatcaaccgctgctctgctcaatccaaccatttctaaacaatcagcccatttttcaagtttgttctccaagactagctgttccgtacagt

SEQ ID NO: 9221 - DNA, 1270 bp, Arabidopsis thaliana landsberg
aaaaaaaaaaaaaaaaattcattagccttacatcctttctatttggagaaaggtggatcaccttttttttgtttttgtctttgatcaacattcatactttgttatagaaaaactgatatttgataatagtaagacatgcttaactttattttccacttcctcagtcacaaacaaatctcacgtcattattatggagcctcaaaaagtataatatcacagacgggttttggcaactaatgtattgatttgaaatttcttaatatttgctattttatgggactattttaaagttgatcaataagcaaaacaaataaagaaacgtgttttatttcatgttgactaacattttgactcgaaagcgaaacttatgatagaaaaataggcttagcagccggtgttatattcaatcatgtatgacttgtaagcaaatttttactaaattacaaaacaacaacttgagaagtcaagaagttaaatcaacttgtaatgagaaacctaagaaaggtggaatcctaaattcacatatacagaagcttttaccactgtcaaagacgaaaacgactctagtcaatggccaatgggggataaaatttgtggtgtataactattaaaagaattaatatttgtggtgggctatatactagaaagagatgtgttatgatgattttggtttggtagatctttctccctcgtggccttggggtcaagctacagctttggtcaatctcatgttatcgacaccacaaagccaacttgacctactagtggacctccttaatttattccatttggcttccctcttcgttatcttccaccgatatacattcattttatcattcgcattatcacggatgcatatcataacacataaatacatgcatatcggaaaataaaatgcaaaaaattgtttgccagatatacgcatctaatacgcatatcggatacattcatctaatacacacacattagatgcatgcatctgttgtgtgattatgtgaaaacttgttatattaatatagactaaaaatgaatacataaatattttcaaaaatacataaactaaatgctacataacatcatcacgatgatcaaaatgctagctaaatttcaattcccaagaacttcaaagaaaataacatattcaaaagtaaatcccaaagtgtaccgtgtacgtaaatgtattcagaaggtgaacttagatatttgagtgttattcgttgagatattcttggaaaataaattctcaatgtgattatgatacaagacacac

SEQ ID NO: 9222 - DNA, 592 bp, Arabidopsis thaliana landsberg
gattactttgaaatacacaatggtaaaagcttctttatatgtatttagtattccagctttcttaggtttctcatgacaagtgttccttcttgacttctcatgttgttgttttgtacttaaattgtgatttagtaaaaatttgcttacatacatgattgaatataacaccggctgctaagcctattttcgagtctaaaatgttagtcaacatgaaataaaacacgtttttttatttgttttgattattaatcaactttaaaatagcaaatattaagaaatttgaaatcaatagttgccaaaacccgtgtgtgatattatactttttgaggctccataataatgacgtaagatttggttgtttggaagtggaaaataaagttaagcctttttattatgaaatatcatttgtttaatcctttttcttataataaagtatggatgttgagcaaaaaaaaaagaaggtaatccacctttctccaaatagaaaggaagtaaaggcaatgaatgtgaatatgacaaaatccattgcatttgcttttaaattcttgtaagaatttgaaagaaaatatcttatcaacttttagagatgatc

SEQ ID NO: 9223 - DNA, 1466 bp, Arabidopsis thaliana landsberg
ggtctctctggtttgtttactcactcatttatactaatctctaaaaatgaagatagagatccaacaactttggtggtaactggtaaccggtaaaaactttagataaaaaattatattatcaacattgttgtttttctacacatctattttgaattttcctttttctaattacataatatttatcaatgtaaatatattttcaacaaagaaatccaaatttagcacagaatttctgttatcactttttttttctcacattgctatcactttttattgtgctaaatacatatttcctcacttttggaatttatcttttccataatagtaattttatccttttcctttacaaaaaactagtttttatatttttcttattttccaactaaacataagaaaaagaaaatttagttaggtaggtgagctacgaccccacattacctaccaccgttaacggcaaatccactgtcggtcaccggcgcgtgggtatcaaccgctacaacggacagtaggctagtgatatagcagcattgccaaggagaatcacgtgcttaacaaactcgagttatagacagagcaaaccgggtatgagattttttgtctcttaaataaccaaaaccccggtttaaaatccaaaaacacttttctttatttggtccaaagattccacatacagtgtaatgtactactgaactactgattcaagttggatacatacaacaacaaagtctaaacctatttgccaaccgacacggtttggttggttacaaaatttcttgacaattcaagtgtaatcctatgtaagggaatgaaatcagacttggaacagtcacaatatcaagcagttacaaccttccaaacttctctgcacatgtcgatgatctcggtaacaccatcctcatacatgacctggacaaagtcaatgttcattctttagatttcgtaaactgagatagaatgtgaacaacagtgttggcaataagtcaaatgaatagataccaagtgctttcttgaaaactcatcatattgtgtaatgattccaaaacacctgaaaaatgtcaactactagagtcaaaaccttcatctgagccgtgtaatactgttctttggtgtggaagaaattggtttttgagaaaaaaagaaagatagttatacttttggttcatgggacgtgctaaccagatcaccgcaccaatgcagtcccggcaacatattttcctctggctatgattgttccaagcttgtcctgacgcatccaaattggtttctcttacctctgaattgagaagcttgtcgataatcgagccaaataattaatactaaccagcaatgcgtctccctcgagtttttccctaaccatatgtttgaaaggacaagttactgtttagcaatcacaggatgactatagagatgacctaaaaaaaagtaaggccaaagcctcaaaattttagccttggggcgttttttcc

SEQ ID NO: 9224 - DNA, 1291 bp, Arabidopsis thaliana landsberg
  unsure (1)..(1291): unsure at all n locations
acaacgtgggtccataattattttgcaacaaaaaactttctttctatttatttttcaatttgtatgttttatggggctggtaaataatattaccaaaaaaatgaaatatactatgtatacgtagacgtatggacaacacaaaagatcctcatactatgtatttaataagttaagacaatacgataaaaaccctttgtatttctaacttatttgtttgttctttaatttgaattctttgtactaactaattaacaactcttataattcttaagaatatgaaccaactaactaacacaacatcacctaaaaaatatatagagaaagagaatcacattgtgttttaacaaaaaaaaacaacaactggcattgacgaaaccaattggatttgttataataagttatcaacaaaacaaaaaatagaaagtcaaaacagatatgacaaaacaaatacattttttgtttgttaagatgaaacatccttcaacgtccttacgcgtcatcatcatccttacatggaggttctcgatcttcttctccaaatcattcttccttaatccattttctcttctcgctatctctatccaaatctctttcttccaaaacctattttctaattaatttgatatccattgttcgtttgtttcctttctcccattcttgcatctgctaaagaagccacaaggtgctttgttcacgagcctctaagaaaacatcgacaccatttattggttgacatgtgaaaccaatatttaggttaaaatttgtcatcttttgtatgtataagttgagaaccgatcatgtcatttagatcacattcgagagggagtagtcaattcgcagagaaggtaacagaggatcctgtaacgtacaagacagcacaaagcaccgtgacgtgcatttaccaagcgcatatatccggannnnnnnnnnnnnnnnnnnnnttgtggtcaaagaatctcatgaatcattcgcttatggtcatggtgacaaacgtggaaggcgatatgaattattgttgcaaggttgatcttaagccttggcatttttggaacaagaaaggctacaagtcgttcgatgtggaaggtaacccggtagaggtgtattgggattttaggtctgcgaaattcacgagtagtccagagccgagctcggatttctacgtggctttagtctcggaggaagaggtggttttgcttgtgggtgattacaagaagaaagctttcaagagaacaaagtcgaggcctgctttggtcgaggctgccttgttctacaagaaagaaaaacgtgtttg

SEQ ID NO: 9225 - DNA, 621 bp, Arabidopsis thaliana landsberg
gtttttttttattattttactcagagatcaccaaaccctagttttgaaatttgtttcaatttttctcaaattactctgtttataagatctctgttttcgttaaattatgtctttgagatcagaatcttcaacggcagagaagataacagaggatccggtgacgtataagacagcacagagcagcgtgacgtgcatctaccaagcacatatggttggattctggagaaacgttagggttctatggtctaaaaatctcatgaaccattccttaaccgtgatggtcactagcgtacaaggcgatatgaattactgttgcaaggttgatcttaagccatggcacttttggtacaagaaaggttacaaatcgtttgaggtcgaaggaaaccaagtagatgtctattgggattttaggtctgcgaaattcaacggcgggcctgagccgagctccgatttttacgtggcgcttgtgtccgaggaagaggttgttttgttgttgggtgatcacaagaagaaagcttttaagaggactaaatctagaccttccttggttgacgctgccttgttctacaagaaagagaatgtgtttgggaagaagattttttcgactagggctaagttcca

SEQ ID NO: 9226 - DNA, 877 bp, Arabidopsis thaliana landsberg
gtaccagaaagaaaaaaaaaaacacaagtaatacaaaagggcaaaacagcctttcctcgttacttcatttccatattattaaaaaatatattattaattccgtcagctatacacggcaaaaactcacattatataaactctgccaaagctgcagagacaacaacacagaactagaaaagagaaacactattagatcatcacttctcagatttcgatattcccaataaataataaatactctcagttcttctcttctccaacaacaaaaaaatgaattcagaatcgttagaaaatctccaccgtccattaatcgaatcatcgaaatcgttcgtcgattatcgtctcgagactgtgttaacagatcgagagttaccgtattttcgccggatttatctagcgatgatgattgagatgaagtttctctttcatctggcggctccggcgatctttgtttacgtcatcaacaacgggatgtcaattcttacacgtatcttcgctggacacgtaggaagcttcgaactcgccgccgcttcacttggaaacagtggtttcaacatgttcacctatggacttctggtaacataacaaaatgatttttcatctctttttgtttagatttagttgtaaccactaatatggttaccaatcaccaaagcgatttttttttttggttaccaatcaccaaagagattagatgtattatatcaaattattaaaaaaaaaaacagtttactattaaaattgaaaaaaaagtagaaaatttactgaattttgactaaaattttaccgttttttccctgatcagttgaaaaaacagagaaattttcttgaaaatttgattaaaaaatcctatgaatctaattttttttcttttcct

SEQ ID NO: 9227 - DNA, 533 bp, Arabidopsis thaliana landsberg
  unsure (1)..(533): unsure at all n locations
aaagctatttttggtctacttcggatctgccagagactacttctttataatgaaagcctagctgatgagcttttgagagctcttgagcttgtgctgaaactggatgcacgtgttgcagatgcctattgtgagcaaattgcaattgaagtcagccgtcttgtgaaagccaatgctaatcacatcaggtctcaggcgggttggagaacaatcacatccttactctccatcacagcgcggcacccagaagcttctgaatcaggatttgatgccgtatcctttgttatgtctgaaggaactcacctgtatccagccaattatgtacnnnnnnnnnnnnnnnnnnnnnnnnnnnnnnnnnnnnnnnnnnnnnnnnnnnnnnggtctatccgtgcccttgatctaatgggagattcattagaatttttggctaaatgggctctctcagctaaagaaaacatgggagaagaagatttcgggaagatgtcacaagatattggggaaatgtggttaaggcttgttcaaggactaagaaaagt

SEQ ID NO: 9228 - DNA, 1610 bp, Arabidopsis thaliana landsberg
ggggttaatgccagtaacacgtacatcatcatctactatcgccgtacagagagaaaactagttttaaagcctaagtataaaggcgacgacgtaaaagggactacaggaatatgttgaaagttcaataagacaacaagggactaaaagctcgtttattatgtcaacatgtatagtatgtttgtttgtttttggtcaacatagtttctccgatggttttttcgggtaaaaaattagaacatgtagggtttcaaaatgagggaagttttcatgtaaacaattgtgggaatgtggaagtgtataatatatacgcacatgaggagaaaatgagagaagaagggcaatgatgtttcgttttacctgattcagcagtcatgagggttaatctagtctatgaaactgggtgaaaatgggatatggtcctagtaataaatgttgggtttagttagagagtgtttcgtaaaacagggtaagaattgtcgagttcgagtctttccaggatttgttgagttttccataggtaagatgagtgaccttccaccatatccgttacatctacctacaaatgtgatgatgattactctgattgtttctatcattttcacttcctacgaattgaagatgagagtaaatgagatgacttacatcttcaatccccggtatacagaccggttggattccagctaatccttgggacaacagactgcagaatttaataaggaaaaaagagtttggatttgcaggtgaaaggggggatcgaagaacacaattcaacataccttgcacgaaatgcaactccgagggtccagtcatttgtggcgtaaacattaatgaatcttccagccaccatctggtaacccataaaaaaactcgtataagatgatacagaacaccaaaagacggatctgtttcctagactgtgacaccaactattgttaatggtagggaactctcatcaagaaggtttattacctttcttacgtctcgccaattctcattcttgattgaaattggtgctccaagaagaacaactctttccacaatttcagctaccgtgaaaaatgtgttaaagacaagaatcaattgtcaattctaaagcaaagataaatattgagtggagaaataccattcttttcagtctctgccagagtctggaggcacttaaagacaacacgtgcaccaagcgaaaaaccaaccagagtcacaggtctgaatttctcacaaattttccaatgtaagagaatcaacatgctgatgtaaaatactaattgcataactttctatcataaagatatatgatggaatttatccaataattatacctatttccttgcaacccttttcgaagcgcttcagcaagaagcttccctgctttgtctgacctgaaataagataatacgaaaataatagcacataaacttacttgcagtactggtttcatcacatttggcatttcagtttcatcaaatattttcattttacctgtcaatagcaatactccatctactatctataaaatcagcagctacaaggattgttgccggccaaaccattgctgctaaaagcgagtttagtacggtgcgcattgcaccttgtcttatcaactccatagc

SEQ ID NO: 9229 - DNA, 2628 bp, Arabidopsis thaliana landsberg
atgtatttatatggacatagcaatgtatacataatgtaactataaaaataaataaattcaaaataaaataaaaaaaaaaaataaaaataataaaatattaaaatatttagagtattggagaccaaatgatactaatatatcttattttaacttatttattagtggagaattatgcccaatacttcttgtgagaaaaaacaagaacaactaaccaagcattaccttattattaaaatcttacaaaacaagagtttagctttgtaaaccattgttgaaaaaagacacgaccaaatctatttcagtctttttcaaacacattccaatctcaacgccacctgactcatcacgtctctctgccattgagatcgcttctccttggtcaatggagacaatatcaactttagcgggtcttccccacccgaaatccgcctcgtatactcccaaccgggttgacccggctatcgtcccaaactgtgtactccaactctgaaaactaaacccttcaacgaaagtgtccgcaatggtatctatctttcttgaactcaaccctttcaccaaatcgctaataatctcagccgccgtcacaaatcctttctcttccataaactccgccgccttacggttataacaacccaccggaatcatacagtttccgaagtaagtccccggaagcttcggatctaaccggtctctgaaatctcctacgaacaagagactcactgatctgtctttattacctccacgtgccttcacgaagcaagtccacgcgtaagcgtaagcaatgacaaaagtcgacaagtggaggctcggtgacacgttcttgacttgttccctaagtctctcaatatcagcccgagagagaactagcgtggctaacacgacatcgtctgcgagtttactagcgggaagcgaagtcaagcttctgatgttggttttgtcctctttgagagatctcactaactctatcatctgttcatcaagataggtcggatatttgatcaaagaccggtcataagatggagttagattctccggcatgcttgggggttcttgtttgcagatttgagcccaagctttgataaaagtgcttgacgttttcccgtctaaaacagcatggtgtgctgcaacaccgatggagaatccttggttaggaaacaacgtgatttgtatggagaaagcggtcgctgagtcatcagaaaccggtaacttgggaaccaaggcatgtaactcgtacaaaggacgttgtccataaccggaaagatgagaaaagtcagcgtcactctcggctatagtcaccaaaacgacgccgttttccgagacgattatgctcggttttggctcgtttggctcccaagtgatgtggccagtgagagggagatagttacggaggataagggacagagagtccttgagcttagggaggataatggagtggaaatggtcacgagtagactcggtgagctcgtagaagaagactcttttgactggctggaatagtagccatggaaggtcgaagaaagttaaaggaagtttgtgcaagttggctgagttgatgactgagtagtcggtgggggtgactcgggcagtctcaatgacgtgtagcgtcattggtgatggtcacgattgaggaagaaggttaaaatgatttaggagtctcaaaaatgggaaatgtagagtaagatggttgtgtttctcgagatacacctttcaacgatatatatagactagacaacagaatcaataaggaaatctctatgcgctgtacaaattattaacaagctatattctaactatagtttaaaatattggagagattcggtgttatttcttctaaaggaaagttaatagtatatagtaatgagtcgtgaatttttgaatcttccctactttacgaccaaatcttcatctctatcactggtcatcaaaagtgactcttttttttttctttgtcatgatgtagtgtcttttgtttttgttgatatatccaaaattggaagtagttcacatttttccaaaatattggagtttagttaagattttgcctttttgattcacaacaattgtttttaaataattagttaatttttaagaaaccaaagactcttaaaatgtgattcacaatctcttagcttaacattttaaggatccaatcgtcgcaagtaaacggaaaaaattaggtttccgaagcgtttcatctcttcacttcctcgcctctctttctcttccagattaccctttcatcttctaaacttcatcacaccaaataaaattcaatataaattaggcttcttaatgatctctagagacacatcaaaatttatgggttaaatttcagaggttaatccatcatacggattagattgcaggcaggtctttagggaattcacataaaggtttccatgctattgttattttttggcagtatttaattcttctgttttttgttttcttttgaaggaacaagagtaaatcggaggataatcaacggtagtttctaagcataatcttaggaatatttttataattaattttaaaatatctgatgttaacattttcgttaagagattaaaattttgacaaaaagcaaatgtggccttttaacttagagttcttgttgaaaaaaattca

SEQ ID NO: 9230 - DNA, 735 bp, Arabidopsis thaliana landsberg
agacctgagattcttgtcagcatatccatgaaagccaacgattttttttctcttgtctacaagtgaaaatttcttaccctgttttatacccaagaagctctgaattcttgatgttagttttgaattgaagggcttgaataacaccagattcatcgtcgtagtatccttctacacataccagatgttcattgttgagatggtcaatctcaaactgggaaaacaaattggtgaacaaaaaaaagattagaaaataagaccgtaaatattggaaaaatgtgggagattccaatttataccgtttgtgtgaacccgctacccgagagaccatggattgatccattaatgtgttgtccactttttctgacataatcaaacttgatgtattgaattccttcaacaccacctcgtacatgaatctttgtcacaccatcattattggttccatcatcccactggtttcctcccttgctgccttttgcttccattttacgaggatgaatccaagagaaatatcctccaagagagatgatttttctttccttcatataaccatgaaacccaatgattctctttcccttaactgaaagtgaaaacttagtaccctcgtcatatcctatcagttcggaaaccctaaaattggttttgaattgaagtccttgaatgtaacccgacccgtagtcatagtaacccttcacagattcaagatgttcattgttgagatggttaatctcaaac

SEQ ID NO: 9231 - DNA, 1004 bp, Arabidopsis thaliana landsberg
gaaaaggagcctttgcggcgatggcgataatgggaagaatagatcaaatgctaaaccctaaagggatctcaatgtcggttgcaccacttggtgctgtctctgccattctcttcaccactccttctgctcctgctgctcgggtaatttcctaaatgctttttttacaggcgattgaaatgaataattgcgaaaaatgaagcaataaaatgctagctattaattgttaataacatgtgttgatgggtgcatgtgtatttatttcagaaatacaatatgttcacggctcaaataggttgtgcagccattggagtgttggcgttctccgcctttgggccaagctggctagcccgcagtaccgctctcgccgcttccatcgcgttcatggtcatcactcgtgccaaccatccgcctggtaattcaattctattttttggaaatatagaaatttcatcactaaaatattgagaataattttctaatataatcctagcaaaaataaattaaaaaattagcgcacagcggatatcctaatcttaatatagaattttggaatgaaacataaataaaaatcaattaaatagtgattaggatagtagtaggtctcgagtaggggtaaatttttctatttgttctatgcaatggatcaaatcatagattcttactatcatgcattttaggccactacacctttacgtggaataaaatcagattttctacatattcacgaatttagcaaaaaaaaagtttttgtttgaaagtcctggttttatgtctagaacagaaaaaaaatccaaaacttcggatttcttgtatatatcaatgttgagtttttttttcttaccaaaaatagtttactgatgtttcatgtttgcatatatatgattttggaaaacacaacaagcgggagtttaccactactgtttatagacggagcaaagttgcataaactgaactttgggtacgcattattccccggtgcagccgcttggatccttctctgcttc

SEQ ID NO: 9232 - DNA, 1563 bp, Arabidopsis thaliana landsberg
tcatctccaagagaatcctatatctgcacacagttcaagttctccaagtaagaagaagtaagctggtaccaataagaacacaatctcataatataactaaccctttatagcagatcaacgaatccagtgttgcgaaacatgaaaccacataatagcagagtctaaggcctttcctaagaaaccctaaaagcaaatatatccataataacagcagaaagcatagagccaatccaccaacgtctcgagacttgaaaatgaaaaatcaaaagagaacacaacagtttgttcaccaattcatatcctatcaaccttatcagccttcaccacaggattagctttagcaatagcttctctcgcaactcctttgaaatcgaattggcactcgtgactctctggatatctatgagttccacagaaagtgcttccacacctacacttgaaacccgtcacgccaactttcttgttacagctcaagcatctcgtagccgtcgatttcggtggatccaacggagcagcagccgaatcaccccctctcgttgatgaggaagacgatccagatccgaggacgccttgagtgatttcttggctctgttgtggttgagttttgggtttattagggtttagagatttctcgacggcggctttagcggaagcggtttgttcctccgtggctcggatgtctctgtagcatttagagcagaggttcatgttcgatggagatccgaagaagccacatcctttgacgcagagctttggctctgaaggagagaagcttgtgctgtcgttttgctcagaacccataatggaaagatctcccaattctaaagtcgaaatcttactgcaaaagaaaagacaacacaaatcgtgaataacagatgaagaatgaatttgtgactttaggtttagggtttttatttatgattccgtcgagaaaataaagggaaattgacaatatcgaaagatttagaaaacggagattcttggcttgtttctcaagcgagaaagactaaaattatttctcatttatgactaaaatacccttggaactctttataaagtcgaagagtaaatgcgtcatttgtcaacacttaagaccaggtcagcgtctatctcacaaagaccactttacccttccggcgcaaaaaaggacaaaaaagagatagataagagttgtttaatcttcgccgtcaaaaacttaaatcgaatggttcaagaatagatgaaggattcaaacgaagaacacaaatctgcatatcggcacagaacaaaaccaataagatatttacctaattcccacccaaaactctgctttagtatgtcggcgacaattctctcgtaaagaaaatctctgacggtatgtatcactgaaaatttccgatagaaacttcgtgatttgatcggagatggagaccgtaaccgaaacctcttagctttcgccagagagaaattaggacagaacagaaaccagactcttttagccccttcccatttgtctttgtggtcaaatggaaaataaaatatgcggtaaggcgcacggaagatttaatacatccctgataagat

SEQ ID NO: 9233 - DNA, 1284 bp, Arabidopsis thaliana landsberg
aaagtttttttatttaataatatatcaccaatattttccaacaacatgaccgttatatccttctatctaaaacttaattacgaaactacccttacctctttcactgactgactcgtctccttctccacttggatctcaaaaaatccgatccaaaaccaaatccgccataactctctctctctctctcccacttcccacagatagaaacattcatgccagcaatgccaggtctcgtctcagtcaaaactccttccgatacaccgccgctacgtgtagccgtaccagacacgcaacctctctcaaacccgccgcgaactccgatgaagaaaaccccttcctctacaccatctcgatccaaaccatcaccaaatagatccaccggcaaaaaagattcaccaaccgtatcctcctccaccgcagccgtaatcgacgtcgacgatccatctctagataatccagatctcggtcctttccttctcaaattagctcgtgacgctattgcttctggtgaaggtcctaacaaagcattagattacgcgatccgagcaactaagtcctttgagagatgttgcgccgccgttgctccgcctattcccggtggtagcgatggtggacctgttcttgatctcgctatgagccttcatgttctcgctgctatttactgtagtctcggtcgattcgatgaagcagtaccacctcttgaacgagctattcaagtccctgatccgactcgtggtcctgaccactctctcgctgcgttttctggtcatatgcaacttggtgatacgttgtctatgcttggtcagattgatagatctattgcttgttatgaagaaggtcttaagatccagatccagactttgggtgatactgatccacgagttggtgaaacttgcaggttctcttaactaagcatttaatggttaattaaactcttagattacgtttgctaaaagttactatataggttagatctaagtttctgaagtctctgataattttcaggtacttagcagaagcatatgttcaagcaatgcaattcaataaagcggaagagttatgcaagaagactctagagattcacagagcgcatagtgaacctgcttcactggaggaagcagctgataggaggttgatggcaattatctgtgaagctaaaggagattatgaaaacgctcttgagcatcttgttcttgctagtatggctatgattgcaagtggacaagagtctgaggtagcatccactgatgttagtattgggaacatttacatgtcacaatgata

SEQ ID NO: 9234 - DNA, 1838 bp, Arabidopsis thaliana landsberg
taacttttattaaaagataatatcttacctaaaacttgaaaattttcgatatttccttagaaatcagggcactgggcattcgactaatcatcaggcatttacctttcatagaaaacagttcacaaagcaatatatagccaaaaaacgaaaaaaagattatcctgaaagtaatccacagtactggttttttttttttttaaaaaggagaccgcgtttctacgctgactttcaaatcagtcgcgtcggtattattccacacgccttttttctcgtccccatcctctatccacatttctctctatatatactctcctcgtatcctaaactcatcctcaaattcaaaatttaacacacaaacacaaacacacacaccaaaaaaaacacagaccttaaaaaaataaaaatggttgatatggattggaagaggaagatggtatcatcagatttaccaaactcacctaagctttcttcaaagcttcacgtaactattccatcaccgttcaaaatcgtccctgtttcatctccgatctcatgttcagcacctgctctttgctctgcttacgagctttaccttcgtctccctgagctaagaaagctctggtcatctcgtgattttcctcaatggacatcagagccgattctcaaaccagctcttcaagctttggagatcagtttcagattagttttcgccgtttgttctgatactagaccgtacatcaaccaccgtgaatggaaccggaggctagattctctcatcacgaagcagatccagcttgtagcagcgatctgcgaagatgaagaagaagaaggtatatcagcggaggctccggtcggcggtggacggagttcgttgagtttgttaccgcagctagctacgtggaggagatcagaggctttggggaagaagatcttatatacgatcgataacgagatgagtcggtgtaagtacacgctcggactcggtgaacaaaacatcgccggaaaaccaaatctccggtacgatgcgatttgccgaccaaacgagatctatagcctcaaggataatccatacgcagatcatatcgataatcacgagaatcaaactctctatatcattcaccagatcctcgaatcgtggatctacgcatctggaaatcttctgaatcgaatcgtctcaagtatcgaagaagagaaattcgaaaaagcttcaaacgatgtttacttgctggagaagatctggaaaattttagcggagattgaagatcttcatatgttgatggatccggaagattttttgaaattgaagaaacagttacagatcaaatcgacgggtaaaaacgatgcgttttgtttcagatctaaaggattagtggagatgatgaagatgtcgaaagatctgagacagaaagtaccggcggtcttggcggttgaggtagatccaaccggaggaccgagattacaagaggcggcgatgaagctttacgcgaggaagacagagtgcgataagattcatttgcttcaggggatgcaagcggtggaagcggcggcgaagagtttcttctttgggtataggcagttagtggcggctatgatgggaagtgcggagatgaacgcgacggcgagtcaagagtcgtgtgactcactgagtcagatatttatggagccgacgtattcccgagccttgacgcggcaaagacgtttctgggagagttttggagtcatttgggatgattaattttaattctgctggtaaattatttaatataatctaattggtggtttggttaattactttgtagatagtgaattttggacatttgcgatcatattgatacaatcattttatatgattagagatt

SEQ ID NO: 9235 - DNA, 1715 bp, Arabidopsis thaliana landsberg
ctcgagctcgcgcctctcgttcttctcactcctctgcttctttccactcctccaccgctcttttgttcccatctttctcgtcttttccacgttctcttcacacgcgctgcgtttcaaacgctgaagtcagctctcttgaccaccgtggaggctctaagcggttagattggcaggcggaggaaagcgaaaatggagacaagatcctagaagtggatacttggaagcctcattatcatcccaaaccgttacgttcagagagaaacaatgagtctccgaggaaacgacaacaatctttgttgggtccgagaagtacagagaatagtcctcaagttggttctagtgggtcaagaagaagaactccttttacgccgacgtcaagaagcgagtattcttggggatgtaataactattactactcgggttatcacccgaattacatggctaacactgagtcttataaagctaaagttcggtcacaaagtgcgccgaaacagagagttgaggtctctaatgagaccagtggctacaagagatctgttcagggacagtattactactacacagcggtagaagaagagagtttggatgttggaagcgctggttactacggcggaggaggaggcgattctgatcgattgaatcggaaccaaagtgcgaaatcgaggatgcattcttcgtttcttgtttagattgtgattctctttctcttcttttttttggtttgagtttggtaattttccacaccagataagtattaacactggatgtgtaaattgttgttaacaagtttcgattgcttgcaaaagaaggaacaccactctgttctctatctttgttgattagtgttcaattaagattaatcaaactgagtcaaaccccacaatttagatatggttcaaatggtatctttttttagatatcagaagaattgaaaccaaactaaaactaactgatgtaattttcgttactggttttatcaagagtttaatacagatttgtttcagataagcattcataattttgtagtacaaattttggaatccaccttatctatatgtgaggccgttttggaatccactgacactgagccttgaattttcattgcatgctacaaaaaggaaaacaaatgaatctaatttgatactaaataaatcataaaggaatatatagagaaagggtgagttacaaattgcagtcggtgttagggtcgatggtgaagcccaaaacgacgccgcagaagccagacaaagtagaaatggcggtggcgttagagttatagacattgatgagatccatgaagcagttacacagccactttctcttctccgacgaatcagagtaagttccgatcacagtcatcgcgtcgcagcaactcgaccctggtatcggatccggatacccgtagttcacaaactctgtgcacgacgatatcagcgttcccaccgccgcacaatccgctgcgttttccacagtggctgaacatatcgtttgcagtagtaataagaagagagacaccaccggagagaatgatctcgtcatatcttttgattattaggcccaactagctttgacgttttcgcttggtgtacaaggtaaggcttatagacaacacttaaaaacgagcgttgggtgtgtgtttggagttgggtttcaacagaggttgtgtgaaacgccatgcgggtttttttttaaattttttttccccctttttaaaa

SEQ ID NO: 9236 - DNA, 1150 bp, Arabidopsis thaliana landsberg
ctctggttgacttctatcaataattacacttttcactgaatctgctgcatctttacctccaaacaaggctggaccacgaaacaaagccatcgctatagcacccgaaacacaaacaagagtacctccaactttcgtttggccctcgactttcaacaagttcactttttctgtactgtatacaaagaagaagaccatcaaaagattgaaactttatattacaaattttcacattttacagtaatgttgaggaaactcatactcaccccatcaagacagccaagagaaatgtaaagacagggattgatggttgtatagcagcagcataagttggattcgtgtaagataaacccataagaaatagtaactggttcccaaatatcctatcaagattgagattgaatgttgttattagactctttcattagcatgattcaaaagataaagagatacaagctgattactttaccctgctaaaccaagaaagaagagtgaaaagaagatgcttctattcataggaggtctgatcgttctacaagaaattaaaagagcaaatctttatcaaaagacaaatccaagtcacacaaaattgcaatccatcattaaacaatagaaccagaattaacaaagaaaaacaaccctaattccaattccagagagatcaaactatttgtctgattttgccgcatataaactcatcaaaacaatcagaaacagagacttcagagactttagcaattcaagcaaaaggagaaagaaacagagagattttgagaagaagataaaaagggacctttcacggaaaaaagcgagaggtgcgagaatggagagagcaagaagatcgcgaaagacacaaaagacgagctgatttacaccaacgttaagagctactttcgtaaccacatggtatcctccatttatgacctgaaccaatgtcattgcagagtgagccattcgtgtttctctctccgtcgcatcgccgccgtttaggatcgccggagctgccatttttcttctctacctccgaatcgaggaaaaaagagaaggaacacctgttgactaaagaaattgagatcctttgatttgctctgtaaattggaattctaacttctctgttttttcgttccaaaaaaaaaaaaaacttctctgggca

SEQ ID NO: 9237 - DNA, 1065 bp, Arabidopsis thaliana landsberg
attgatgctaattttttcaaacattacaaagtttccaaagccaccgcccacttgaaacattcttttggtgattatgattgtttatatcgatttagcattactttacaataagcaagtgattctcttcataaagtatgtagctttactttgtttgatcctactcttttggtaatcttagtttcggatttgcctttctcgcaataacagagcgctttgtacagttttgcgttttagatgattaacattcctttcttgcgtatttcaggctgattagaaacttgaccgcttgattctcttaaaggaggtcttgcgatggattccgctattgatatcagttcagatagtgatgtcgagatacaagaaactagaaccaggcctcaacatcccccacggatagctgaaggttgcatttctgacctatcaattgttttatttgttttgctgtgaggttagctttatggagttgttgatcttggtgcaggatctcatagaagagatctctctacgctgagaccgcactttcttagtgggagttcttccggtgcaaatggccacactaaaacaggacttacaaatctcgactcacgtaatggttttgaatccaagccactgcctcgggcagaacaccatacacatattccgggaaatgggagtatcgtaacttccagaattcccaatctctctgttggtgattatgagaaattttcatctcaacaagcttttaaaaggacacatccaccaacctttagtcgacctccttttcctcctagacctgatattggtacaagtaacgggaatgcgagtcactttcgtggtggagcacatgatgatctaggcatggggcgtgtgactaacggcactcggatcctacctccatctgtggcgcacggaacatctgcgtctccttcacattttaatggattaagtgatccaatgcataggaatggcataggcgaagaaaggaattcggaaaatgacgagaggctgatctatcaggctgcactacaggtgttcatccttatcccaacttttgacttttgcgattctcatcttaggttttctttt

SEQ ID NO: 9238 - DNA, 533 bp, Arabidopsis thaliana landsberg
gtacgttctggagtaaggagaaaaaagttcatgaatgtccgatttgttttagggtttttacttcaggacaagcactggaggtcataagagatctcatggaagtaacatcggagcaggaagaggattgtcagtaagtcaaattgtccaaatcgaagaagaagtatcagtgaaacagaggatgattgatcttaatcttcctgcacctaatgaagaagatgaaacttctttggtgtttgatgaatggtgaaaacgaaaggtaacaacagactttgcgtgattcgggttgtcaaaattattattctttgttttttggggtttgattacttttatgttaatgcaaaggaggctacttttacatgttctaacgccaagttgtttcagtactagcctcacgtcgtgttggcctaaatcagagagagcattcaattttttttgttttttagacattttttaaggtattcgtaattgtatcaatttcttggtttctctggcaattttaggtattactgtttcaatttagaagctagagaagt

SEQ ID NO: 9239 - DNA, 1376 bp, Arabidopsis thaliana landsberg
acccttcatccggaaattgaccgcttcccatttgcgtggttgtgtggtgaccatcttcttccatgttcactacttctccaccccactctactattgatgcactatctgctaagtaagagaatagaaagcttggccagtatcccaacacatacccgtctccaaactgcatccaccagtgcccttcttttggatcctacaagaacaatgtccccgagttatcagtttttattaatcagacacactcacatatccataaagataacatcattgagggcaaaatgttgaggttcaagaatttcatgaaaaagatggttctttagagaagctcaagaaatggataccaggttgattcatccataaaggttgagactttttaccttccaaatggtaatacttatatcgtattgcgggttatggaagccagataccggagagatacttgctcccattgctatttgactgttgatttgtatgaaacccgaacaaaggagattgtagcagcccgtagcttgataagcatcgctcttttatgttccaagaagacatatccaacaaaatatgttagctcaaagggtatatactatactctcagtgaagaaagtttttcagttttttttctgagcttaccgtccagtatgtgaaaagccttgtgttgttatcgccatataaatctggactaacctgtatcgatatatatgtcagtgaagctaagaacacaagtgtaattgagattaagctaaactgctatgacattatctaggtgctttacctgccaaccagcttcaatgctgttgagatcttgaccaaaagaacctccaagaatccataactgagacaagctaaactcattagagctttgcactttgggttcccatacatttattgtcgcctttgccccgtaaaacttgcctccttccacataagctatcgcgtgctagatatacaaaacagaacccttagataaagaattcacataatacataggtatatagataaagatcactaaagtctacctgatgaccactttggttaatgagatcaggatcagcagatcgaggcagaggaacagaaaggtgcttcttcttaccataccgtttaacagaactcgccctcaagacatcctctttctttgtcctcctcactggtattgtcccttcagaacaaactccgttctggtgccataactgtgtaataggattgacactctcttttggtttctcagacactttgctctcaccaaacagcgattctggagtgtaactaggtcccatctgtttaaaaccccataacatgttaagacataaacactatgagtgtgaacttgaggcaaatgctgattttttttacctgaatcttgtgatctttaaggaaagggt

SEQ ID NO: 9240 - DNA, 1171 bp, Arabidopsis thaliana landsberg
ctcgcataagtcatacatgaacaaaatacacacagccataagcatccaatttcccatataatatatctaaatcactttctgaactgaagtttagatcccaaaatctagtatcacaaaaatggccattgcttctattgactttcggtaagcaaaaatagtcggaaagcaacaactagtacactcctcccttccccaataaaagagctaaattatgaacaccaaaaaaaaatcatcttctcaccaaaataccaaacttagtgatttcaattctcatacgatccatgtctacttgttactgcctaatacaatcaactcaaactctaatcatacacttcagaaaagttagataccctacgtctagtatcaccaagttggccatcgcttccattgacgtgcaggaagcaaaatcgaggaaaagcaacaactagtatacttctccttctctcataactgtactaaactacgaatacagacaacaataatcttctccaccaccaaactactaaactcattgatttcatttctcatacaacaaatcaactcaaaccctaaccaaacatttctgagctacaacatacctttccttcaggatggaaacaaggatgaatgataccattcatatcgagatacaaattatcaaattcgaagccgttagggttaggtctggtgatatcaacaggaataaggtcaccacgacctccatcggtaggttcttcttcaacgacgtcactaattgacttcgggtatcggtcagcgagccatctgtagaacgccggtactcccatggcggattccgatcggcgattagagagagatccgagtggtctcgagcttgaaggttatctaaatattcttctaacttagtttttctttagctgacaccaaagttgttagacatgattgagcagaagaagcttctcttcaccccaaatatttatttttccgattaacctctgagttcttttttaccctatccgtgaagtctctccggtttctaattattattctcttggaaataaatgggctttattgggccggatttactttacccactttgttcaaacgggtttagttgtggtctcaaagtgacgtaatgagattttcttggtttttattaccaaactaaacattcatttttaggatttagtaacttaacacaataagccacaaa

SEQ ID NO: 9241 - DNA, 480 bp, Arabidopsis thaliana landsberg
agtcacagttatcttggaaactggcatgtgaataattattagcatactaagaaaagataggaacaagtttgtactgtaatcaattacaagcaccctcaatagagtaattaatgtggaatcaaacattagattaggtaattttaacatcttgtgataaatgtaaaggactcttatctccatcatagcttattagtgtaaactgtagaatcactaacctgctaaacaaaatcaatggcttcttgtctttctcttcttgttgctattatcctctgcttctcatctctccagtgttccaacgccatcggcaaaggctaccgtctgatctccatggagaagtctcccgatgatggcagcttcattggctatctccaagtgaagcagagtaacaaaatctacggctctgatataaccatccttcgactcttcatcaactacagagtttttaatcctctgcttcgcagcccacattatccatccatt

SEQ ID NO: 9242 - DNA, 1492 bp, Arabidopsis thaliana landsberg
agcattgggctacatatggccgtcactattacactcgatacgactatgaggtaaaactgacaaatgtcattattggttgtagacaatatgtagaataaccaattacctttgaccaatttctaaatatttgctccatagaacgtagacgcaactgcagctaaagaactcatgggacttttggttaagttgcaatcttcacttcccgaagtcaacaagtatctctctctccacttaatttcaaatccattcctttttacttgtatgactttcagactcacgtttttggataattggtcaggattataaagggaattcatccagaggtggcaaatgttgcaagcgcagatgagttcgagtacaaagatccagtagatggctctgtttcaaagcaccaagggatccgatacttattcgaggatggatcacgacttgtaagtcgatatgtgtgaaatggattcataacaattcaacaacctgtgaaattgtaaaagctaatccgggcttgtttctcttgttcatgaaggtgttccgtctctcgggaactggctcagaaggagcaacaataaggctatacattgaacaatacgagaaggacgcctcaaagatcggccgagattctcaggatgctcttggtcccctggtcagattcccagataccttaattactcccaaatttacgcataatcgatctttgtcatgtttattaacaccaattgttggtgtctgattttcacaggttgatgttgcattaaagctgtcgaaaatgcaagagttcaccggccgatcatcaccaactgttattacataagacagctttcagaagacgctgtctccaatactactctcattccaacttcatttcttatgaatttgggttttgcttttttcctgttatctgttatcttacacaagtatacttcaatacatataatcttaatggaatatacattaggttggcaattgaatttctagctttgtttggctcctccaaataaaaaagaattgccacaatattggagcatgtgtggcagatggagacgtagcaagagtaaaaagcgaatccaacaataactgatacctaaaacctacggtgtacaactatagataatggacccgagaggtggtgatgacaagccagaagacagatgtttataatttgtctcttgagcttgaccaacaaaaacattctgacagttaaaagctaatgttgggcatgaatttcgtgaatcagattgtgccatgtgttagtttgtataagtgagtcagggttcacgggttctttcttatttggtttttaaatccaaaagaaagagaggcatcattaccatccaaacactcctcccagtttaggctttcttcctctgtcctttctccatatttgttgtcttctactaaacttttgtctcaacaatgactgatgctttagctaaccatcaacattgtaacatacagttgatggttagctatttgctatacatttgtctatttctct

SEQ ID NO: 9243 - DNA, 1551 bp, Arabidopsis thaliana landsberg
gatgaggaatcggaagtgtggttgaagagtttccggacagaataagccgagctggatggggaggaggaatagttactggacaccgattattgttatttataaggagaatatagcggctggtagttagagggagttttcaagagttttctgttgttgttagcttcagcaactgtgaataagattgccaagagaaaaactagagtgaaggaaagttctagagacaccatttttcaggctaatgttgagatccttagaatatatcaactatgtttttcatatatagtccttgaaagttctcttagaggcttcccactaactttaggatttattcaagatcgtaattttcaaatatatattagtaattaagtactgatcaatattagtttttgttagtcaactggttaagctggctttgccttttgtttggattttaaacttctcttcttttgcttatcaaggcctccctctaaatgatatgcttgcttaaccaatagtatcaactattaagtacttattaagaaaaaatgatattctttttggattttacaaagctacttactttgaaaaataaattatgttgattgatgtttttcagacatgttacgcatgcctttcttccaaagtacaaaagagcaaggggtgacataattaacctagaaaagctgacgtacatagaaatctataaattaatgactaactcactactaacacaccacgcattgcatttagtttaaaaggccattctcttctcggaaagtagatttttgcaacaagccaacaacgccaacaagctaaaccgaataaacctttatgattaatgtacagtttttattggggttattaaaataaaaataattcaacaaaaaatagtagaaatgtggatgtaggagaatgacttgttcctccccttgacaggttacatgtctaaaaacagtaacaaagttgtggatgcggcaataactgaatccttagccgttacatgtctaaaaatagtagtctctgtactaacgctatcaacgtcaagaaatcgaaaaacaaaatcgagtgagcaaaaattaaagaacaacgaacaaaatcagaattacacaaatgggaactaataagattcccaaaaccctcaacgggaaccttgttcttatacttatcatcaccataatgatggtgactcactcccatggatttcaactggagatcaggaacgagctatcaggaaggtacaggaagcttgtgtacaaatgctggtcccgcgataacgatttcgggtggcgacagaactggccaggccagtacaaggactggtccttcgccatttcactattccacacctacttctactgccacttccgtacagcgtatggacgcgtggataagcagctagtagcctcatgggagttaaaacaagagtgtggggacaggagaaaatgcacttgggtcgttaagaaggacggactctacttgagacaatggaagaccaaattttttagtaacaagtatggtaacgaaaggtggaatgtgtatattgacgatgacgccacaagacaagttggggct

SEQ ID NO: 9244 - DNA, 1195 bp, Arabidopsis thaliana landsberg
tgttcactaggctcaataccaggaagcattactctgacgtttttgttgtaggcggttataagtggtaatggcatatacactttttgatgcatttttttgcagtttatttcctgatgtgcatttactggttgacgtcatgtgtactgattttttttctctcttgcaggcgtatattgatttttcccaaaggaaacaatgtcgaccatttgtcaatgtacttggatgttgctgatgctgcgaatttgccgtacgggtggagcagatattcacagttcagtctggctgtagtgaatcaagtcaacaaccgatattccatcagaaagggtatcttggttaattaattttgttcatacatatataaaattctgaatgcctgcgtaagatgttaatttcctggctgatgtttatttcttggagttataattttggatttgtaaaaggagtatattgtagactttggaatggagtcaagttaccgctctcttaaacattgaccatggcttacctgaaaactttattgaaaatgatattattattaatatgtgttttactcttttgaactttctaaacagccaatgcctttgttatctgataagtagatgcagttcttactgaaagaactatctctgtgtgtggctgcagagacgcaacatcaattcaatgcaagagaaagcgactgggggtttacatcattcatgcctctcagcgagctctatgaacccactcgaggatatttagtgaatgacactgttctgattgaagctgaagttgctgtgcgtaaagttcttgattattggtcatatgactcaaaaaaagagacaggttttgttggactaaaaaaccaaggtgctacctgttacatgaattctctcctgcagactttataccacataccttactttagaaaggttggatgcttgttttgttttctttttctatttgcttaatcatgagttcgcaaaattctagagaaagacatttgagtaatgcacccatcctttccttgtaggctgtttaccacatgccaacgactgaaaatgatgcacctaccgctagtatcccattggcgctccagagtttattttacaagcttcagtataatgataccagtgtagcgacaaaggagctgacaaagtcgtttggttgggatacatatgattcttttatgcaacatgatgtacaagaactcacagag

SEQ ID NO: 9245 - DNA, 580 bp, Arabidopsis thaliana landsberg
tattatacagtcatgactcggtttcaggaagaatggaatctgtgagaagaaaacttataactaaatagaagtgttacgtaatttttcgaattcccttacgaacatgtttgataaaaactagatttttgagaaatggcttgtggttgaaaattcttccactatgtagtaaggaaacttacagaatatcggtcctgcccattcccgagtacccgatgcaatgtagatctgtaaggtataaaaacatgtagaaaaatatgtcattacaaaagaaactgtacttgaaaatcatgttacatgttgtattgagcgacaagtgtcacaatttgtcttaggaaaattaagcaaaaacaaacaaaaactttacttgaaatagccattactccaacgctcaagcagatcaccaagattcacaatataggctctgtagacggaaacaaaataaccaaagcagaacattataacgtaataaacaaaaatatgttatgggagttagtgtagcattttaaatgtatcaacaacccaaaaacctaaaacatctcattgttaaataccctttaatcgatggaatatattcccactt

SEQ ID NO: 9246 - DNA, 2215 bp, Arabidopsis thaliana landsberg
cgtcatattatctaagcaagctcttcacaagttactatcttcttttggattatttttcagtgtcttcactccatactattccgaggttgtgctatacagcatggctgaactcaccaagagaaatgaggatggaatatcaatactgttttatcttcagaaaatatatccaggtatacaattccttttaaagattagcgactcttgcctagttttttatgtttcttacttacgcttcgttatgttttctgtacttaattgtattaccgttatagtagatcctaaatgtttcttatcgatatttgatgtgttgcagatgagtggaaaaattttcttgcacgcataggacgagacgaaaatgcgttagaaggcgatctagataatgaaagagacatacttgaacttcgattttgggcctcttaccgtggacaaacgttagctagaacaggtacaataaacgcatatctacacctcttttcttggggatcactgttcacttcatgatctcacattgcaagtaataatgatatctctatcaataaagagaccttacttttctgctattccctcgcatatattttcagtgtttttctttacgtgttatctggcattctatctgcagttcgtgggatgatgtattataggaaagccctcatgcttcagtcttatctggaaagaaaagctggcaatgacgctacagacgctgaaggatttgagttatctccagaagcaagggcccaagcagatctcaagttcacatatgttgtcacatgccagatatatggaagacaaaaagaagatcaaaaacctgaagctgttgacattgcattgctaatgcaaaggtaagaaaagacttttctggattccactgttggttaaggagatggacttttctatctcaggtctagtgcgtctgttatcattctgttattgtattattaagctaatctttttcattctattgtcagaaatgaagcccttcgcattgcttatattgatgttgttgatagtccaaaagagggtaaatctcatacggaatattattcaaaacttgtgaaggccgacatcagtggaaaggataaggtaaactgttattatctgtgaacccagacgtaaactagtgttcttgtttcactaatgttagaaacacttgatcatactttaattgatcgataaactgtgcttacgctgtaaatggaattttgcgtttcctcccccttttcctctttggtccttctattttgttatatggaatgaccactttgttctttatttatgcaggaaatttactccataaagttgcctggggacccgaaacttggcgaaggcaaacctgagaatcaaaaccacgccattgtgtttactcgcggaaatgctatccaaactattgatatgaatcaggttagtatgcaattcttctttcgtctcttggcatctctttgtttcaaatgtcgtctttcgcgatcttgtgtgggtttgtaatgattaagtttctggggaagttcaatcaagtaaatttgaaatgcataggctttataaaaaatagtaagaataatagtttcaaatttagatcttaagaattaaaaatagggcgtgagaaaaacagtgcttcatagcttatgcacatgtctagtggagacatgtggctgtagattgatttggttagccgagtttcatccaataccttgtccaatctatgtaatttggattaattgactagaattcctcttggtactagaaaaccttaggtgccactatgtagacttttacttgagcataatttgagctcatgcgacattcaaattagatttaacaaatttcgctttccaaaagaataaagtgaaaattttgccaaatctagatacataattttaccaagtacattcaatatgggtttcactgaggaagagtggttcctagctttgattctatgtttgaagctcaaaattaaacacatgtggagtaggaatggttcttaactgaaaagcacttactgattacatttgaatttggagtgggacatcttattacatgaatgattgtacctgaatcttctgacatgtgtacatgtgtgctttacatcctttacgtttgagacaagagctaaatgcatgcccaacctttagcaatatgttcgaatttttttcatttcgtgatttatttggataattattttgaagaagacttaaaaatgagaaaatcttttggtggaatttga

SEQ ID NO: 9247 - DNA, 1179 bp, Arabidopsis thaliana landsberg
ctccaagtcatttcttgaggttaacaacagatcgttgagctcagtaaaccttgctagcagattgccaatggtctgtgcaatctctctcgcagcttcaatctttctcagagtgatgaatgcctgattgttcgcaattgcttggccgataagctgagcacttttagcttctccctgcacaaagattcaaaaagagctaatgcttcaggccaaaaccactaatctcatgtcattagatttgcaatcaagatcaccaatgctatacctgcgcacggataaccgcacttctcctgtcttgttcggctttctccacaatgaacttagcccgttcagcttcctgagcagcaacttgttttgcctcgatagctgcggtgaactctttgccgaatgtcagagtcgtgatggagacatcatcaagagcaatgtcaaagttagaagcccgctctgtcagaatcttgcgtatctctctgctcacagcctagaggagagagtaaacagagtccaccattagaaacaaaagagcagaaaagttgtagaaaaagaatgttgagatacgtacttctctctgggtaatgagctggcttgcattgtactgagctaccactgcttttagggtttcatggatgatggaaggaagaaccctttcgctgtagttctcgccaagggttcggtaaatctgaggcaaacggtcacccatgggacgtgtgagaacccttaatccaattttcacctgtgcaacacccaagaaaaatatcagaaacacagcaactcctttaagaaagaaaatggagactaagttctttcttgctctacctaagtctactgaaagcaagtgtaacttgtctcttgtttttccacttatccatacactcacacagttcatataaggatcaacattgatcgtgtaatatcctaaaagagtaagtgatatttaatctacagctccataacctcaaaccacacccaaaattttctaaaacatgctcttaatgctgcattgaagggtcttaacataacgtcaaaagaaggaatatctagtatgatctatatagcaccacattcagtaacatcatttaaaattaaatccctgggctaaatattgtacaaacacacacagaaaagaagccaaaagaagaagaaaccaaaacgcaccatctgaagatcatgactaccagtggtgct

SEQ ID NO: 9248 - DNA, 1915 bp, Arabidopsis thaliana landsberg
aactagtagctgaagacaaaagacgcttcgcggcttgaagtcccaccacaagatcagaccaccaatcacattcatgagaattcaacgaagaagaagcatcagattccgacggcggagaagaatccctgatttcctcaatcaaatgcgtcaggagaccgactcgtcgcgcgagatcggaacaatccttcttaaacaaaccaaaattccccggaatctcattgatttcagcaataagaccgatgagagaatcgggagtgatagctccaccagccattacgccgtctcacacggcggcttaaaattcgaatttttgtgactcgctctctctctctcgctggctcgcttctgactcagagatgcgtctctatcgcttttatgtatccaacgaagccatgtggcgaaaaaggataagtcgctgttacgacaccgttttggttttagtgttttttgttttaaactttttatctaactctaaaaatgtttttttcttttctttttagtttactggctttatatttttagataaaagtttatgtgatacatttaaataatacaatagaacaaactagataattgagagcgagattcacggtgcaagtagaggttgaagagaaaatgatacagttgtcaaaaaaataatcaattattatcatttatattagatcaaaactgtataatagaaatgaactatacttttaaattcaataaaaaaatccacttttctatttattgaagaaaatggtttgttgtgtgcttagttgtaaagtagatcttatatgattgtattttatagttgtgttgaaatttatgttggagttatgaaatttatctgtatgtattatttatgtaatcttaaatggtaataaatagtcaaattagttattttttctatttgaaaagaaactaagataaaatttccaggcctttagatgcattgtattgacatgtgtttctagtatatgatctgtcttaccctagtgtttattaaaagatggaaaaaatcttctttgtaattaactaaatatagctttacatgttttattttcccttaaaaataactttgtatgtgtaagaaaatttaatatctcttacagcaaaaatgttctagaaaaattatgtcaattaacataattttggtgagtattatatagcctgcaaatggaacggtcgaacatgacccggtcgatcgaattttaacaacattttatatattttgaagcatgtatacaaattgggacctatggttttcttaaaactgttttaccacagtttagtatacttttgattaaaatttataaacatgacttacatatagtttgtgacagtcttgtattgaaaagttatctcggtttaacaaaagaaaggttcaaccacgacatccacatcatatcggccgacgtctatgcccgtgacttctgcgtcctacataacaaccgatagcaacttgaaaaatagacaacattatcttttagacatttttggcaagtttgactggctggtttcataattatttttggacatatgcaaaaataaaaagatctacataaagaagagggtattcgtctgaatcagatgaagattattaaccttgaagtgtttgatgaggcatgcgatttttgcttgcacatccacacacaactgtgcattaaccacaatactcaccgttatttctgaaatttatggtgtagttgtacttgcggaacaatatgaaagtgaaggtgagatcagagtttatacagttgtggaaacaacttctttgatggttgtagatcccgcaatcgtagaaaacaaccttaatgatgattgtagtttcgatgataaatattggtccattttcttagcaaacaatctgctcttctatacttgtcaaacattcatattctttggtcatgcaattttgtttaatatttgatga

SEQ ID NO: 9249 - DNA, 2090 bp, Arabidopsis thaliana landsberg
  unsure (1)..(2090): unsure at all n locations
gattctttgatcttttgattttttttttggtttgtgtgttgatgtttttttttattttgtgcttgtgcttatacgtattagacagtgactgattgcaagtgatgtttgaggaaacaataacgttgcttctatgttccaatgcttacaaacttttgggatcacatatatatttctatactagcctttatgcttttgaatgcagcaaagatttgctagtttctgacttatcttcaccctgtaaactgttagctcttacatggaacgttgaagaatgggtgccacctgcagagaagcatatatttaagttccactctaaagaagacttaaagaaatggcatcnnnnnnnnnnnnnnnnnnnnnnnnnnnnnnnnnctgacaggtttaagcatctgctccgtaaagagtatctgatattgtttctgttgtcattatccctttcatttccatgcctcggtgatccatatgaacaactatagacaaaataagatttctgaagatcggcattgcacagatttacattgatatgtaaacaatatgctatgcattttaatatttatcttgtggcaacctgtttgaagtttgatacttatttgacaggattatcttcggcttccttggagatcccagataaaggagatggatcagattgcactggttagcaactttgtaatttcttctgtgatctatcatctgccctccagcatgtcttgttgtcatgaagttcatcaataaaacaatatgagatttcttctatgtcatcatttcttaatttctcgttgactcgttgtgcttctacactgctccacttagtgatgttttttcatccaaatatcttttataggagttttttcggggaacctatctgtagaccttagcgaaggatcaaaatggaacatcagtcgaagtggtttctgtggaatgcgctcaaaaaaggtgaacaacacagagctttcatttatcttactaaccattcttattcaaaacatattttctgcatgtcagtctttgtttgaagaaaagaaggaaaatgggttactatatcttagtcctggttttgtaaacgagagactttttgagtcagcttactattgcaactaattctagcatcctctgcttttctagtttgatggcttcattgatctcgatgggtatgatgcaatagccctgaggatcagaggagatggaagatgttatatctctactgtaagttttatgttgatacgcacttttccctaactccagttgaaaaaacaaatgttgtaggagcaaatactaaaccttgattttgattcagatctacaccgaaaactgggtgaactcaccgggacagtcagaagataactcgtggcaagcttttgtttttgctccaaaggacagttggtatactgttaaggcaagtcctactacttctatagatgttaccaacaaaaagcttagagcattatacacatccttttttgttttttaactctctttagacaaaaccttcggctttagatgaaaacataaccaaaaagacggatctccattatgaatcaacttgaatatttcacttgtcgtctaaggcctattaataacctgatgttgaatatatcagattcctctagctcgatacttgccaacatggagaggaaatgttatagatgtggaaatggagatgaatccaggtcgtgttctaggtatgtcactgtccgtaaacgcagaaggtggtgcagttggagctaaatcaggagcaggtgatttccgagtagaaattgactggatcaaagccttgagattgccgtaaatgttgaacaatatagcaatgtatgattgtttttgttgttcttggttttagcttgtaaaaaacaaggcctgaggagttgatgatacttgatggctaaaaaatcgttgcattgtcttttcactttgaggcacctttttaccatgtcataaaataaaaaatcaaaaggtattattaatcttttgtttttagcctatccttattggtcaacaagtttattataagtagttaataatgcaatggtcgtgattgaataagggagagaacggaagtagtactaaattggtggaacgaatacattaataaa

SEQ ID NO: 9250 - DNA, 1438 bp, Arabidopsis thaliana landsberg
tacttccttccccaacgaaattttctcaaaggttccacagaaagaaccagaatcaactgatttcagcagacctaaagctagaaccttgtacaagggataatcaggaacacctgaaaaccggtgtagcaaagcgtaggaagacgattcgattcgttcaccgtcgtgaagaactgattcgccgcacagaaggccggagcagaactccccggtaagccctatatcgaattctacacagtaatcgagtgtgaacttcaccatttcatctagacaatctctaattttaatcatcttcactcaattggagcaaagttcagttctttagactccattgtgaaatagttctcattgtaaaaaaaatgattcttttttgtctgaacaagagaaagtttgatatatttttttgttcaatatgttaaacccagaaaaaaagaaaaaaaaagtctttgattaataaatcaacagattacataagtctaaaacatgtgttctaagctaatgcttttcagctgagatagaatcattcatggtagatttgatgtagatgggattgctttatctaggccaagaaatagttcatcgttcaacttctccggcaatgatgatggcatattcttccatgtctccgacacattctcattcaaactgtaatatcaaaaataaaattatgatataacttgattttatacatgatgacattttacagaaatgatgattatgttacttactctttgagaaggcttttgatgttctcccggatttttctgaaaaggtctaagttgtctgtgagctgtataagaaagaaacacaaaggaaattaagtaaactaagttttctttagcgattttggtgtctcaagagatcgaaattttggtcaatatatacttacgtttaagaatgtgagatttgcataaatctggttgaaccattgcttattatgattaagaagctcattgtgaacccctacatatcattaaatcagagcacttttatgaatattttcatatctgtttttttgtttttgaaaaatttcctaaaatattgaagattcgttgaatcaatacttaccatgttgagatggttgaaacacctgtgatggttgatacacttgtgatgccagcaccatattaacaatctcctgaagaaatcaaacgtaaaaccgaaattacattagttcaaactaaatttggaaaattatagataaaaagaagatgttgttgataagaccagaacatagagagagagatttcatgactaaacctcgttgtcaactctggttgttcccaatccattgtgatcttctttttttttcttggcgatttttttgttctggcacaaaaacataataaattaaccaaaagggaaaaaatatcaaagattgattttcaacccagaaacagaggaagaacataacttgaagaagaataaacaagaggaagac

SEQ ID NO: 9251 - DNA, 1044 bp, Arabidopsis thaliana landsberg
ttttacatggtcttgatgtagttaccggtgtccattattttttcaactacgagatcaaatctaagcagtgcaatgggaaggccaatatttggaaaagaattttcatggttcagtctcattctcttactctatgtggcggatgtgcattagccttagctgcctgcttgtatagatactttttattcctaactataaacttttttttctgcataccagtttgatgcaatcagctagaggattttcatcgggttcaggtagtcagctttttctccctgacctttaaatttgttttatgagcttttgttcactttactcttgtagtttccaccttgatcttacatacatattcagcgactccattttagctaaggataatctgtttcacattgccattcatctggttttacttgagcaatatcatatttaatgactttgctagaaaaaggtcattccttccttggatacagtatctggatgacggctttactgcaagatcctactaagacaattgcatagtgcttaatcaattgcgtaacttaagaatgctaaatggtatgagctttacattggttcattttacctagaatttctgaaaatgtgtttcagatctgcctcctcatcaagagatcgggatgccttctctctcgccaacaatgactgaggcatggatctttatttacctcttgatcaaaacttatgtccgttttatctttatgttctaataagctttttccaatttttagggtaacatcgccaggtggctgaaaaaagaaggtgataaagttgctcctggggaagtactctgtgaagttgaaactgtaatgtcaatgtagattgagtctcatttccgtatttttattttcatgttttggaaataactctgactaggttatgttcagtaggacaaagcaactgtcgaaatggaatgcatggaagagggctatctcgccaagattgtcaaggcggaaggttcaaaagaaattcaagtaagcaaggtatgaaaattgtctgctttctgtagagttatgtatatgcatggtttct

SEQ ID NO: 9252 - DNA, 495 bp, Arabidopsis thaliana landsberg
aatgccatctaaaattttccaaatttaggtttcactaatggaatttcttttttacgtttgattttttcaggagattgttaatatggtgctggctgcacaagtttatcaaccatcacatgtatttcaaccatctcaacatggtaagtattgattcaacaaatctaccgcgggttaaaatctagtcttcaatattttagaaaatttctcaaaaacaaaaaaaacagatatggaaatattcataaaagtgccctgatttaatgatatgtaggggttgacaacgagcttcttaaacagaatgagcaatggttcaatcagattggtgcaaatctcacatccttaaacgtaagtctacattgaccaaattttgatctcttgagacaccaaaatcgctaaagaaaacttgttttacttaatttcctttgtgtttctttcttatacagctcacagacaacttacacctttttggaaaaatctggggaaacattaaaagccttg

SEQ ID NO: 9253 - DNA, 513 bp, Arabidopsis thaliana landsberg
  unsure (1)..(513): unsure at all n locations
gaaataatttcagaacatcaccacattgcaaaagtgaagtaagagtgactcccttatccatatggtctctttcgtgttcgacaagccaacttgagaacttggcagctcttttcccagtattaaccgggaatggtgactttgaaatactatgcaagaaattctgagataacacaaatggttgtccatcacttccaccaaccaggaactttttgtctcggaggtagctataggcggtgaagaggtcaccctcggaatatcgtcgtaaggtatcttccagtaaatttggcatactaggtgcagtaggcatgcttagaannnnnnnnnnnnnnnnnnnnnnnnnnnnnnnnnnnnnnnnnnnnnnnnnnnnnnnnnnnnnnnnnnnnnnnnnnnnnnnnnnnnnnnnnnnnnnnnnnnnnnnnnnnnnnnnnnnnnnnnnnnnnnnnnnnnnnnnnnnnnnnnnnnnnnnnnnnnnnnnnnnnnnnnnnnnnnnnnnnnnnnnnnnnnnnnnnnnnn

SEQ ID NO: 9254 - DNA, 1353 bp, Arabidopsis thaliana landsberg
cgtgacatgggtgcccaggaatttctctccaatattctttaaattctttaagttcaacgtcgtggagtcatccataaagacttcatcttttttcaatgtatctgcctgagataagctttgcacatatcaacaatctcatctagttaatgattgataacacattaaaatgttttaagtatagcttcttacgtcgattcttaggtagttatcctcggactctagggcttgaaacagaaccgaggtgtgatactgaaccatgtcccggctcgattcaaagataatgtctaatatcggagttgttttatgcttccagttgtacgcccaattttcgaatccccattttgcagcctctactgcgctgtagtactcctcccttttcgccgatcctgtccctatcgatatcacgatatacttttcgtattctaacggcttgaacccatccatatcaggatgtttgattatagactttctagacatagctgtcatgcctaccagagtctatgaacaaccaaacacaaaacatacaagacaattagttgatgatcatacaagaagagtaatgagaaaatggtacgaagattgtgtattaccgggtcattagcggtaacaccaccgtctatgaggttaaacgttctcatcttatcgttttcgggaaatttataaggaggtaagtaaaatggagcagcggatgtgccaatgcatatgtctgataacttggcgttcaaactagggtcaactgatgccttcaagaacacgtaacaaaagaatacagagcgtgttagtatgttagagtggttaaaatgctacgttaattatggtttaagaacagcggggtggagaagaacatggtatgaggagaagatggtgggttgaagtttcttgatgtcgaaggtaggtatgacaacgtttgtgagtgtctggtcaagttttgtctctccaagaatctctcccaatcgtgtatgcagatactctccgttgtactttggacgaaacagtgcccataaagcagacggatcccaccatttcgatctacattttttcaggaaacaaagaattataatatttaataagtaattcacttatcatctccacatctaatgacaacttgatttttaaggactaaaccttaagttattacgttccttttacatatcatttaatccttttcgttaaacgaaacatacaaattcattattgtgagtttctatattttagaccctaaaatatatatcaatcatgtatactttagaattttcataaaaaataactatgacttcttctttctttacccatagaatattttaggagattcttctaagtaaaacgggacaatgtctttggcagcataaagtg

SEQ ID NO: 9255 - DNA, 865 bp, Arabidopsis thaliana landsberg
ttcctaagtaaacaaagcataccttacccaaaaaagtttaatgcacagagtataaggacactttatacttaatggatcaaaggacttagaagatctatggaggctaatcaggcaccggataaaatctgactccatgatattttctacactgtctcatgtttctgtcagggttgagatttatctgcttccttttttgcgtttagaactctcaccaatctcatacctcgctttatcattgagaacgctaggagtggaagagccacagtttatagttacaattcggaccaccaatgtgaccggcccataagaatagtcttggataataaaacattaacttctcaataaattgtatgatcttttaatcttcacatattggctttcgttgtcggctgattgataccaatcatctatgaggaaaaaaaaatgtatcaatcatccatttatttttcgttaagaacaaaagtacaaatcatttcgtgatttcgatcatttaaaatgaaccggttcgtgtatagagcaagaaatgggtttgacaaagtagggtcttttacgggatgcttcttaagcacgttatcctctcttctcgtcccatggcctcgggactcaacacaccttcgtctccaaagttgtatagctgttttagagctaaacgatattgaaaaagatgcaaagtctgtcttttcaaggttgtcttaaaccaataatggtaattggtaaacgctaagagggtattttatttctctttaatttagttccgacttgacattgttaaaacgagagtaaaccatgtatacttttctaaaagagttttttgtacaatttaatacgtcaactttttcttgcttggagagaatatttctcctgg

SEQ ID NO: 9256 - DNA, 1211 bp, Arabidopsis thaliana landsberg
ttttgaagtaaatcttattattgttttggaggttggttagaaaatcttacattgggcaggtgttctcatctatacatgttgattttatataataaaacaaaacaataatatatagtatataagattatcacttgtatatactatgtacaatatatagtttaaaagcatgaataattaatgataaccctaaaagaaaagtttaattaaaaccattcatgaaatgacagattaaatgaagcccattatttttataatgatatatagtcatagccagggactcacacacaactacaagaaacaactagctcgaatattcaacacattttgtacgaagtaaacgtacgcaaatgtattaaccggttattcaacacaaagcaacgtagagactacaaacaaaacaccaatattaatgtgtttaggctagctctctagagctcggaggcagctgcttggtcaaggtaccaaacattttcgacttgagcactaagatgagcagaaggtaacgagaggttgttgtgcttcatgatctcagccacggatttggccggtgctttgtcacaaatggccataagattgtacaaagtagagttgatgaccggtaaagtgaatgtgattctctttggtggtggttttggagagtcggtaatgtaagtgacccatttctgcttctcatttatctgtggatggtttgggaagagagacgccatgtggccatcaggacccatccctagaagttgtagatcaaactcaggataccctgtctttttcgatattgggataatcttttctttcaccagattctttagacactcctcgtagagcgtcgcgcagtgctcggcgttaccatcagccgccaagtgcttgtcgattgcgtagatgttcttatccggaatcggaacctacgattttattaccaaagaaaaaatattcaaattaacattttgataaattttcttcaaacatatgatgtcttaaggttaagttatgaaaccttagagagaaaaccctccatggcgagtttgtagttactgtctggatcttcccatgcacaaaccctctcatcgacccaaaagacgtgccattttgaccattcgattgaatcaatataaggaggttgcaccaacttgctgcaacgtgtacctattagagagttaataattagactttttctaatatatacaaaattaaatgagagaagagtgaaattttgg

SEQ ID NO: 9257 - DNA, 1350 bp, Arabidopsis thaliana landsberg
ctttctctatcctctagagacccatcagcatctgctttcttcttcttctccgaggaaacttcctcaagctttgagctcaaaatcagctcaagatccttgactcgttcctcgagttgctggacccgagacccatcagcatcatatgatttcttcctctctaaggaaatttcatcaagctttgacttcaaactgtccatcttggagtcaaattccatcccctcaagattcttgaggcgttcctcgatgtcttgctcccattcatcataatcatcatcatcatcatctgctatcttattatccaagggaacttcactaacctcatcatttcgtttctttatctccaaggaaacttcttcaatctttgacttcacccagtccatctttacttccgctagctcactaaccttgcggtaagcgtttcttaggatattcatgtattctttcttgaacacttggttctttggtttgaactcttctgcaatttctgggtgctctgcgaatatctttctcactaaagtaacctgccaaggaaaacatgtttttgttactcagaaaaagacgcaaagacgcaacccctagaaaacaaggcatttattcaaaaacagaaaaagagacggatcctttgaaacttgcctgagaagcataatcctgggaaccgataatatggacagtctgctcctcctccttctttgatacacctccgccttctccatccacagcttcaaaatttatgatgtagacttcaacgatgagtttgtccttctccaaaaacccttgttcctcaaacttgctaagaggcaaagtgtttcggataccccaggctagagcctgaacgcaaaacagacaggattcttggctaactgcaaatcataaacagaaaagacataaaacgcttgctcatgtataatttcacctcttcaagattcaaacataagtttaggctatttcctgttgcaaaaacatcctatatatagttcagcaaggcatgaccagttgataagagtcggaatcaaaccaagtctaatattcttattagtataccatcaatctagagaaataaaccatcttcacaatgctttatactagatcctttgaaaattccaaacacaaatgacaaatcaccaaaaagaaagaaaaaaaacatgcaaggatatataaacttcagtactagttgatctgtagagctctttgtcagattgattcagcacagagaagtaaaatttagcactccgtttccatccacttcccaaggatttactatttgcaacggacagatacagagacatgtgatcatcattaagactctgtccctttggatagaggtaaaggaacctgaaagaatataaacag

SEQ ID NO: 9258 - DNA, 754 bp, Arabidopsis thaliana landsberg
caggagagaaaactgggaaggagagggttttttttaaggaattacaggatctctacaatggggtccaacaaaataaggaagtggtcaagaattgtgagctgatgaatacggacatgaagcaggacagtttgaagtcaaatcatcatgaggtttccttgaaggacaagaaacgagatgatgctgatgagtctcggttccaaaaactagaggaacgccttaagaatctcgagttgatggagttggactgtttgaaatcaaagcttgaggaagtttcgataaagaataagaaagcagatgctgataggtctcgggtccaacgactagaggaacgcctcaagaatcttgagctaatggatttggactgtttgaaatcaaagcttgagttagtttcgataaagaataagaaagcagatgctgataggtctcggatccaacgactagaggaacgtgttaagaaacttgagctgatggaattggacgatttgaagtcaaagcttgaggaggtttccttggagaggaagaaatcagacgatgcttataggtctcgggtctaccaactcgaggaatgcttcaagaaccttgagctgatggtgttggatttcaaagttgaactggacaagaaaaaggacaaatcttgtgatgatggatttttgttggtcgacgagtttgcttaatgtagagagatcaaatggttagtagattatagattttatttaatagacactattatcgtttcatttatttcgtttttatg

SEQ ID NO: 9259 - DNA, 1568 bp, Arabidopsis thaliana landsberg
aaaaaatgatagagggaaggccggatggaacaggagttctgttatcgagtgagctatcgaagctcgatatcccagtgaaagtactgcttgattcagctgtggcgtatagtatggacgaggtagacatggtgttgtcggggcggatggagttgtagaaagtggcggtattatcaacatgatgggaacataccaaatcgcacttgtggcacacagcatgaacaaaccggtctatgttgctgctgagagttacaaggtaattgaaacggttttataagatcccatagtaagagagtggttaatgatacaaagttgtgtatttgcagttcgctaggctttacccattagaccaaaaggacatggcaccggcgttgagaccaatcgaatttggtgtaaagattccgacaaaggtggaagtagagaggtcagctcgagactatactccgcctcagtacctaacactcctcttcactgaccttggtgttctctctccctctgtagttagcgatgagcttattcaactctatctctaatttcaactcctaattaataactaactatttatactactattgcttcagaagtgaaaacttccaattttgagccttttaagatcttcaaagttcatgtttttatcttaaatattgaggtagtttttctgcttcgtcttccgatttagatcagtttccgccagttggcccagttctccggtaaccagtttccgatcctggtatcaacaccgttaactttaaacaatcttatctattgaagtagccatttattactctttttactagagactataaacatgtacaacatacctaatcctcagtcctcgtggttccaattttggtgacatgatttgatttcgaattgtgtgtggaatatagttctaataagaacctctaaaggatcaacatcaccatgaccagattccgatcctcaagccctcattattacgaccattgacaattcgtagacaagctaacctcctcaagtgtagccaatggttggggaaaatattacatcatttttatataaaaagaaactgttggagaaaatatcctaacagtttcaagaaaataaacaagaaagacaaaaacacaagctcataaaataaaaccagtattattaataagctaactccacagttaagaaaagggaaatatgaatttcaatttcggaatacaatttttttttttcaatcttaaacttgaaagcattagttaatttaggtaaacgaattaaaaaaatagtttagatcaacctataatctatatgtaataacaccaaactgtaataataaattaaagaaaaaacacctcactgtctaccgttttgaggcataaacgcaaactccaaatcaccattgttacctccataacctcgatcgttcctagccatcagattttcattcgttaatttccagtcagccatagccatctcatttggaaatgccggaagattctcaaccgtccgatcaccactcatctggtagatcctcgtcaacaaattctcccttaacacactcaagggattcttgtactcttccatatgctcctccggcacac

SEQ ID NO: 9260 - DNA, 3321 bp, Arabidopsis thaliana landsberg
tattacaattatggaactacgaccacgacaatccttgttcatggcgaggtgtgttgtgtaataacgattcaagagttgttactttatctctcccaaactctaacctcgttggttcgattccttccgatctgggtttcctccaaaacctccaaagtcttaatctttccaataattcactcaatgggtcattaccggttgagtttttcgccgccgataagctccggtttcttgatttatcaaataacttgatctccggcgagatccctgtatcaatcggaggtttacacaacctccagacgttaaatctctccgataacatcttcaccgggaaactaccagctaacttagcgtctcttggaagcttaacggaggtttctctgaagaacaactacttctccggcgagtttcccggcggcggatggagatcggttcagtatctagacatttcctcaaatctaatcaacggttcactcccacctgatttctccggcgacaatctccgatacctgaatgtctcgtataaccaaatctccggagagattcctccgaatgttggtgccggttttcctcaaaacgccaccgttgatttctccttcaacaatttaaccggttcaatcccagattctccggtttaccttaaccagaaatcaatttcgttttccggaaacccgggtttatgcggaggtccgacccgaaacccgtgtcccattccttcatctccggccaccgtctcgccaccaacctctacacctgcactcgcagctatacctaaatcaatcgggtccaatcgagaaaccgaaccgaacaacaactcaaatcctcgaaccgggttaagaccaggagttataatcggaatcatagtcggagatatcgccggaatcggaatcctcgctcttatcttcttctacgtttataaatacaaaaacaacaagacagtggagaagaagaacaatcatagcctagaagctcatgaagctaaagacacaacttcgttatcaccatcatcatcaacaactacatcttcttcatctccagaacaatcaagcagatttgcaaaatggtcatgtctccgtaagaatcaagaaaccgatgaaaccgaagaagaagacgaagaaaatcaacggtcaggagagattggagagaataagaaagggactttagtaaccattgatggaggagagaaagagcttgaagttgaaactttgcttaaggcttctgcttacattttaggagccactggttcgagtataatgtacaagactgttcttgaggacggtacggttctcgcggttcgtcggttaggtgagaatggtttgagtcaacaacgccggtttaaagactttgaggcacatattcgagctattggtaaattggttcacccgaatttggtacgtcttcgtggattctattggggcaccgacgagaaattggtcatttacgattttgttcctaacggcagtctcgtcaacgcccgttacagtgagtcaaaatcatctctttcacatttcaatctttttcctcgctttatgataaaggcacatgttagcataagatcaagtcgcacgctagcatcaccagggttttgctactgtgttcatattagttggtagtagttaaattacacctgtattaataaagtcaacggctggtcaaattttgattctttgtgctattggacagggaaaggagggtcttcgccgtgccatttaccgtgggagactcggctcaagatagtaaaaggtttggctcgtgggcttgcttacctccacgacaagaaacatgtgcacggtaacttgaagcctagtaacatactcttgggccaagatatggagcccaagatcggcgatttcgggctcgaaaggcttctcgccggggatactagctataaccgagctagtggatcatctcggattttcagtagcaagcgattgacagcatcctcgcgtgaatttggtaccatcgggcccacaccgagcccaagtccaagctccgttgggcccatatctccctattgcgcacccgagtcgctccgcaatctcaaaccaaacccgaaatgggatgtgtttgggtttggagtgatcctcctcgagctgctcacgggaaaaatagtgtcgatagacgaggtgggggtaggaaatgggctgaccgtagaggacgggaaccgggcgctaataatggctgatgtagcgatccgctccgaattggaaggcaaagaggactttttacttggccttttcaaattgggatatagttgtgcatctcaaattccacaaaagagaccgaccatgaaagaggcgttagtagtgtttgaaagatatcctattagctcatcggctaagagtccatcgtaccattacggacactattaacgtttgatcttacactaactctagtctctaagcgtttctctatggccaaagtatatacacatgatgcaaattgttctttcttgttgtttgtccacttgagtttttatatatgattctttaggatactaccactaggttagcttggtttgtaatcgttttttgtttaatttagtgtaagttcggtttgtgttggagacttggagttggctcccatatacttaaatcttcaaacataagttaatgtgttatactatattttcaaccagtagaccaatcatataaatcgtttaataatttctgaaccactaaacccgcaagtaaaccgatagattgatcgtataatttcaaccggttcggatagtaaatagtagatcttccgtaaaccggatatgatctgatctgatctcccaaaaaatcccaaatccaaatctacgaatctccgtctcctccgtcgcatttttcgaggtagagagagagatcaaaccaaagagtcacagagagagtatccaccgatggaatccgcagcaacggctgttgtacctccggcagccgccgccaccaccgccaccgccaccgatgataatctccaatcaagcgactcatcatctcccgccgacgccgttaaccgattgatccacgccttttcgcagcgacaacaacatcttctcgacaaaacggttcctcacgttctctatcgatggatcgcttgtctctgtgtcgtattgatctacttcgttcgtgtttactttgtggaaggcttctacatcatcacttacgccatcggaatctaccttttgaatctcatcattgcttttctatctcctcaagaagatcccgaagcttctctcacggccggtggttctcttcctactaagagatccgatcagtatcgtcctttcgttcgccgtcaaactgaaatcaaattctggttcgtctctttgattttgtatat

SEQ ID NO: 9261 - DNA, 833 bp, Arabidopsis thaliana landsberg
aagctcgggaagatgggcattggtgagtttggttctcttgctgatctcttgtttcttcttcttcttatcctttggtttattcgatatgccatgcgtctgtgcagcagctctcctctctgcagtgtttgtcgccggcttcaaaccgattttcagcagctccttctccacgtccagcatgtcgttcgggatgtttatgtcacggaatagagctttaaattcgtcatcaaccttaatctcacacttgaaatcatttgggtatgcaatgtcctcttgtgaatttgatagcaagtagatgtcccctgaagcactcagagcctgcaaaatacaagacagtcttgaaactttcaataccttcctggtttggtttcaaagagtaacatatattttccccatctgcttagcaaaatacagcagttcctacaacttttgacgccgcagaaaacacaatataagacaggatcccggtatggttttcagtcatactccacgtagaaataagctgtctaattgattgtccaaccaaaaaccaatgcttagagaactttcatttctcatgccaccattcatatcagaattgctaccaagaatctacaggatacatttctgtcatctttgtgtcttgccaattataacaatgcataccttcaaatcctccattacattagggtaagcgtctttgagatcaaccaccgcaatcccatcaaggtattttctcaccaatgaaagaagctggttcttatcattaacatcgtgcgtagctgtgacggcaaacaaaattgtaacacatgaactttttcaaagagaaatgaggacaaatcaccttgaatgaacgt

SEQ ID NO: 9262 - DNA, 765 bp, Arabidopsis thaliana landsberg
acgctgtcctcctctgttgtcttgcagcgtcgtttgatatctgtacagttacttggagtaggaaaaataatagggggagtggggaagaaattccaagaggtttagttcccggaactgctaactctggaagagctcgagcatatgggaattggtgagtttggttctgttggtgatctcttttttcttcttcttcttatcctttggtttattcgatacgccatggagctgttcagcagctctcctctctgcaatgtttgtggctggcttcaaaccaatcttcagcaactccttctccacctcaagcatgtcgctcgggatgatgtcacggaatagagctttaagctcgtcatcaatcttcggatactccatattatttcgatacacagtgccctcttttgaatcagtgtttgatagcaaccagaagatttctcctgaagattttagagactgcacaacacaagacaatcttgaaacacaaaacacataacgacattgtatatatctccagaaaaaatacaatgaataccttcaaatcttccattacattcgggtaagcatctttgagatcagacacatcaatcaccttatctgatttattcacaaacgaaagaagttgcttcttgtccttgatattgtgcgtagcctgtgacgtaaaggcagagaaaatgagaaacaaattcaccatgaaatgaaatgtttaggaattaccttataagagaacccttcttcgtcataatgcaacttaggattcttcctcaaactatc

SEQ ID NO: 9263 - DNA, 1665 bp, Arabidopsis thaliana landsberg
atctcaatcatccatcgagtctatagagaaaaagtgaacagatttggtatacatcttttcagtaatcgatacgttaacaatatatgaatccataatttgggtatgatcgatctcaagtctgctttaaggattgttttcccttgtggggtcttgattcgctttttccatttaatactcttgattcgattgattctctctctgccaattagggttatgatgttagattcagtcaatatcaatgagtgatgaaacgttctgattttgacagatgagtgaagaaactaaagataaccagaggctgcagcgaccagctcctcgtcttaacgagaggattctctcatccttgtcaagaagatccgtagctgctcatccatggcatgatcttgagattggtatataaatcattctaaacatgctactttttgatttcatacttttgtattctgttactaaatcataagtctggataatctatctaggacctggagctccacagattttcaatgtggtaagttttttcctactctttgttctaaacagagtatgttgttattagattctctaatcattttatctttggatgattattaggttgttgagatcactaaaggaagcaaggtcaaatacgagcttgacaaaaagacaggactcatcaaggttagatgagaacaaagtttattttttatatgaatggttttcttatagcaaaatcaatctcaacaagtttggattctctcattcaggttgatcgtattctctactcatcagttgtgtaccctcacaactatggttttgttcctcgcacattgtgtgaagacaatgaccccattgatgtcttagtcatcatgcaggtattactctttctttctttctcatattatccctatactatttgcaccaattttttgtatttcaaatatatattattatctttgtgtaggaacctgtgcttccgggttgttttctgcgtgccagagccattggattaatgcctatgattgaccaggtaaaacctaaacttgatcaatgaaaagactctgttttttttttctcttactctaatcctttaggtcagtttaaatggtcttgtactccaatcttgtatttttggcgctgtaattttagggtgaaaaagatgacaagatcattgcagtgtgtgttgatgatcctgaatataagcactacactgacatcaaagaacttcctcctcaccgtctctctgaaatccgtcgtttcttcgaagactgtatcctttttcttcagtgttcctccttattcatctctattgatctctcaacaagtattagtttttccctttaactctaatatcttacagacaagaaaaacgagaacaaggaagttgcagtgaatgattttctgccatctgagtctgcggttgaagctatccagtactcaatgtaagcctctgtttctttatcaagaaccaaactctcttacatcttttttagtttgtaacattaaagcaactctggattctgaattccccattacagggacctctatgctgaatacattctccacaccctgaggcgttgaagcttctcctcagaagatttctgcagcatctatgtttctgttacttttcattgataataagaagcatatgatcctaattgatattacttttatctctgcatttttctt

SEQ ID NO: 9264 - DNA, 1119 bp, Arabidopsis thaliana landsberg
tctaagggaacttcacagaactctgaatccacgatctgctcgcactcttttacaagactctcgttcattccctcttcaagcaaccgtttctttagtctctcggtagatatggataaatcctttggtgatacgaaggagaaatccccattaattgactggagaggaactatgcccctggtagatgctaaagcttgtaaccatgctgctctatcacttctagaatcagtcctcagatgcagagtcttggttgcagtaaagatataaaactttctatgatcagacttgctttctcggtaagatgaaacctgctggaaaacaaaagaatgaaatgatattcatctaattacagtgcttaagccctcaaacgagtaaacatttttccaactaataaaagtctataagttgagatcagattaaggctctcatgttcaaaaacaaactgtgaacaattaataattacaagttccatgttttaacgaaaaaattaaaaagcaaacacagaagaatgcaattactcagagaaagaaataaacacagactcaaagcttatgtctggataagctttggagtatttagaataagcaaatataactcttacaagttaacaaaaaaatatatggctagaatttctccaagaggaggccttcagctccaacacagctacactccattatttatccacacttgattatttcctaccgactagctacacctaccattcaccaatcatgtagaaactccactaaaaaggatataactaaatctactggtcaatgatccatggaattagccaaggataagatggcaaagaaaaaaaatcaaacacaaatcaaaagaactcaggcccatgcctgggaaacaaaatcaagaaacaaacaaaaaaatcaaaagataaagagtttttacatgtgaccaaaggtgacaaatttctaacacttcttggctttactacaaaataaaccaaattctaacaagatgtaaaatgtgttcaacaaattgagaccctgatctggtcctgcaataccagattgtagtagcaccagccaaaaaaaaggtttttgtattttggctatttggtttttcgacaatgaactttgagactcatagtactgccaatac

SEQ ID NO: 9265 - DNA, 1158 bp, Arabidopsis thaliana landsberg
catcctattgaaacaagaatctcacacgtcaaactcgtttacacaatgatacgttcaattattactactatatatcttacaaataatcgagtagatccgatagcatatatatagatgcgcatttgaaatttagatgataacccttaagtttctagataagcagtttgatgaaaatacaaaatgttgaggattcaatcacaacggcaatctataattagaatatgtacgcgtaaagtaactgcaaacaaatattcgctgcacactagtgaaaggctgtaagtataacctgaagatgtttttcaagattagcaagaatgactcccccaatgattcctcggactccgccgccatggaggctgaggatggttacaaggtttccgtatttcggcggtttattgttcttgaacatcgaatcatcctttataaccaattcttctttttctgagaactgattataactttcgttagaactcaatctagccctaggaattccaaaattttggattttcttcccactgaaattgttaatagtggctaattttgaaacacagtgaaaagcatttgatcgatgatatcgaccaacaaagcgagtcatcaaccactggaccatacttagttaatgactcgtttttcttttgagttgtaaaagtttaaatctaaaaactggtttagacaccaaaaaaaagaagatcaatgcaataattctatacattttcgtcttatatacacatgtgtgtgtatattataaaaatgtacaactaaatgagtgggagattcgaaacgacaaattttggaatcgataagactctttcttaatacattcgtgctaaccgtgattttagtttggaccttttctttgttattaattattataataaccttggaacaactagttcttgagacgaagtcgagataaatctatattttaaaataaaagattactttaatgtttatctaaatcttttgaataatctattgaaaatgacatatcattatagtatgactaatttcaaatggtggatgcaaaattgcaaatacatgtagaaaaatttgcagacgagttatatgacttataaagctagtgtatcatattttttagtttataaatacagcatatgatacttttatgaaagatatgttttttcttaaaacaatcag

SEQ ID NO: 9266 - DNA, 1281 bp, Arabidopsis thaliana landsberg
cgacatatatattactaccaacgaacgaaagaatttggacaactttttcttgtcttcatattctcttttctcttaccacattagttgtgtccaggtcacgccgaaaacgcatatgcttagccagcaaggtaatagctttaacaggcttcaaaaagcccatctaaagcctaatcaaaagcccgtattctaacatttgaccttgaacagtgtcaactagttggggaagctgacgcactaaattattatcgtccattcactcgctcttatcaaaaaaaccgaaacctagccacgcgcctcatacactcaacgtgggtttcacgctggtaatccttatttcaagtaacgacgtcgtttatcagagtgtgttaatcacgcgcgagtgaagagaatttccttttacagctcattatgactcggctttgaagctttttattcttcttctcaatttctttttttcttccagaaatttcctccgatttcaaaattttccggtgaaatcgaaaaaaaaagcgagatcttcttctctaatggcgacgaccttaagcagagatcaatatgtctacatggcgaagctcgccgagcaagccgagcgttacgaagagatggttcaattcatggaacagctcgtaagtggagctacaccggccggtgagctgaccgtagaagagaggaatcttgtctcggtcgcgtataagaacgtgattggatctcttcgtgcggcatggagaatcgtgtcttccgattgagcaaaaggaagagagcaggaagatcgaagaacacgtgtcgcttgttaaggattacagatctaaagttgagactgagctttcttcgatctgttctgggattctcaggttacttgattcgcatctgattccttcagctactgccagtgagtctaaggttttttacctgaagatgaaaggagattatcatcgttatttggctgagtttaaatctggtgatgagaggaaaactgctgctgaagatactatgatcgcttacaaagctgctcaggtatatctttgattccctaaatccttgaatcgatcctgttgtggagctaaaaccctatttctgagattacttcaattagctaatctgtaatcagttgtctcataataagtaaattggtctcgaatctagctattgtattgatcctatcgttagaagtagtcaacttttactatttgggcttaaagatcaattgcttccctaatctgtcttagtaatatataattgttctgaaaatatgtatttttgctcattcgtgggtttttgaat

SEQ ID NO: 9267 - DNA, 1418 bp, Arabidopsis thaliana landsberg
  unsure (1)..(1418): unsure at all n locations
gcacccgagatccacactagctagcaacattttagagagcggcggttcaagaggaaactcagccatttttctacctagctttgtcaacaatccttcctcatccaaagctcccaggctgtacaactgttccattgcagaaatcaatgcttgaggttggggtggatccatgaagtcaaacgataacaggtcattgatgcccattgctttcatggtcaaggttgtcattccaaggttgattctttggatttcagggattgatgtaggaggcatttcattacgatatgcgctctctgtgtagagacgataacatttccctggcccagtacgaccagcacgtccagccctttgcttcgctgatgcctgtgaaattggagtaatgactagcgattccagcccttgctttggattgtacacgttctgcttagcaaacccaggatcaacaacatagtatatcccatctattgttaaagaagcttctgcaatatttgtagctacaaccactttccgtttaccaggagggggaggatcaaaaattctagactgcatttcactaggaagcgcactgtaaactggaagtatgatgagttcgggaacatttttacctagacctttcatcctctcgtacagagactggcaggcagaatcgatttcttcctgtcccgtcaaaaagaccagaatatcaccctcaggttcagtcaagtgaatctgaaggactgtgatcagagcggcatccaagtaatctgtttctggctgtttggtatatagtatctcaacaggaaatgttcttgcaggagtggtaaaaatgttgcagttaaagaagtacccagagaacttctctgcatccaatgtggcagacgtgactatcagacgaaggtcgagtctacgtttcatcagcttctttagaagaccaaacagcacatcagtgtggattgtccgctcgtgagcttcatcaagcatgattacagagtactgagagaggttttcatctatcagaatttccctgagaagcataccatcagtcatgtacttgatcactgtatccggtccagtacaatcttcaaaccgaatcgcataccctacctcctctcctaaacgacaaccaaactcctcagctactctcttggcaacagacattgcagcaaccctacgaggctgggtacacccaatctttccttttgttgtataacctgcttctgcaaggtactgagtcacctgtgttgtctttccagatccagtctcaccaataaccaccaaaacttgattatcgtgcacagcctgtatcagctcctttttcaacttgtatatcgcaaggctctccctttgctcttgaatagaaagctttaaactcntatccaaaagtgggagttttaccaaaggcatccttcttccactcaggcatgtcataagctataacccaa

SEQ ID NO: 9268 - DNA, 1218 bp, Arabidopsis thaliana landsberg
ccagctggactagatctgcatctatatcaaattttgggaccttgcagctagttaaacctcatgtggaaacaaatctaccgtttctaggaaaatgtgtgcactcttttaaaatcatcagattctactgaatctgttctctttaataataaacatgatatgcttatataaacattccactgaatctaatattttttatttgcttctttgattttgcattgagacaggtttggaacgttccgaggagtctgttgaagatcctcgattctaaaaagcttccagaggacaataatttgtgacggagtaactctcgaggacatggaatgcaacaaggatgaagcgaaaagggcaatggatattgctgagaggaagatgacagagaaggattacactggggcgaaaaagtttgctaacaaggctcaaaacttgtttcccgagttggatggtctgaaacaattgtttgtggcaatcaatgtttatatctcgggagagaaaacattcgccggagaagctgattggtatggtgtccttggtgtagacccctttgctagtgatgaagcactgaaaaaacaataccggaaattggttcttatgctccatccggataaaaacaagtgtaaaggcgctgaaggtgcgtttaatctggttgcagaagcttgggctctactatctgataaggataagagaatcttatataacgtaaagaggggcaaagatgtcaaagcagctcaacaaagattcccaacaacacagagagagattccatcacaccagccaacttccaacgggattccaaatgtaagagagcatgtagtttcgagtgctagggctagatataagcctgctacccgtaagcctgctgcccgtatggatagatctcgcacgggttcgcctgcttttgtttatccgacacaggagagtagtaccttttggaccatgtgcaacaaatgcgacacacaatatgagtaccagagggtttatctcaaccaaacattgctttgtccacactgccatcatggtttcgttgcagaagagaaaactccgcctacaaatattccgaagcccccagtcaacatctcatctaaccaacatcaccggagttccaaaaaccaagcgtcgaaacaagaactcaaatggttcttcttataggagagagcctgcaacatctgttacccataattttcagtgggattcatcaacaatgggtggttcttacagccg

SEQ ID NO: 9269 - DNA, 1584 bp, Arabidopsis thaliana landsberg
  unsure (1)..(1584): unsure at all n locations
tctgtttaggtggtagggactactcctgtaaatcctatagaagcagactagtctttttcctcctctctcggcctcaaaagcttcccatgtttttgaagaagagaagcctttacaatcaacatcatccactacccaactgtaattatagcaattatccatagatatgagtcctatgacatattcaaccataagttaagcattaaacaatcatatgaattttcaaactcgtatacaaacattttctactaaaaacatttcgccttatatattttaaaattcatttatgtggcgaagttgagttaggctggtctaacaattagcgcaaacgtgtgtagttgtagcaaacgaaaacataatcgcccaaaattaaaaaatgaatatctctaatcaattgatattcgttttggtatttgtttatatacctgatcttcactataattatcatcatcttgttcaaacatcaccaacgtatcctcctcctctcattgcctctaccattttcttactcaatcggtcttcatccataatagcatcttgtggctcacgcttccccaacaatctcaaaacatcaactgtactctcaatgtctctctggccctccacatattgaacacatgcgtacgcagacaatgcaagatttttcttggggtcccatccgttacgcctcacctccattgccgtcttcttcttctcctcctcttccttatgttcttcgaacatataattcaccatcaactcggtgccttgtattacaagttttctgcagtaaacaaaacccagaatatcgtttagcttgactttggaaagatgatgctctccggtatcccactcttcaagaagttcgtgagccccttcgatatcatctttcaaccacaacgccagaatcatgcaactatattcattgatgtccttagacactttcatgtccttagctaagttccacaaacggcgtaaggtcttccttttctccgaaacgcttatacatttccctgagaatccgaaagactctaaatggtccgaggatattgtaatactcattagtaaccagtaacggctctgacttacgcagcatatctaaagcaaatccctttggtcttttctcctctaacttgttcaaatacttttcaattccatttaggtcaaatacatatatgtaagaagctaacatcttgtgaatcggtactccttcggattccatcttttcaccgtccttctcgcgctgataaatgcttcttagttctgtccggggccgcataaatttccgtagtttttctatccttcttttgcgctcctgctcccggagcaaatcttcctcactcttgctctccaaacggcaaagaaacagttttggggaagcgcaatatggaaaacctacaaggaaaaatcctcaacaagctaccgacttgtgatcgtcgaagaagatgattcatgctcaactcaaaagacaatcacataaacaaaccttatatgatttcctaattaacacatcagttttttctcaaacaancctgcaaatacatgcataatccatcaaaactcaatgatattacagtaggctaatataaaacgagggtgatgttttag

SEQ ID NO: 9270 - DNA, 1679 bp, Arabidopsis thaliana landsberg
tatcacctatgaccatgctcttatataaataactcattgccctattttttgcttaacattctcacaggattctctcgcataatatatttcttttcctaaggttctccttctacatttttcctttccattagaaccgcatgttctctacgtttatctgattttctattacgcgtgcgtatgtgtcatcctgtgtactagacgttgatacttagcttcgcatatgggtcttgtgatcttctttttttttacgtagttctgagaaccaagaacttgttagcgattctttttttgatattgtcattagttaattgcgttttgtttcagattttttacagataaaacacttcacaagaagatggtaggagggtttagagtgattcatcttgtgagaccgttccttgcattcttaccagaagtccaatctccagaaaggaagattccgtttagagagaaagtcatatacactgtgatctctctcttcatcttcttggtttgtagtcaattgccactttatggaatccattccactacaggcgcggatccattctattggatgcgcgtcattcttgcttcaagccgaggtactgttatggagcttggtattacaccaatcgtcacctccggaatggttatgcagcttcttgctggttccaagatcattgaaatcgataacaatgtccgtgaagaccgtgcactcttgtaagggtttaattacacccttatgtttcatatgctcaaagtctttaaagatcgattcatagagactaatagggttaagtttttggttataggaatggtgcacagaagctgttgggaatcctcatcgcggttggccaagcagttgcatatgttctctctgggatgtatggtagtgttggggaactaggagttggtaatgctattcttatcatagttcagctctgttttgctgccattatcgttctttgtttagatgagcttcttcagaaaggttatggcctcggttctggtatttcccttttcattgctactaatatctggtgagttttaagtactccaacgtctagctttctcggttaaaccgttatgcgcatttcagatgttaatggagtttcttttcttagtgagagcattatatggaaagcattcagtcctacaaccatcaacagtgggcgtggagctcaatttgaaggagctgttattgctcttttccaccttctcattactcgaacggataaagtccgcgcacttcgtgaagcgtttttcaggcagaaccttcccaatgtgacgaatctgcatgccacagtcttgatctttctgatagtgatttactttcaaggctttctggtagttttaccagtgagatcaaagaatgctcgtggacaacgaggctcttatcctatcaaattgttctacacctccaacatgcctatcatcttgcagtcagctcttgtctccaatatctacttcatctctcaggtatcaatctacacatagtctttaaatctgtacttaatattgaagctctttatacttaaaaacgttgtgaatctgtttctatagatattatacagaaagtttggtgggaactttttggtgaacttaatcggtacgtggaaggagtcagaatacagcgggcaatctatccccgttggtggtattgcgtactacataaccgcttccgcaaggtaaatagttct

SEQ ID NO: 9271 - DNA, 196 bp, Arabidopsis thaliana landsberg
aaaaacttttcctttcatttccaaacaaaaacttctttttattctcacatcttaaagatctctctcatggcgatgtctttctcaggagctgttctcactggtatggcttcttctttccacagcggagccaagcagagcagcttcggcgctgtcagagtcggccagaaaactcagttcgtcgtcgtttctcaacgca

SEQ ID NO: 9272 - DNA, 929 bp, Arabidopsis thaliana landsberg
gcgccgataaatgcttcgtggtgatgcttcttttaccaagttcttatgtccttgtgtacttttaagagattatatgatgcttcgagttcttcatttagaaaacttaaaatcacttcttcatatggttcaagagagttctattggtaagagtgttcaagagagttctatattttctcataaatttgtcatggcacgtattagagcatatatgatggctaaatgagaggtaaaaatgtaacatgactgcgaatcagtgataatatatgtaagctacatttttatgtgaaactgtttgcagttacagtattattcttgcaacaaaagccaaaagttgaccttacacacttcatttaaattgttatttcataaacgaggcaaacgccaaaagttgcagaacctgtgaaattgtgtttgatatttccatgtatgatgtattgtcttaaaacctcatagtttcgaggttatacggcttagagttgcttctatagatccatgaggttcatcggttggcaggtacacatcatctttaaactgcaaatgcaagtcattggaaacgattcataccctgaaattattagcttttatgcggcttttttgttgtctgattttaagtttataactatgtattactgctgctacttatctacttatcattttcgtttacgttttgtggtttcatcataaagacaacatcacatagaggttcttaccttcaccattgaagggttttccttcgttgaaagatttactggtagaaaatgaatatttggcatttttaggtgaatcgatgatacatcagcaaacctgatcatgttaataagaacctttatcatggcaagaatcacatcatcacacaaacagcgaaataaatatagactgatatgtgataccttttcagtacggcgcttcccataggtagagagcttaga

SEQ ID NO: 9273 - DNA, 1769 bp, Arabidopsis thaliana landsberg
gctctaaacgaaatgtatcatttcatatttcaatacaacatgattacaaacctttggttttgtgtctcttcgtcttatgattcattgcaagaaagataacaaaagacaagaatcaattcgcagaactgcaagaagtgtctccacaagataaagaagtatcttcactgagtttcttcctctcttcataagcccattccaagccgtgacagtactgaaccggcgggttgaacctactgtcggttatatcatcaggtaagaaagcaccgttccccacaagaaacttgacagcttctcttttccgttctttagctgcagcatggagaggagtccagccacaagcaccagaggttctagcttccatgttggctccacgttcaagaagcaagtccataacttcgatgtgacctcctttggcagcaaggtgaagaggagtcattccttttgatttaggtccacaagctagagcgttcacgtctgctccttggtcaaggagctctttaacagctttgagatcgccttcacgagctttgatgtgaagctgagtccaccccctgtcatctctgtcaacacccgtttccatggaccggcgcctaaatgagttaggccgaaaggacaacgcaaccggctgctcttggagcatcttgcagataaaccagaactgactagaattcacagatgaaagactcaaaggatatttcctaagggaaacttactagacaaggagattctaggagtgactcagatttacataattttggttacaatcttatacaagaatgtctaaagcaggaacactacttgtgggtagaaatcatcaaccaatatcactcagaataagaacttatgggagaggcagattgagatgattcagttggaatggagcaactcaatcaagggaagtgattagcaatgcagtaagggaaagagggattcaaaccagggccaaagacacggagattttgagggatcacaactggagtcatagacagtgaagagaacacgagcatcaactagaaagaggtaggagcttaatggtttctaggaacaaagagaaatcagaaaaagcctggatcaatgggtaaagagagcatcgggccagagtctctatctgcgtgattttaccagccagatctgccaacaagacaaggatggaaaaaaaaacttagtggattcagataatacaaataagcaaagtgttcattcaaaaaaaaaaaaaaaagcaaagtgctacagaacaagccataaatctctctgcaaagatcgccagaaatattttcagagatcaaaattttaggttaggtaacgaacaataaaaactttagtaacaagtcccaatctttagaatcgaaaactctggcaaatgaacagtatactaagagaattcccaaaataagctgaaattcagaaccacccaaaattcatctaaaaaattctaaagcagcaaagaaactaagataataaaagcttagtgatgaatccaaacaacataaagaccaaatcaatttcacagtaagacgacgacaacgtaatagaattgaatcggggaaagatagaaacctgtaggcgtcgtagcttagcgcggagggagaagaaagagatatggtgaatcaaacacagatttatccttgacggaggatatgaatcaattagtgttttttcgcgggtagagagtgagaatcgtatatcgatttccagatgaagaaaaagaagacaaagaagaagaagaagaagaagaaaggcgcgtgagtgtgtgtcagagacagaatatc

SEQ ID NO: 9274 - DNA, 1581 bp, Arabidopsis thaliana landsberg
cgcgtcaaacaattggatataataattaaaaactgaatgaatggttcgcttaccaaagcaaaatatagttggcccagaattcgatgttggcatgttacgactacattgctacattgttatcatcaatgtttcagattatttttaatttgtactttcatagtaattcaccgcaatgaacgatgaggaaccatcgaatcggactaaacgagggtaacaaattttgagtagtaaagtgtagtaacaacaaatgagtgaacaaaaatcgaatggaaccgtacgaatatagtaataatttttgttgttcgcctgctgaatctcaaatgataacctttaggatctttttagcaaatgataatcagtttgtaatctagatttatttggagttcttcattttaaaatcaagataacgtggatccggtttgatccggtctaattcaaatttcataatataaatacaagaatatttcaacattagcctaaaaatacattaaagaaaagagtgtagtattttcaaaagatttgttgtatatcatacaaaatgaatgtatattgttttgtgtataattatatacaaagttgtcgtgaagtgaacatatattctagtttgcttagttggtccgtttttcatctaaatcgattcttagacgccataatttcttgctaagaggattaagtataaactatgtgtacatggatgagtaaattctttggattatttaacgattactcattatctttgtaaagtgtataaagaaaggtgagtattgcgtggtgaactgtggaaacctagactcaaagatcaatactttattagattttgttgctaaatatggtctaacaaagcaatttacgctaggtattttgtttgagtatagtaatcaaatgaaaactgaattatcgaaatttagacaatagacactaacgaaatgaaaaaaaaaacgaaattaagatgttatacaaactgattaatccatttatctttcactagatgaaatcatagatcatttttcgtgagtctgtaaagatgtatgataaaaaaaagagagtaattaattaaaacatacctagaaagcatataatttgatttaagttgtgacataacgaacctaaaatgacatgtaaacatatccaaaaacgaaaacgaaatatcttgtttataactaacaaaccgaacactgatcaatacgatatactttcaaatcatgatttgattaattttagctatttgttcagttccgttttgggaaccggcattaatcattgcgtgtagcactgttattggtagatatgaatgtgggggattttagttggtaaagaaatttaactagcagaaaaaatgtttgggggcaattaaaacaatatttaaaatacaaggacctttttgtataatattttaggacaaatctcccgccttaaattccctccatattttttcatgtctcttcgcttttcggctacccatcaaagacaaaacgtgacggtcttcatcttcttactcttgcatctggtgtgcttaccagttttggatgttagaactgggaaacaagtctttggctgcatttgggggctatctcttcttgc

SEQ ID NO: 9275 - DNA, 1027 bp, Arabidopsis thaliana landsberg
ggtgccacttcaattggctgacccgctcttttcatcggaacctcagacccaaaattcttaatcttctcctcattgaatgatgctgggataaggggtgtccatattggaccaggagccacaccattgacacggattcctttctcagctagctgaagtgcaagtcctcgagtaaacgccacaatcgctccttttgtagcggtgtagtcgagaagtgaagcgtttcccttgtaggcattcaccgaagtggtgttgataatgctgcttccttccttcatatgcttcaacgcatgcctaacaaaattaaaatggaatatatcaattacaaccacacgtaggtttgacttcgtcacaacaaaatatcacacgtgtgccaccttgtgagaaagaagtaagaaaagatgtttgtacggaagactcgctcaagcctaggctcatcaatctcttcgattgtgctgctctcgtactgctctgctgcgttattgatcaaaacatcgatgcggccaaaagcattaacgacctcatcaacgacccttttgcagttttcgtcaaatcctaaatccgttggaatggcgataggttccttggagtccgaggttttgacctccttcaacatttgtagggtctcttgtgcatctttttcttcttgacccttcacgtaagtgaaagccacagtagctccttcggatgcaaaacagtatcccacggctcgaccaatcccagagtcttcaccagttatcaacgccaccttaccctgatttacatccatgttgttaaagaaatattaaaatctgaaatcctttaaaataattagctaattgagtgaatttgaattgagatcaaattatcttatgaaatatataccaatatgcatatacaaatttacgtactcgaaaaatgaatatggtacgtaaagatttgaaattatgtaatattttgatctcaaactaaaggttataaaaaattacacgaagcttgttggaagggttggtaatctgagctagagaattgtgggcttgattccatgaca

SEQ ID NO: 9276 - DNA, 1449 bp, Arabidopsis thaliana landsberg
ttaagtgcatgtgatacacgtatagatacacacctacatgttatggatatgtatatatttgaatgatataggaaatgagagttataattgatagaagatccatatgagagtttaagcaagcaaaaggctgaaaatgatgcctaaccctaatgatagaaacccttaaaagctttgacttgtgatgttataacctaagaagctaatccaacaccaagaaaatcaatgaaagtaacatcgttcttctcaccatcatctcccatggatggtccatcttcatttgaagtcatcttatgatctggtgtggctgcatgaaatgtgtaattctgaggatccaccaactctttcgactttctcctctcaagataaatttcgtggtgtacgttagagacagatgaagatccaaattgaccattcgtaggtggtgaaacaaaagagtaaggccagagaccgcaactcttatcctttcgatacctccatagcccgaaatgggatctatttagccttgtaagactagaactagggctcaaaacagtatgccaagtttggttgaacgtagaagtagccgtggaagagaagttttcccgtttgcgtctagccatgatgacatgaaaatggtttttgacagcgttgtcggtcctcccggggaacagtcgggctatggaggcccaacgattcccttggatccgatgagctttaagcagtctctcttcttcctcctcggtgaagggtttcttggtgatgtttggatcaagttggttgtaccatcttaatctacagcttttccctatgattccatattgacgctcaattatttataaaacacatagatttaagtaatatgattagatacatatatataaagaaatatcaatatatatatatattgattacctgatcttccatagagatgttgagcaataaaattccagttcttgggaccgtattgttcaacgagttgccggagattgtcatcttcaacaggtctccagtgacctctttggcaactaggcttcttattgtcaaaactgttgcttcctctagacatctccatggatgctatctctatctccaccgtacctatatcaaaccaattagcaattgttgaagaaagaggtataagatagattagtctaaggtgaaatgataacaaggatgaaaattaatacaaagaggaagaaaaacaaaaaggaataaaaaagagagggttggtcttggttctctcctctagggttatagatgataagtcacttttcttctttttacaagacaccctctcctttttatataatataattattatacccatctcaacagaaactcttttttaagaacaaacttatactacttctttgtactagttcttgtttcatagagatatacataatactaataccaacatgagcctctacgtacttaagttatgtagttctttttataatctatatatac

SEQ ID NO: 9277 - DNA, 319 bp, Arabidopsis thaliana landsberg
aaaccacaagttacacaatcatacttaacttacatccctgttgtttgtccacgtcttagcatctcgtttgctaatacaacggaagaacggacgtcccgggttatcttgtgatttcgatgtgaaaactgtgacacttaaaccacacacacacttacacgggacaccacgatctccgacgacaccggatttggcagagcttgaactcatcggaacagagagaaagaatcccgagctaattcgaacagaaagaatcacgagcatgaagaagaaattctagggttagaagatgatttttgatttgggggaaatgaatttccat

SEQ ID NO: 9278 - DNA, 1785 bp, Arabidopsis thaliana landsberg
  unsure (1)..(1785): unsure at all n locations
gattaagattttcctggtcagcaaaagattttattttttggtacccacctgtggatgattgtgggggacgcgagaaccaacctagttacattttcattctctatgttcattcgagtttgaggttcgctgtattccgataaactgatcttgctcgggaacaaaatcaaaatgtgcttgtgggttatgaggtagggctgctgccagcgcttgactataccctgcagcaaaaatagaagcagaatataaacttatgatacagatcacagaacatactatccgagatgtagttacattacaagggactgatgagccaaccttctatcactcattcaagaaactgactaagaggcaccgtagagtaacttgccagagctgtttcaggatcagtctgagaaatatccaacctcgcaggctggtttaagtttaaaagagattcgccttcatactccacgacctggttccaattttcatacgctttcttcaccagtccatccacatatacctttcagatttaaacaccaaaaaatttacactaccgcatatatataacagaactgaactatataatcacacatcaccaaaacaaaaatctgtaaatcagagttttccagaacaatataccaaacatcatgaggcaaataagtgtaagaaaataaggagaatgaaatagaccttttggctttcagagagtgaatcagcagataagtattggtcttcagttatgaggccacttaactcgtagatgttattgaatacaacgccaacagaccttgaatcttcagtatagtagatataaagcttaccgcttaggacacatgtttttgcatgctccactagcaaatcccacatcttatttgacatgccacttccaagaatctagacaaatatcaaataatcataattactcatgagcattgaatgaatgttcatccaacaacaatgagcttgacgtaataggaggcactcacagcccgtaattttgtagaatctctgaccaattgtctcagaaagccttccacagtgactattcctgcagcggttagcctcttatggaacgccccatctttaccaatcttctctaacctccacacctcatcattcaaagcaggtggataatgcttcttgtacactacacataaccaatccaacaacatgttgatttagaagaaaacaagtggcaagcacaaggcataaagagaacatgaaaggataacacatacattcgcccctgtgatctttaacagagaaagcttttgtttttgcttcacgtatacgtatgccatcacagtacccagagggtaccctcaaaccaagcctgaacttgcgacttctaatccaactcgaattatccgtgaaaacaatctcacccaaagtgcctaccccttccttgagaacaacaaacaagtctccagtaagcaaaggtctctttccttcacgctcttttacaacatgactttcaaactcttcctgggtccaatcttcatcatcttcattgttaaagtcacccccaagaacaacaacnnnnnnnnnnnnnnnnnnnnnnnnnnnnactgttacaggacgacccgtgtttgcatcaatcaatacaacatggatagtagcaccttgctctccttccactcttcctccagtgaataaagggagagataatctagacttgaaatgcagctgcaagttccggccatctggacctccaattcgtttcggagaaaatccccaactgaaaaaaacagttgcaagtctcaggaaatacactatctagtttcatggtcattaatgtatccc

SEQ ID NO: 9279 - DNA, 1663 bp, Arabidopsis thaliana landsberg
tttttcctttttctttggcaattgcaagctggtcacctgcaagtattgagatttttgacattttatgaatacacaagaatccaaggtggagtaggacctaatgatatggcggaaaggagctaaagactggctctttacctgtgatcattttaacactgactccaagatgaagtgctcgctcaattgtctgtgcactgtcatgacgaggaggatcaaacagaggaagaagagctacaaagtcccatggaccaccttcacctttaacatcaccatctggtacttcctattattggaaaagggatcgttacaatggaatcgtaggagttatcccatttaaaacaagtgccacatttaaaacataattacctgatatgccaacccaagcgatcttaggccacgttctgcaaatttgtcgattgtagcatgtactttctccttgatttctaatttgttgtgggccatatccaaaatctagagaaggacaaatcatcagaacaatatcttaggaaacagtgggtaaacttaaagtaatgtagtaatagctatttataaagaaagttgacagcaaaggttataacctcttcaggcgcgcctttgctcactcggtgcattttgccttctccgtctaggtacgttagtgcagttcttctattagctggactgaatggaagaaaatggagttctttaatcccggcacgtgcctgaagacaaagtatcagatcaatacatcacaatgtttatacctttgaaagtaactgaatcttgtttacttgaaagttgagtctttaattaatacctctttcgggtctgacaacatcgaaacaattgcagtatcaatagcatcttggttctctaaacgtgcagctcttgcagccataagcacagccatatctctgtcgatgcccctcttaaaaacctgttttaaaagaaatgaaagtgctctaattacatcatcgtcctcaacctatcaagatttttaaatacaaagtaagaagaacagaggaaagaggcaaacctcgatcagattcttatccacagaaagcttgttgagcgtgagagtacctgttttatcactgcacagaacatccattcctgccatttcttcaatggctgtcattctctttgttatggcaccctgaaatggattttaaagtcatttataaagaaacacaaatcaacaaaagttaactgactctgtcttaagacttgtattgacctgttgagccaagcgatgagcaccaattgccattgtaacagagagaacagtaggcattgcaatggggatcccaccaatcaataaaacaagaaggttatcaataccaacacggtaccctctcttttgaagaccgtatataacaacgatttcaattgccattcctactgcaatcgagcagatacagaaatttcctattgctgtcaaaacctggaaaccaatatacaaagattaaatttagtcattgactccaaaatctttgtaaacttttatattttactccaaagtgagaacaaaccttctggaagtgaccgacatgcgtagtactatccacaagatgagccgcctttccaaagaaagtgtggacaccagtcgctataacaactgcttcaatttcaccttgcttgcaagttgaaccagaaaacaaagaagcaccaggatttttggttc

SEQ ID NO: 9280 - DNA, 1284 bp, Arabidopsis thaliana landsberg
tgattgcaacaaaaacaaagtataacagtcacaagttgagtatatgcattacttgcaataacttttcttgcagctgttgcctcttggatgatctaacactttcttcaaagtatgtcgcttctgtgtcatacctattgtaatcatcagaaacacgtgaaaaaaactcctaccctcctagaatcaatatatgcataaaaaccaatagttcaataaagccagcacacaggtaaatcctgtgcagaaaaattcagcacgatatgcttactctgataagcttgcttggagaattgagctcagctttcttccaaatccggaaacaggaccagactgtacagcctcttccaactcgcgccaattctatacaataatttagacatgaatattaacgaaagggccattgaaaaggctaaaccatgaagcacagaagcagtattaaggaaattcacctcattcgcgataaaactagagaatttttcattggcaatttcctcacatcgcacagttgctaccatgacctgcatatatggagcgcataaataacaagaccagaacgaatgatgatgtacgagtgacaggagagagccttaagcaagcaaaattaccttgtgtgctggaagatccaagtctttgttgtctttgatgacttgccacatctgttttgcactaaaagcaaaagcattggcagggacaactcctcgtcgatcaccagcaagcccgccaggtgcgacagattggaagaaccgttgtctcaaattgtagacctttcatttacagaaaacattataggaaaaacattaatatcacctacaagccatctattgagcaataaatcacataaggtgaccctggatcttctccaaaatggcaaaatgtaaagctaattgtaaacagacctgctctttgaattgctcttctttttcttcataactcgagagagcaactacttcaacctgtcacacaagaaacaactccatatcttgatcctagcaaaagaagaatgatacgaagtttttctccaaatcaagcagacttacattgaagaaatcgctaagtggagtttctttgtgggcctgaggcttgggaactgaatcccatatctgcattttaaggacaaacattaagggattgctctattagtcaaagtacataaaggctaagactgtcttctaccttttgaatgtcttccctcagcactggttctaaattttccagtggcgtctgcaattaccctggaattagaaacaaccacaataatccagagattcagaatgataaaggacagaa

SEQ ID NO: 9281 - DNA, 1625 bp, Arabidopsis thaliana landsberg
ttatgcttccagagtatttttcttgtttaaaagtattattcaaataattaataaaatggtgttcaatatgtaggttttatttggaaaaaaaaaacaccttttaacgcaaactattaatcgaaatccaaatatcaaatgtttgagtctagaaatttgttgttaaaacgtatattgtatcaaatgtttacgtagctatgttagctagggtttaaagtttaaacaaattaaccccaacaaaatgttagagcatctccattgcataacctcttattgatgtctccaagatcaaccatgataaaaatatactaatcaagattaaaattaaagacattttcctttttaagtgtctaaaatgtcttaatgtcttagagaagatatttttgacatccaaaaaggaaaatgtctttaattataactatggttagtttttaagacactcatgagaggttatgcaaaggggatagtcgtagctaggtttaatggagtaaattaaaaatataatcaaaacatcaaacgaatgatatgtttatacctctgttggccaagactgatcccgaagagagcaacgtgatacgagtaagcttccgtccccttcatgtttaacatcggaaccaacaccatatcgccgccgtacgaagccgctgatccgagacggatgtagttacgcgacccggctgcggaaggccaaagacagtgtgaaaatcttgtgagacgtagctgagagaggagcgagaaacggtgagtcgttagactaagtctcccgtcgacgccaccaccgtcttcctccggcgtcgcacggtttctagccccgcagccaaagacaaaccctcgcactatagagagagagttttcttggtcggtgattgaggaagttaactgaagtgtgtcggagacaaggtagccggagctagaggaagaggcctcgtagcggcagaaatcggaaggagtgcagagaagagagacagaagttgttgtgtttgttgttgttgcgttgaaatagttagtgtaattggtggagacatgaggacaaagagaagagttattgcaagagattgtagagaaagtgttggaagatttgtctgagagggagcattggtggtcatcatcattatcgaggcatgtgagatgtgtagaagagtctagcttaaggttaaaggttcgtgtaggggttccaatggtgatctcaacataaagattagattcgaaaggtaagaagaagccgtttggtatatcattcgggagatcatcttcaaggctagagttatgagttagtacagtgaagaggagcagaagaagaacaagaagaaagagtgagtttgatgaaaccatgtttctttggttttgtatagcttaatgctcccaaaacattcttaagttattagctactttttatatgaggtattgtatttaaattatccttgtttttacgatagtgttgcaccttggcttgcatgaaataatgttttacgctgtcagaaaaaataaaacaataataataacgttttaaatgtttattagtatgaaaattgcctaacatttttataagttataacatttttataagttataacgtatataatcgacactaatttttatatgtatgactaatactatatcttagaact

SEQ ID NO: 9282 - DNA, 3582 bp, Arabidopsis thaliana landsberg
  unsure (1)..(3582): unsure at all n locations
cgtaaaatgcaaagtagtagctcgtcttggcaaagaaaaagaaaaaagaagagagagagaggtaaatctaaatttaaattactaaaagcagaaggaaagttccaggtcacgagggagtagtcgctgtcggattgaaagaaacagaccaaacaaagatctttgaaatcttaaaaaagattcggtgcccaaagattttgacctttgaagacacatttgattatttgtgttttctgacacttcccaaacacataacatcaacacttgacccatttttaagattttgtttcctcttcaaagatcttaccccgcaagatccgatcttccaaatctctctctatctactatactagtacttattaaaccccaccacctctcccttcttatttatgtcacctaacctaacttcttcttctttcattttatcacattcatttcctttgtcttcaatccaaagctttactcttcttggaaccaatctgctcccttttttattctgagtttgacaatggcggttggtgaggtcatgaggatggagattcccgccggtggagatttgactgttactactccggagttgcatgttcttgccgtcgatgatagtattgtggatcgtaaagtcatcgagaggttgcttagaatctcttcttgtaaaggtaaaaactcaaaaccaatctttttctgctctgtttttgttggttttaactctcctctgtttttcttcttcattaacaaactctcctctgttttttagttacaagtgtctttttttttttgttatttcagtgacgactgtagagagtggaactagggctttgcagtatcttggcttagatggaggcaaaggggcttctaatcttaaggtaattaagaacaaatttttcctcttctgctatctactgagaagaaatcttgtacattaaggaaagaccgaaagagtgaaacctttgcaactttggctattgcttcttcttgtctttatgatcaaatgagatttagaaaagaactagtctagttagtgatttatgtgttttggtattaagatttgattttgttagtgattttcatcataacaggatttgaaggtgaatttgatagtgacggattactcaatgccaggactttcaggatatgatctccttaaaaagattaaggtaataacaataataatggatttaccaatctgagaaagacttaaacaaagcttttttaatgctgcttatacaaaactccattgatatgtgcaggaatcttcagcattcagagaagtaccagtagtgattatgtcatctgagaacatcttacctcgtatacaagagtaagtactgattgtgtaatgtgtagtgatacagattggatcatatttgtgtctacactgtgatctaaacttatcgacttcttcttcttgtttttagatgtctcaaagaaggagcagaggaattcttgttgaaaccggtgaagctagcagatgtaaagcgaatcaaacaacttataatgaggaatgaagctgaggaatgcaaaatcttaagccattctaacaagagaaagcttcaagaagacagtgatacatcatcatcaagtcatgatgatacttctgtcaaggactcttcatgttcaaaacgaatgaaatcagaatctgaaaaccttttttctctactttgaattatatgtatagaggccaagaccttagcaaaaccattctgttaatattcctcaagaaagacaatgtttgagagagtcatcacactactcatgatgttgcttaaacaaaacaaaacaaaaaagagaaagaatcaaatgttaggttcacactgacttacacctcatgtaaattcttcaatgcttgcaactcaagcttaggatgctcttctcccggaagtattggtctatcatcaatcacgcaggaatcgtttttcaggtaagtgagtctgcaaaccgcccaaacaggatccgaagacaattggaattcttctactttccacccggtccttgagtggacacgccccacatccagattgaaagaatatcttgttttagttcccagaacatttttctctatgtcattatctatgatttgtgtaacaacaccattgaccctccatgttttcttcttgcccctgaggtagaacatcaaattcagcttttcacgacgagacgaacactttctcacaaagtagtaccattcactgtccttgtaaaaaggagatctaacatgttcaagaagccatggctccatggcatatagctctctctctcttatgaagcagctgaagtctggtgaatgggcctttggagtgaggtacaaagagagtagctcttgatcagtcggatgaaatcggaatccgtaagtaaagacacttggtgggacgttctgaccagaactcagagcatcatgtatctgcttcaacacatcccatttcaagcgtggatgttcaaacccgttcaatctaggcttatctaagtactcattcccgagggggtttttcttaacaaagtaataccattcatagtgattgtaacacggatctctcacatgcccaagtacccacggatccttgtcgtacatgtctatggttttgataaagcagctgaactccggcgattgtgtctttcgcataaggtagtctgtcacttcttcatcagcntggcgaaatcgaaacccgcgtgttaacacctctgacatttttgcttctgatccaagaaacgagaaaccaaattcatcaaactcgatctctaaaaacaaacagtgatctattattctaaaagaaaacccagtaaaagaattggaatcatggtaatgaatatgatttcttctagcagtagaaacggtgtgaaagtgtaacagagacgaatatatgctgaagaagaagaaacttgattatgagagaacgagaacttacatgaatcaatgatcgaagatttcttctagcagattaacagagagacccaacgacgtgaaaacttaacagatatgaatgttcgaagaagtttctgcaagaaccccaataacgaattggaatcttggtgatgaatgcttgaagcagaaacttggataacaaagaacgagaacttacctgaatcaatgatcgacgatttcttctagtagagaacagagacccaacagatatagaaattctgaaagaaacgcgacaaagagttggataacagagagatcgacaatttcttccacgacagaacagacttcaaacaaaccgtgataatctaacagagatgaacgctcgaagatgataagaaaattgcaatcttggtgacgaattttgaatgcaggaagaagaaactcgaatatttgataattaatatcaatgttcagtggtttcttcaagcgttcctctaaagcgatcttggactcactctgtgtttctgtttcttgctgccaacggatacgcaacaataacaattacaatgtgtttaaagataaatcccccttcgccgacttcactaatactatcatttgtattttattcaaaattataattttttaaacatcttaacgattgttaaattaaaaggactgtatatcatatttaagacttttatttccgaaattatatataatttctagga

SEQ ID NO: 9283 - DNA, 1391 bp, Arabidopsis thaliana landsberg
tttaagaaaaaggatctaattatcacaagaacttttttgcgatatgcacactaatttatcatatacatgtttgtaaatttactaaacttgaagagaacttgaattttgctttaccaatattacgagagataaataaaacagacacttacaaaactcacatcttcaaaatatatacagttttattagtgaaggggtctctcttacgccgtggacaaaacctgcaactctgcccaccaaagaggtgacaatttcggtgtagcatcgttcggtgacaatcccgtgatctcccgtaaccatcctgtgacttcttgcattgtaggtctctctttcgggtcagtcctaaggcatgatttgatcacttcacctatattctcaatcttggcatcataagattccagtgttggatctaccattttggctagagtctctcctcttaagaaatcaaccagcgagctatctactgagtcaggtttgttaacggattctatgagtttcccggttatcatttcgaataacagtaaaccaaagctgtaaacgttgtcttctggattcaaggctgagatgtgtgtgtctatgactgtgttgttgttgatgttagtctctgtctcagatgaaccgaaactgaaatctgatactttgacagcataatcctctgtgagctgaagagatgatgagacgagattggtgtgagctataggtggattgagttggtgcatatggtcaaggcaatatgctaatcccattgcaattcttaaccgcattccccaatccaagtgttctgattctttatctgtaacaaaaaaatgattagcttctctttagatcacaaagaaatgaagccaacatggctgattgtgtgacaaaagtactcacaatgtaaatgctcaaagagtgatccatttggagcatactcaaagatcaagatcctggtgaaaggttccttttcttcacaataaccaagaaggtttgcaaaattcttgtggttgatcttcgataacatttcgatctgaaatcgtgaaaacagaacgcgctaagtcgactatatgttgttgttataagaaaagaaaaatggggaaaacaataccttcttcctgaagtgaatttctgtactgtccttccagtctttggcagtagtagtagcaaaagaagcaacagcaatctccactccacttgataatgttcctttgaacaacttcccaatgggacaagatccaatgacattactaaaatcttcacatgcagcttcaatctcagatcttttgagtacaggaatacctgagtatcaaaaaccacacattgatgaaaccaaatgagacaaatttggttactactccaagtaagtgcacttgccaaaacaattcaagaaaggaaattaccagtaacgaatactt

SEQ ID NO: 9284 - DNA, 788 bp, Arabidopsis thaliana landsberg
tagcccatttttaatcgaacttacagtgtaataatgactcatatgactaaagagctttgttacttacagtgtaaatgttcaaagactgttccgtttgatgcatattcaaagaccaagatcctagtgaaaggttcttcttcttcacagtaaccaagaaggttgacaaaattcttgtggtttatcttggataacatttcgatctgaaattatcgaaaacataatataaggtgatagaaatcaaaatccttaaaatataagaaaactggttgaccggaaataccttctttctgaactgcatttctatgttatttgtccattctttggcagacgcagtagcaacagaagccacagctatctccaccccacttgatagcgtccctttgaacaatgtaccaatggggcaagacccaatgacattactaaaatcttcacaagcagcttcaatctcagatcttttgagtttggggacacctgagtagcaaatcatacatcactaatattgaaaagaaaaaaagtggagctgacagagacaagcatgtcgattaaacctcaatattctagaaccaacaatgccacttcacattttatatcaaggagtagaaaggcaattaccagttatgaacactttctgaagttgtccactaagacctgttcgccagggattcacagatttcccagccttacttttaaaaaagaaaacaccagtagctaaaaggaggataaacacagcacccgctatgcagccagccactataggaattgtgctgtttgaagaagttttgagctgc

SEQ ID NO: 9285 - DNA, 609 bp, Arabidopsis thaliana landsberg
attgagggtcggaatgcccttctgaccaaactggatacatatcactttgcacaacttgaactactagcttaagaatgaaattagttggaagatacatttgtaatacaaaactacaattctgtcaagtaaatgacaatataaggggtttcggagaagcacaccttttgcttcctcattcctaatggtcatagagaagacggtagttttcatttgtttttgggatacacacaacatatatctctgaagaatatgattgcctcttaattcactgatcatatagaagcatataaagaaaaatcaagttgctttggtctagtggtaaaggagagaaaagcttctgccacctggatttgagtattattggccaccggagttcgaatataaacctttacgatcacctgagttataaaaaacacacacacacaaggaaaaatgtatgaaaaaacactaatcactgagaaatgcattttaaacttttacaaacaactgattcgatttattaaattaattctgtttcttacaatgttttggaataaaataatccttacaataattcgattattaaagacaaaaaataactagaatcaaagcttacatgatagagagaac

SEQ ID NO: 9286 - DNA, 913 bp, Arabidopsis thaliana landsberg
gggaagaaatagactccatagaaaatctcaagtacgcaacaacatttgcaaagagtattacttcaatcaaagtacggtaataatatctaacacaaaactgaagaatcaaaaccaaaccaacagaaatagaggaacagaggatatagcactagaccaaaaccggttttaatcttcttcctcagcttcgttctcggcaatgttgaagtacctcaactcatagaggttacggtccttgttcgccgcaatcactctaagccaatccctcacgttgtgcttcttcaagtacttctttgtcaagtacttaagatacctgtcacagacataaacaaagaatcacactcaaaaacagtctaacaacagaatcaaacaacatcctatacttaactcaacaagataaactcaagaagattccacattcaacattgtaacaaccaacaaaataaacaaaaacattactaaaactactcaagattccacattcaacactgtattaaccaacaagatcatcataagcattaccaaaaactattcaagattcaacattcaacattgtatcaaccaacaagattaacataagcaacaaagaattacactcagagacactctaaaatcagaatcaaacaacatacctataagtaactctataagataaattcaacactgtaccaaccaacaagatgatctattattcaacattgtaccaaccaccaaccaacaagataaacaaaaacattacaaacacaacggtttcaagattctatattcaaacgttaccaacaagataaacagaaccattcccaaaactatacctaaatatcaaagccacaaatctagacacaagtaaaggcaatatcagagaattaggttttaagttttaagatacctcttggagaattgcccatcagcagtgaca

SEQ ID NO: 9287 - DNA, 1186 bp, Arabidopsis thaliana landsberg
gtcatgaatgatggtcacaatgtcttccttgaaccgctttagtttctcatcctcgttctgttgtcgtccacattcaccagagggataaccaaacgaagcatcaagccaaccacctgagacagcttttggcacaatcaaaccaaatttggttctagctgaaggaatgtcaagagcaagatcatcaaggctttctcttaatcttgaaaatcccttcaccatttgactagagcttatcaggttttctgaagctgcttcatttagcagtttcaatacaggtgcttctgctgcgtggttttccaaggcagtaactaaggccctcttcacaacctcatggtgaaagaaagaaacacccaactctcttacgcaacgacatgcctcataagtctctccagtctccacatattcattcaaaatgtcagcaatcttcttcttgacttcctcaacagtggttcgagtctgtccaccccaccttctttctactagctcagcatggtgtgcagctgatagatagcttttctctgcagtttggacaacctggtaacctttagaagttattggaagtgccttggcagccctaggaagaaaagctggaggaagtatgtcatccacgacagcacgtgcaaggaacaaagcaagaacattgacagcatcaggtatatccaccacaaagtcatcggctgactcgagcagcaggacaaatccatctcttatctggttcgggttaatgacatcagcatacaatgcggaaagcaaaaccgaggccatttccttctctttgtcatgcctgtccatcgctaccgagacaagccgcttgatgaagtagggatgatattcacttgaaccaagttcaatgaggtcagctgctgccacatcaacatcaccggtgctgaagtattcgttaatgatggaagctgcagctttcttgtaatcatctaatgggtctgacagagttgcaccaacaagctcgaatggttcctataaaacaaaaaaaaacacaaagagagctgagactgatgatctctaaaaagtaacacacaatggataaattttctacatcatctgaacagcagatggacaacagaaacagttttgtgcaagtactttggcaagaaaataatcaaccatctagtacgaaaggtgcataaactacctctccactgccataattaggatcactcgggaccat

SEQ ID NO: 9288 - DNA, 1191 bp, Arabidopsis thaliana landsberg
catcaagaacactgctggagaatgcaactggtgattgagatgtcgatgatgttgatgtttcatcgtgtaaagaatcataactcatgccagacgaaaccggaggaagaagaagaggaggtctggcaagaactctagttgaagaaagattgttcttcctgactgttacagtctcatattcagataacacactgctctcactacttttccttgaaaatgtcccaacatcatcataccagttccaaccaggactgctcttgcgcaaaccatgatgcgtaatcgctcttccgcttggacttggacacgtcctcgactgccaaaacaactcatgagacattattacaattagcgacaacactctgaatttctgttctgaaaacacattgaccaacctgatgtgtgagcgcataaaccatagctctctccctcttaatagccccttcttgcttcatctgtaacttcgttttcacttcttttatacttctggggctaccacaccaacccttctgtaaaaacatcaaccagattcacatactttaaagtaatgttcaatagactttactcaatagattaatatatacctcggtctgcttaacaggatcttttagctcaagcgagtcagaaggcgctctacgatgagctcttacacgagactgaacacgaacaagagcttgcatacacctgagtgtaacggcagcttgtttcctaacttgtctgccacgaaaaatggcctgaattctcacgacagccttcagagctctaaacgcctgtcttgcctgaaaaaagaaaagacgcagacaacacaatgaacaagaagacccgtgagtactaatgatcaaaccacaactagaatagctcatgtaactagagattagtgaagattcacatacgaggaaagcacgaaaagcagcctggattcttgttgaagcccattctctcttaaccatcaaaaaatccctaggaggagctcgaatgagtgctgccatggccgtagtaaaagcctcgtcagccgagaaagacggtagctctgaacctaacgaagaagctgcatagcttcctcggctcttgaaagaagaagatgctaagctctccgatgaaatcctccacagcttccatttcttcttgctgctcttatcacttaacttctcctgctgcacaattaacagagagatcaatgttggtaaagtaggaaga

SEQ ID NO: 9289 - DNA, 1210 bp, Arabidopsis thaliana landsberg
acgacgccttcttcctcgatcctccttcaccatacagctcgttccattgttgaagttctttcatgttcgacgagtctgaagacacacttgcgcatacctacatgtttctgatcatttagctttcttttcaaagttattatcacatatgtgaaactcattggcttctttgtcttgacttacctgatcatgggcagccttgaaatcgttcattgtcagggaacgaacatctgtgcagctatacaatggcggtgtgggacggttctcagcctgagctgcagttttctcctgtagtcaaaacaacagccagaataataaaaagaatgcgttatgcgagtaatgtaaatggacttcaggattcgagaagcaatcgcattaaacagaaaccaaaccttcttttctttctccagtatttctcggattggaaaatgtgctgcggtcacacacagattctgcaaccaaaaaagaatacgtgtgtgagtttttttacaggggaaggagattgagagggaaggttatagaaagtcgagacctttaagtcacttcctgagtacccatctgtcatatttgctatagcttctaaatcgacgtctggtgctatttcttcttttgctagaataacgctcaagatctttgatctgttcgttgcatctggaagattaaccatcaatctgcacagaagtagtatgcaggagaggatcaacaatggttgcaatattcttcacaactaacagacaacagagggaaaagtggtggttttacctccggggaagccgtctaataacagcttcgtctaggtcaaatggtctgttggtggcagcgagtaccagaacccgttctctatcctttgttcttaaaccatcccagtttaccatgaactcgttcttcatcttacgcatagcttcatgttcccctggattttcacgtctacccaacatgctatcaacctgaataatgattttccacaatcatcagatcgagaaagtacataaaaagactggcttcaaaggtgggagagaacagagaacgatttttaatatcttcaaacatacctcatcaacaaaaatgacacttggcgcaatcttgctcgctaaggagaagacagctttaacgtacttctctccctcaccaaaccactgcaaagcatttagtgtaaatggtcaagtacaatcattaaaagaaagcataaaaggaaatcatatcactttatgag

SEQ ID NO: 9290 - DNA, 602 bp, Arabidopsis thaliana landsberg
tagcttcatgttctcctggattctcacgtcttcccagcatgctatcaacctacataattttgatcccgttcaaaagatattcagaaagaaaaaggaactgtaataaacaggtatgagagctgttcttaacgtctagcaacatacctcatcaacaaaaatgacgcttggagctatcttacttgctaaagagaaaacagctttaacgtacttctctccctcaccaaaccactgcacgaaatctcaagtcaagtctaatctcaaagaaaacattatagagtcaggtagccgttttaagtaatcaatacctttgaagtaatgctggacattgaaatattgatagaaatttgccccagcctcggttgctccagcatttgccagcattgtcttctccgtagcaggcggtccaaacaatagtatgccctttgtaggttgcatgaaaaacacagttatacttcaggttccattgaatattgaatgaaacaaagatttgaaaataaaataaaaagcaagaaaggtacctttgtacgttgccctttgccaaacaattcgggtctttaaagagaaagcatcaccaactcgttcaaggtatttttcccattttc

SEQ ID NO: 9291 - DNA, 948 bp, Arabidopsis thaliana landsberg
taccactcactatagggaaagctggtacgcctgcaggtaccggtccggaattcccgggtcgacccacgcgtccggaagaggaccaaatcaaacgattctcagtgaaatagaacatatgcctgaagctccacgtcaacgtatctctcatcaccgtcgagctcgctctgaaaccttcttctccggcgaatcaatcgacgatctcctcttattcgatccttccgatatcgatttctcttctctagacttcctcaacgctccaccaccaccacaacaatcacaacaacaaccgcaagcttctcccatgtccgttgattcggaagaaacctcatcgaacggtgttgttcctcctaattctcttcctccaaaacccgaagctagattcggtcgccatgttcgtagcttctcggttgatttcgatttcttcgatgatttgggtgttactgaggagaagtttttagctacaagttcaggagagaagaagaaagggaatcatcatcatagcaggagtaattctatggatggagagatgagttcggcgtcgtttaatatcgaatcgattttagcttctgtgagtggtaaagatagtgggaagaagaatatgggtatgggtggtgatagacttgctgagcttgctttgcttgatcctaaaagagctaaaaggtatataatttagtgttgttttttacttaaagcttgtaacttttttgtgatttgattgaggtttgaaatagtgttttgtgatgggtttttgataggattttagcgaatagacaatctgcggcgaggtcgaaagagaggaagattaggtatactggtgagttagagaggaaggttcagacacttcagaatgaagctactacattgtctgctcaagtcactatattacaggtaatgttttgtattactttgtcattgtgtttatgcaattggtgtgactagtgaaggtag

SEQ ID NO: 9292 - DNA, 2376 bp, Arabidopsis thaliana landsberg
cgatcagttttcagcacatcctctgtttttttaattgtactagttttgacatttcagaatgttctcagactctgtggtcaacgaaaagtactgtttgataacaagactaaggatacagtcaagaaggcagagcaacttaagcagctcttggcccatgtcgcagatgttgaaaggcaaactgacgggataccgtataccgacaatatgcaccgtaagataaaggtaatgaaagtgatgaataattacataacttctctgccatttatgccagttaattgacataacggtttacgctccattgactaagaatatgatttaaaatgtatgaaaaatacgctacactaagaccgaaagattatttaatttgggttactttacatttcggtttgcctgaaatgtgatttaaagtatatgaattacattgcttgtttaattcgatcttgtggttttgacctgcatttcattttaaattggttgttttttcaggaggaaaacgataaggttagggaacaagagagagagattgaatctaagaaacttgcagaagcagaatcaaaagtaatgcatgagaaattacaaatggagcatgaaaaaaacatgaagataatgacagatgcggtaagtttgaatacatttttgtaatagctcgaagtatatatgcttgatttgattccatgcggttaatttaatattttctatctttcaggtggagaatgcgctaaaaatgagtgaagcagcacacgaaaaagaaatgcgtatggtggaggatgcgttaaaacagaatgcatcagcacatgaaaaagagatgcgccaagtggaagatacgttaaagcagaatgcgattgcacatgaaaaagaaatgcgtcagatgagagatgattttcagcagagccaacaacgccaacaggtggaggatctgctaaaacaaaattccgagaaacatgaaaaagagatacgtctgatgagagaggaatttagtcgcacacaggcccaacagctccaactgttccagcaacaccaaccggctcagcaacaacatcatcccccacgagtacatccagctgagtgcaatatcatgtgattgatgtccccacctcgtccgaaaacttactaataaaagatcgaccacacagttcatttttatttttatttctgtcttaatgtgatcgttaaacattttcgaggttttcttttgcattttcccaattctcttgtactgcaagaggcatgaatttattcatacatgctcaacgcttgtttcccaaatttgtttgactttgaacattgcttctttgagtttaaaggaagagaagacataaagtttctatatcaaatatttatatcgtgtatattgctttgccaattcacctttgttaatataattgaaatgtaaacctaattatatgttgacatatgtcaatctggctataccacaactgttgtatccctcttgttggagtcgagccattatataccatatttggcctattaggaactgttgagtacaagctgcgaaagagggatttgatatcaaagacgcaaagtaacgaatcccaagatccctggaagatatgatgaggagttgtttctgaagatggggaagggcaacaccttggaagaaggactttataacgaggaaaaatgattgcagagatgatcatcggctattctacgcaaaactcttattctacttcacaacttttttctctttgttcatctttacttgtaaacatcctcattagttaaatcaattaattaaagcaagttcgtcagaccacatctcatctctttagtttgaaatgggaatctaatccgtcttccttaataaaacacttgaacaaattgcgagtgtggattttagtatccacattttgtccccatatgtggagaagaaatagatttctcttacaacctaaataatcaattatagcaggcatttaagaaattaaacacattaatagtttcataaaaccctaaaacttagttttcgttggttgcagaacgatgctcgtgtagattagatagggaaatttattagtagtttccttggataaattaacataggttaaatttatagttactccagcaatatgcattatcaattaatgtcgaatcaacaaatatagaacggaagaacggtaaacaaactatactatgctaaccctaacgtatatcaatgcatcgataacttatttttacgaatttttatatgtttttaacgaggaggatacgatgtgattctggtcattttaaagatgcgttcaagtatttttgtagtgtaaaaaagtctttacagggttttgggcaaaaagagaatgtttacaatttgcaaattaattctttacaaatttcgagaattttcatgcggaaatcgat

SEQ ID NO: 9293 - DNA, 2033 bp, Arabidopsis thaliana landsberg
tgaataatcccaaaatgtcagccaagcttttttgtttatgaatcagaaaaattgggatgaagttttgaaacttacagcagcaccaacagagagagcaaatgtaccaaacatttccaacattgagatctcacctccctgatttttgcaaccaaacaaaaggatgtgagaattcagtatttcgaattggtttagttagttagttagttatacctccatttgccaagagaatctgtagtaaacagccataacagccatagaagtgataccaaagctcgacaacatagcagcgattagataagtggacctctccgatttcttcctctccaatttctccgccaaacgcaacgccagatactcagcgtctatagcgtttgtggagctcgtgctctccggtctctcatcgttctcaatcggagaattctgtctccgttcttcgacgacgtaacagacagaaaagcgtttaaatcgaagagacggagagaatccggataaggatttcgggaggcggagtcggaaatcggtagaggaggaggaggaggaggagaaagagcggtggagtggtttgaatgtaacggcggttgagagtcctgccgccatcctaatggaaggaggagctacttgttttgaggttaaccttttatgcgagcgagcgagagagatagatagacagagagagagatgtggtgtggatggatttaaatgcaagtgaggccacgatttttttgtttttgggtaaaagtaagtgctcttttttttgccttttcaaaattaaattaaacaagtgaaggatggtttagtttcgtgtgactaaaattgccctcaagtttttttagcgactaatcctaccccacccttatatcacatttacattattacccccactcaaaatgggttactttcttattttttgataatatttgttttctttgttggatttttttccatcttttctttgaccaaaaatgtatttgcttacctttttcacataagctcagttatgtttaatttattaatttctagatttttagtataaatatgttttataaaccaaattagcatttactataagacttaaaccatacaaaagccttttttttattcttctcacttgtctacaaagctaacaatatcttaagaacactttagtattttagtatgaatcacatcaatttagtttataaatgatttatcttttttaattaaatccaagatacagtattttgtaaaccataattaaggtgaaacaaatttataaacattattgttgttataaaatataagatatatagagaaagtaaacttatgtagaaattctactagattcatttactgtctattgttttggattcgttttctaaaaagtagattttttcattttaaggaatgtggttatgtttaggacgctacatcatcactacatgagtacatgtgtagacttgtgtcatggttgtcatagttccgtgtattgcgtgtgattttgtattgtttatatccgtttgttctaaacgtcatttgtataattttcgatatcgtgatgaataatgatgtaattctaagatgtctggactaagtccttaacttaaaatggcataaacgtaaaatcacagaaacagcgatggtgaaagacaaagaaacaaaaagttaggctccaaaccagaaacgaacgcaacaagttccttacaagttacacccatttatgaggctgatgatgccatatgggctttctctacgtgtcacatcactattcactatgacaaatcctcctagtatctttgttttttggttcttttatagaattattattatttttttctttttttggacctcaaattgtgatatggatactgcaacttgggtcatggaccttcaattacactcttctgctaaaggccgttgtagatataagatgatgaaacgtttgattctcttgcgctttggattctgagattttgggatgaatatagattatggttggcattaaagaatgaccggactattgctaatgtgcacaataaccttgtcaacaagacact

SEQ ID NO: 9294 - DNA, 1882 bp, Arabidopsis thaliana landsberg
ggtctctacattgtatccaagtagcttttaagtcatccacataacataacaagtttttaaagttcatactggagcaactaaaataataattattatgaatactgaagttagttaaaaaaattagaaaaagtagttaaactgtatgtaagcatgcttgaacttggatttgaataccaagaaaaaaaaaaactataaggggattttttttgttgtcaagggtttttgtttttctttctgtttttttttgttgttaagttttagttgtggaatttcaaagggtttaaccaactagtcttaatgaatttcctatagatggggcatctaaaatctattttaataaggtcgtagaccaaagtcagagaaaacacggctagttagttctaggtgtatatatatagcctccttaatacctcaaaacttaatacttgtgagcatttgctttctttcaccattctctcttagtcttcctctctcagttctgatttttttacgaagaagttttgagtttctttttgacaactcacgactcgttgaggtgatctaccgcaaggactaaacaacaaaacatatatttttttgtcccaacaaaaaaagtcaatcatcatgaagttctcaatctcatcactgaagcaggtacaaccaatcttgtgcttcaagaacaagctatctaaggtcaacgtcaactcttttctccatcccaaagaaaaagtcatctttgtgatgggagctaccggatcgggtaagtctcgtctcgccatcgacctagcaactcgttttcaaggagagatcataaactccgacaagattcaactttacaagggcctagacgtcctaacaaacaaagtcacccctaaagaatgccgaggcgtgcctcaccacttgcttggagtattcgactccgaagccggaaacctaacggccacccagtatagccgccttgcgtcacaagcaatctcgaaactctcagcgaacaacaagcttcccatagtagccggtggatcaaactcttacatcgaagcacttgttaatcattcctcggggtttttattaaacaactacgattgttgtttcatttgggtcgacgtttccttacccgtacttaactcctttgtctcaaaacgtgtcgaccgcatgatggaagcaggattactcgaagaagtaagagaagtgttcaatccaaaagcgaattactccgtagggataccgacgagctatcggagtccccgagctccatgaatatttacgtaacgaatctctagtggaccgtgccacaaaaagtaaaatgcttgacgtagccgttaaaaatatcaaaaagaacactgagattttagcttgtcgacagttaaaaaagattcaacggcttcacaagaagtggaagatgtctatgcatcgtgttatcgccactgaggtgttcttgaacacgcaacgtagaagaacaagacgaggcttgggagaatcttgtagcgagaccaagcgagagaatcgtcgataagttttataataataataaccaactgaaaaatgatgatgttgagcactgtttggcggcatcttacggcggaggaagtggaagtagagcccacaatatgatatgaaaagttttgtcattgatcatgtgaagctttttggagtgtgagattaaagatgagtctccaagatttcgtatgtgtggtggtgattccacggaggttttttcaacgtacaggtgtgacatttaccccgagagaaaaaaacaaaaaagttttttctttttaagtgtttgtatagaagaagatattcggttaatattaattgtttgatacctattgactacgagttcacgataaccgaaagttttaattccttgtgccacgatatcacacttatgtgtattgtggggatc

SEQ ID NO: 9295 - DNA, 1161 bp, Arabidopsis thaliana landsberg
  unsure (1)..(1161): unsure at all n locations
ctaaaggaagcttgcngcgatattgcactgtatagatcgtaatctccatttgtgcatttgtcatttttagggtcttagtttagctgattgctagtttgtgatcttgatggacctggattggctaaaattgacactgattactgaattgtttcatagttagtttatcttatgtgtcttcaagctcggttttgaagctcttttaatggatttgtagggaacaaaggaaacgggagaactccgttgaactgggaaaccagagccggtatagccttaggagctgcaagagcgattagctacctacattcgcgtgatgggacaacttctcatggaaacattaagtcctcgaacatactattatctgactcctatgaagctaaggtctctgattacggtcttgctcccatcattagttctacatctgcacctaaccgtattgatggctaccgtgcccctgaaatcactgatgctcgcaaaatatcccaaaaagctgatgtctatagctttggcgtcctaatccttgaattactcacaggtaacaaacaatcaaggatagatatatctttttaactgctttttttgcaattgctgtggtttctaggttttaacatggaacattacattgcaggtaagtctccaacgcatcagcagttgaatgaagaaggcgtagatttgccgagatgggtccaatctgttaccgagcaacaaacaccgtccgatgtgcttgatcccgagctcacaaggtaccaacctgagggcaatgagaacatcattcgtttattgaagatcggtatgagctgtacggctcagttcccagatagtcgtccttcgatggctgaagtcaccagactcattgaggaggtttctcattcatctggctccccaaatcctgtatccgactgattttttgggggtctaaattgattgatttgaatattggttggggtcaagttgcaatttcttgaatagtgtcgaccccacttcccgccttttttctacttcttcttctttgttcttggtctagtttgttcgttaattcttgagcctcaaattgagatgagacctatcagttccttttttcctttcttctacttttctttatttccaaagttttaaaaatgtctataaaactattgcttttgctaatttttggattaatatata

SEQ ID NO: 9296 - DNA, 837 bp, Arabidopsis thaliana landsberg
tgtccttactgagagcgtacattccctttcctttttcaggaattgcaccaccaggcttcaactgttcagaattacccaaaaaagttaataacctaaagaccaagcctgtgtctgcaaaatcttcgaaaccaatgggaagccaacctcagaattccgatagccacaatcatcacatgtagatgccatgacgataacctcttgaaaatacgggatttctatcttatgtcaaggcgtaacagcatcgaggagttcaccaacaaacataagtgtaaaacttgtttcagagaaccaaggaacggctacagagttttgaaaggatactagtaacgaacatccgtgtctcacacagctttgtacatgctccgcaagttgaagggaaagtcatcacctgttaaaaatgagcaatagtaacgttatatgaactcaccattttagttttaaactctcacaaaacaaccttttgacattgatttcttatctcaactcaagtgatcataacattgagcttcaacaaaactattccaaaatttgtagggtcagaatttacctcttcaggcgcagagtatctaaacaagttatctgaaatatcagtgctattactctgcgcaatagcccgatgaccagctgttgctccgatagttccatgaggtagagcagttgtttgagtagaaggtgttcccaggcttctttctgactgtccagcctgagatgggttagtaagatatccaacagttgcttgttgttcgggtgtacgctcataaaacttgatcgttagtgagggatctaatgatggagcatgtctgtcatatgttggaaacttgtgtcataagcagataa

SEQ ID NO: 9297 - DNA, 2109 bp, Arabidopsis thaliana landsberg
ttaaataccttatcaaattataaagaagtggaaatcatcaacataccatttacttagtgaggagagggcaaaatttccaaattgggaagtgaattgtattaaactcgacgcaaatcttcttaaaagtcttcttcttttgggttgcttggatataatgattattgcttgatgtcaaaattcgcacaccattgggatgatgggacccaaaaagaatcactacccacttctgccgttgtttcaacatcatttatgtataataatcacagtttatcaagcacacaaaatatcttacatgagtaacaacaatatgatattaaaattaatttggcacataatttaatcatttggtgttccgaccgacatgatactatactataattttattcccatttcatttcttatttttttatatgcatagaaaattatttaaatgcaaaataaaattttaaccaaaaacctctagtctagtagtttgttcgattgtatatagagtattttgtcatgtgcatagattaccaccatctacgaacattgttgtggtttgattttctctttgatcgcggtaaacaccaacaatatatgactagacattcataaacttcagatgagttaggatttgattttttagaattttggttttgaaaaaaaattagccaactaaaaatcaaacaaaaatttactgcggttcataagtaaaaaaaaaaatcaatttcctttttagtaatattcttggagtcgaattgaagtaaaactgtgcagtttacaacacagaattcgatatttaaaaaatttctgttggcgaattaaaattgaaatactataattatccaaactttcttcggttagttaattaagatcagaaataatgtctaaatggcaaggttaatatggatatttgtatcagatctaatcccttttttaaagaaaacaaacaaggcaaaggacacaatcagcgactaaagctctcacacgttacagcttcttattggttaaaaatgaacgtggttgtcagctaaattaagtgactatgtttaataatcattaaaacgggatatttattagtttattaccaaaaaatgaaagcaaaatatctaaacaataaataaaataaaaaaccataagaggaaaaagcttaaccccttaaaatggcagttcgtgtcgaagctactacaaacacacttgtcgtctcttctctctctcgcagctcttctctattttcagcaatcgcctataatattaggtaaagcttccttctttttgtttaccgttttcgttttcttttcttctcgaatctgtctttgtcttatcacatcccctgaagtgttatactttttttttttttgggtccgattcataatatctgttttgtcttttttttggatctatgttctaaatcaagtagtagtagtaatgaagtaactattcctaaagaaattaaaggataagacttttttgtttttcttcttgagggtttgtgtgatcttgcttttactccagaatcttttatagatctatcttttagatacattcaagaatggtcaaagttatggattttgatccaatcttatatttctctctgaatccaaggatccaatttatactctctgtatcacacacttctatgtatatgtttgtgattgattgcttctggctaaaactttataaagttttgacatttatatgaacgttcctgccttttgcttttggtcttctttgcttgctcttatgcaagtatacttaaaagcactatgtgacacatagttgtgtggtgtgttatactcctaaaccagtttcaattttctggtcttgttctctcttaggtaaagctaaaagggtctgattcgtttgttttttcactgaagaatttggaaggaagtgattccgttgtgaaacagaaaagaagtatgggtactcacattgatatcaacaacttaggcggcgatacttctagagggaatgagtcaaagccattggcgaggcagtcttcgttatattccttaacgtttgatgagcttcagagcacattatgtgagccggggaaagattttgggtctatgaatatggatgagttactcaagaacatatggactgctgaggatactcaagcct

SEQ ID NO: 9298 - DNA, 1821 bp, Arabidopsis thaliana landsberg
atgaaaagcccacacttgtcattaaacacgcaatgttttgttggactcacttaacatgtcaactgttatagtgacatcatcggttccttacgtgccggcgaatgagttcttccactggagtaagaactagctaaccatgatttagagttagggtgcgcatttatatcatagtctaaacgttgacaagaaaaaatggtctctgcatttcaaacttaggctgatctaaaccaagggtatacaatttctgtaacccgagacccaaaatattgaatcaaatactgattcatggtaagtgcttaaaaagtttaaattgagagagtcgaataattgaaaagttaactttttctctttcaaactgaatatatctcatgatatgaatttgaattttggtaaaagaaactttgttgaaaatgtatttgtggtagcgataatgagttgtatataaacatcaatttcaattgaatcccattcaaaagaatattatatactctcacaaatggaatatatctattatctaggaaggtagggaactagaaatttcatcaagtggattacaaccaaaccaacaacaaaaaggtcgattgaattcgctatttttattcatatatactagacttatagtatccttttgtctttctcttttactaatctcagactctcagttacatattaataagaaatttattttattcaaatacaaaaggtaggctgctgataatatcctaccacccattgtgttactctttttgacatcactaaaattaagatatacacattcaagaatcaagagcacgggttgcttccgtggtgtgtttatcttagtttgaacatcgaaataatttatactgcatggaatactttaactcaattaatgaattatagaaagtaaagttctattctagtttgccatattatatctatgcatagattagtactaatatatagcaactaatgtgtatttttttaagatgttttttctttcacgtttttttttatagggaaacacgtttttgtttcacgttggaaacaaaattcattggtaatacaacgggctgatcaaacacaaagatcctctaaatgtagataccggatccaaacttgaacaacatgctattgaagaaactctttcgaaaaatgaccaaaacttgtttttattttattttttgccaaggaaccaaaaatctaggtaaccaaaatgttaatccaaactattttcattttaaatgatatttactcaattaacaacaaaaaaaaaaaaagaagaccaaaaccatattatgctattttacacaatcttaatattactaaaatgctagtagtgaaaaacaagaaagacttagtggttccaaaaaatagcacgcttggcatattctatgagttcattcatccaattcaccaaacaactatcgtaaaccaatctaattactattaggtgtcatgaacttctcgttttggaggcacaacctatcctttttcaaataaataatagacccaaaagctatataccccaccattttctattgcattacatattttggatattttatacaaatatctagactctagagtaattttcaaaatatataatcaatacaggatgtctacaaagggttagtagcgatatatattgcatcaaccaaaaataatagcatagcggtatagtcttttttttttgtatgaatgtaaaattgtattcatcaaaatactgttttacaattgaatgcaacatatatagagagctgatatgttttgatacagagagaaagagggtatactcctataagaaactagagtatttttgttttttttggtcacaactga

SEQ ID NO: 9299 - DNA, 769 bp, Arabidopsis thaliana landsberg
aactactttaaaggcttcaagccaaagaacccagccaaatggaatgagaaagatcgtcggggtggttgtgttagggacacccgtcttaactgataagacaagtttctgaagctttccatgctgaagcttcctagaagcagttcaccaatttcaatcaagggaatggggttcgacccttgccgaggctactgcttgaagaactgcaaatgtcaagcttttgcagttaccagtaggtccgacaactttgagaaagtgaagtttgtagtgtgttcaaaattgtcttcggtaagattctttccaaagctgttgtgggacaatttatgtatctcaatgcaccacttcttgtgaagaagaccacattcatcttctacaatatccacgtctatttgaaattgatgttgtgttcatcacaatcccccatataattgaggagattatgagttggattgatgagattaaacagacttttataaatcctcaagctctcattttgtatataactaggacaacatccgcgttacgtttcatgtatttttttgtttcttttaaatttaatatcatattttgataaattttatttataaattttcaatcattcactcatgcaatcaccaactttttagtatcaaaatacttttgagagtataaacgtttttcaactttttcaacaatgtatcacactcgcacaatcccgaaacaaattttgtcctaaaccaatattataaatggtaatatttggattatataagactcaagtatatttgaagat

SEQ ID NO: 9300 - DNA, 162 bp, Arabidopsis thaliana landsberg
tgaaatagctaagatcttcaaaccgaaccggatcataatagtctaaaaattgttttttcgatatatgatacccagacacagactcatacagactgggacattaccatcaaagctccgagaagccagaagacgctcggttagtgtttcggcgttcccctctca

SEQ ID NO: 9301 - DNA, 601 bp, Arabidopsis thaliana landsberg
cactcaacttactttctaaagttgccggacctactggtaactgcaaaatcttgacatttgccgttcttcaagcagtagtctcgacaagggtcgaaccacattcccttgattgaaattgatgaactgcttctaggaagtttcagcatggaaagcttcaaaaactcgtccgtcttacagttaagacgggtgttcctaacacaaccacctgggcgatctttctcattccatttggctgggttctttggctggaagcctttaaaactactggttataaatcaaaacaaatacaaagaatcaaatgttgtgatttagatgtttcccataaagagggatgatgcttcaaaccatttttggagtggcttacgaagacacaagagtgcaatcgagataagacatcgattacagattagtttatcaatctgttagtatgttgagtaacttatgagaatatgtacccgtcaattctagcatttctctcattccaatccatatgagatatattgtcgcttgaaagcagatgtgaagaagattgtcatgttgttgattacccgtgcttgtgattagtctttgtaatgtttcttcccaatcttgatcatgctac

SEQ ID NO: 9302 - DNA, 432 bp, Arabidopsis thaliana landsberg
tgcgagtgtgatacattgttgaaaattttgaaaaacttttatactctgaaaagtattgggacactaacaaagggggtggttgcatgagtgaatgattgaaaatttataaataaaatttatcaaaatatgataatttaaaagaaacaaaaaatacatgaaacgtaacgcggatgttgtcctacttatatacaaaatgagagcttggagatttataaaggtctatttaatctcatcaatctaactcataatctcctcaattatttgggggattgtgatgaagacaacatcaatttcaaatagacgtggatattgtagaaggtgtattcagacattcatcacaagatgtggtgcattgagatacattaactgtcccacaacagctttggatagattgttaccgaagacctttttgaacacactataaactttaac

SEQ ID NO: 9303 - DNA, 883 bp, Arabidopsis thaliana landsberg
tccctacaccctcaaaagaaattgagactataaaacctcgagcacagttacgatccttatttgactcaaacccatatatatcaaggatacttatagatcttcctgtacgtgagttaccaacttccagtgaaatgtttatttgctcaacaagccagttgaataagctcgcatagatgattttcgccagagaatccctcatatcagttgcctgaatatatagcaaagcaatccgcacactacctttagctatataggaattacaagtgcggtataatattgcagtgcttgtaaaaaagtaaacaaacctgtcgcaatgtcagtcttttagcaatgcaatctctaccagcttggagcttgcatgtagacaaaaccaccataagcttttttgagttgcagcccattaacatagctacattagtgacagctgtaagaaagcaaaataataagcatcacctatattatcatagtagatcacaaccagtctactaattcaaatgattaatgacagacgattaactctaccttcatctgctaccacttcgacatggttttcattgtcaatcacttcaaaagatacatttcctagccataacacagctgcaagcagtgcaaatgtacgttcttggtattcttgaggaatttgaacaatgttgaaagcttcctataacaacagggaaatcttttataaaatatgaaattaaaaaactctagcatatgttccacggaaaacagagggaggcactggaaatacaaaaaagtaccatcagtttgtgaaatttctgagcatcatcagtgcgatcaatggttaagcaattgctctggttcaaataattgtattcacttgctgctttaatcttcaatctctctgcaaacaaaattatat

SEQ ID NO: 9304 - DNA, 486 bp, Arabidopsis thaliana landsberg
acaaacactataacgtcgtgatgtttgcttaccaattggctgttatttcttacagctgtcgccaatgccgttatgtttatgggctgcaacacagaagagcttatggtggttttgtccacccgtaaacttcaagctggtacggattgtattgctaaaaaactgacattgcggcaggtaatgtttaatagtgtcatcgttcttgctacttgttttcatatacatcgatcattaggtgatgtatgagttgctgaaccgttttcacttacaggcaactgacatgagggatggaatagcaaaatttatttatgcaaacctttttgactggcttgttgagcaaataaacattgcattggaagtcggtaaatcacgtacaggaagatctataagcatccttgatatatatgggtttgaatcatttaaggttagtagtacccatatctgctctagatttttactaatctcttttctcattgaatcctgcgatga

SEQ ID NO: 9305 - DNA, 1412 bp, Arabidopsis thaliana landsberg
tgatctgcctgggaaacaacaggttgacacatcagtgtgatccaaacaggcttcgtcgttttctttgacgctttctaatttccttcaggaggaagctttcgagtttccgatttatcaagccactgtgccactgcttcgattcacacgagtttgctcctttgacgccacgtgttgacccttaacacgtcttttggtttaagccttttggatctccaagatgtttgtaattgtttggttcacatccggcagaagtcggctttacgggtggaccgatttaaacctgttagctgtctttgtcgcctcctttgccgccaaatatgctctttgatatcatataataaccaatcttaacagataatgtactcattagaaaaatgtgttgagacatcaagcaacgttgagtcaaaagcatgaacatttcgtgaccaagacttcgtctcttctttatcttttcagattaaaatgtgtgtttgcacgttaaacaatcatgagaatgagctccagcctctagggtttataaagattactttatatacgtatttggaaaacccaagaagaagaagaagaagaagaagcaagactcatggaagagtttcaaggtccagaaccacgcggccaaatgatgagcgagaatcctcgatccttggagctcaatcaacgcaaatggtggatctctgttttcttctgcggtttcttgatccttgccggagactctcttgtcatgcttctgttgaacttcttctacgtccaagataatcgatcagagagtgatcaagaccgacaatacaaagggacatggacacaagctctgatccaaaacgctgcctttccgatcttaattccattcttcttcattctttcttcaccaaaaccaaacccggaaacagtctccaatcaaacaaacaatggctggtttcgagttctctcgctctacgtttctcttggtgttcttgtctctgtttatagcaagttatacgcgctggggaaattatacgtaggatggggaattttgttatcaactcaattgatactcacctccctcttctcagctttcataaaccgtctcaagtttaacagatggatcatcatatcgataatcttcactcttggggctgacttttttggtggccctgcctttgctggaacccctaatgaagatgaaactgatccttacgacatcaaggcatggttgatactcatattccctactcttgctttctccttgtctctgtgcttaatgcagctcggattcgacaaagtgttggtgaagacaaagaggtatggtaacaagaaggtctttcggatggtcttggagatgcaaatctgtgtttccttcatcgccacactcatttgcactgtgggtctgtttgcgagtggtgagtttaaggagttaaaaggcgacagcgagaggt

SEQ ID NO: 9306 - DNA, 1510 bp, Arabidopsis thaliana landsberg
tgatgaaggctgcagatgtacctcacaaccttctggagaagggagacgaagcacctgtccagaagttatgccccatgatgaagggtgagaaaatgcctgcacttgtgcatttaaactatattatgctgcctttttcaatcatatgacactctaactatttgcatacacctgacaaaatatcaggtgccataatctttttgcatttcgcacagttgacaacagtcttttcacaactctaacggaactaaatgattggatcaatcataccgaaagtgaccgttgcatacgtacacaattttcctgacgtacagaatatagattatgaggacgtatattccaagtgtacgtccataaaatcattttattcttgccaagtactaacataacatcatatgttggtgtaccttttgcagcacatggaaatgatcgcactcttgatgtagcacaagaacggggagaatatgaagagaaatcggtatgtcgtggtggaccccagactcccttgggagttgtcaaggcgtgccactgcattcaaaagctgtgttaacccggagactttcaaattggacaaacttttcttacaatttgctaccggggaaagccttaatcgtgaaccaaagctaaggtggatcaatgatgtggacgttatatttgttcccatgaactagaaagatgagaagcattgggttgggttgtctatatacctgcaacgtcgcactattgaaaccatggatcatttggtttctctgacgcgggagtctgtggttaggtcacaaatccttccaattctggagatgctaccatacctcgtgagagcgacatgtaaggattatctcgagaagccctatctcataactccttttacttatataaggaatcaacgtctttcacagaacccaactaccggagattgcagtctgtacgcgatgaattttatagagttgtacatgcttcaaaatccttggaatgacctgattttgattgaagaggctaacatgtacaattaccgtaagggttacgctgtcgacctcaacgagcatggaattgggtccataacctaatattataatgctctgaaaaccaacttattttgtatgcctattggtacttgaatttggtatgggatagattcacttgttcgttttcacaacaatttatttctttttagatgataagcaacattttctttgggaattaacaacgtaaagtcatagtagtgtacgtacatactatgaatctacgtgtctaaactctataactttgatttgacaaccataaatttatattttaattgatcattgaatgtaaccgtaattttcccaataatatctacagccgtggttattaatgggaggaataatttgacctctttggactatctcatttctaacatggtgaactcgactatttccgacgatttactcgcaaagatagctaaaaaaatggcagacaattgctggttggaccttaagccactattacgatcaggcactcgggaagagacatgtgt

SEQ ID NO: 9307 - DNA, 889 bp, Arabidopsis thaliana landsberg
ccaaactatcagagactacataagaatttgtctcgggtgtatatattctccctcaaaatcaaatctaaagtagtaggaagaaaactaaaagaatgaaaaacttaaagacaaataaaaatatatagttactcaatccatctacgagacgattaacttccctatacacgtgagaaatacggactgaccagtcctttccaataaagtcatgacacaagcgtaccaggaggacatcatatgtgaatcatcagtccttgtcttaagaaaaccacctaccaattccgagtccacctccaacattacatgtgacactctatactcctaggcaacaaatagaccatagtatacaccccatagttctgccaaaggagccgaacatctacctatatgaacatcgaaaccatcgcaccatcttcccttgctgtcttgtagaaccccacccgccatggtaggcccagggttgccatgagaagcaccatctgtattcaacttcatccatccaacatgtggaggctcccagcctaccatgttttccacatgagacctcttagagcatggttcttcactcgcagaaatagccaacgatacctctttagccaaatctctgatgaaccatagtctgtctcgatattttttatcttccccaaaaacattaccacatctccacttccatcctcaccagactgtcatagtaaacagtgtagaccatggaatctcatcaatcatccctccctcggttaaattctcatacattcattcttatagggacttagagaagaacgcatgtctcttcctcacagggattaatatattccacactctagctatggtcgggcagtcccgaagaatatgaatgatagactttgttcctcctttatacactttacacaca

SEQ ID NO: 9308 - DNA, 1804 bp, Arabidopsis thaliana landsberg
ctaatgttcaaatcgcgttaaccatgtcccatttcacttggatccaacacgttttgatatggggaagcatcggtatgtggtatctctttgtggctatctacagtatgatgcctccgagttattctggaaacatttacaggattcttgatgagattcttgctcctgcacctatctactggatggctacattgttggtcacagtggctgcagttcttccttacgttgctcacattgcattccagagattcttgaatccattggatcatcatatcatccaagagatcaaatactacggaagagatattgaagatgcgagattgtggacccgagagcgtacaaaagcccgagaaaagacaaagatcggattcacagctagagtcgatgcgaaaatcaggcatttaaggtcgaaactgaacaagaaacagtcaaatctctcacatttttcagctcaagacgcaatgtcacctagatcattgtagccttgtatagtgtttgttgtttttctacaggtccaattctctgatgcatcagacattggagacaggtcttgaagctaattttgttgagagtttataatagagtgagatcatgtaaagagtagcctctgatgttttttctacttgttgggttcgaatttttctttatcttgtacacattatacttaggttttgtgtatacttaggacagaatgcaaaaaaacataacaaagaatcttcctttgtgcctcttctgtgcctctaatcatttaattggtcatttatataaatttgtttatacaaaatctgttaagtgaatcttgactttagaaaaaaagagagaaataactctcaatagcagtgatttgtaaaatgattttcatttcaactagaaataactctcaatttcatttcataagtttccacaaagaaatattatagaaattgttgctttagtaaatggtttcgtatccaccaattggcatttaggtaattaggtaatgaaatctccaacttatttgcgtgtctgttactttctagtttctagtgactttagagatgaagtggttggcgaataaattaacttactttatactaatatattaattttaatttaattaattattctgggccgggttttgcccaatatgggttcagtacggcccaacaactccgcaattattattatttttccatggagaaaataaaaaaagaaaagaataataagagagatttggttaaaatgagagtgtaagcaattctgagtctatcccttcccttttgggatattttcgccgcgtggattgatatgacgactctctttcgccggaagtcaatcggaatccgcgacaacttcttccttcaatccctttgatttttttttggctctacttatcccaaacccttcaaatcttcaggtccaatctcttcttctatttgttttttaattaaaaaaatccggcgaaaggtgaagctcttggattcgagtggtggctagtaatcgatttcggtagtttagaagtagtttataggttttatcagctttcgatttgatggagccgcgagtcggaaacaagtttcggctcggaaggaagatcggcggtggatcattcggagagatctatcttggtatcctctttattctgattcacctctcgtttgtggtctctgtgactgcgatgattatagaagtatttgttttacatgggtttttaggtaccaatatccaaacgatggaggaagggcttataaaccttgtaggtaattcttcctcaaaaagtggaactttatcattttcagggtttaattgaagtccatagaatttagta

SEQ ID NO: 9309 - DNA, 1437 bp, Arabidopsis thaliana landsberg
ttctctcatcgggggattcttgaacacctctctgtgcatttcccgttttactttccatactcggatgtggaaagctgtcaccggacttcatagacaaatttgcacggcagacgggacatgtggaccgagaagagagccattcgtcaatgcaattagcatggaaagtatggctacaaggaggcatccaacgtagcgactcttcgtcttcaaactcgcatagacaaattgcacattcaactccgccgttgcctatcttgaacgctttaacctctgaatataggaaagccggaaaggactcgatgacgtccttgtcaatcccacgcctcactctactgtgtaacatttcatgacctcctgtctcattctcttcaatacaacatccatagtttaagcaataaacgaccaaaagtaagaggaacaacgaaagcaaaacgatcccaattatcgatgactctttactttttccattgcgacctgctgattccgacccttgctggcaagttacgtaaggcaaacattggaaaaggaagagtggcaataaaacacatgctaggatccgatggctgaaatctcttgtgaagatagtcatgatattaacggttcttctgctatataatggtcgatcacttgagctccatgtctccgtttagcgcaagcgagatagagaagaagacgaagtcgttcaacataaaatacaaatctgatttgtagaacaataagatctgcccgcacgacaacaaatattgtattcttaatatgttagatatattttggtccgaatgattagtttggccttttccaacaacgttttgacttttaaaaagttttaaaagtacaagtacaagtacaattctcacacatgtcctctatattaacttgttgactacgcaactagactttatccagacagttttgacctattcctcctacttgtagacaactgaaaaaactgtcgaaaaagtctcggaaacattgaattagggtgtaatatcattttgaggaaaacaaaaaaggatgatcatgcaaagtcaaaaactcaaaggtgagaaatcaaaggctaccatttctctaaattaccagaaggagcttcacatgttatattaagtaaaaaacttttgtcgggagaatcaaattttacaaagacattagttacattctttatactttttttgcaggtagcatccccgagaaactgtacaagatattcgaatgatgctaattgaaaccgctgattgaagatggaacttttgatatgagtaggctcattaatctaactatgtttacacactttgaatgaaataactggaactagttaatggttaaccaaaccgtggcacgcgtgactgaccaacaccattgtgacttatcttcttcaatataagggacacaacagtatatagattagaccttctcctctggcataaggcgttcaaatga

SEQ ID NO: 9310 - DNA, 595 bp, Arabidopsis thaliana landsberg
ggttccactcctactcgaagcctaagcaacatttccaaaaactcaaaatcattcactaggaagcattaaacgatactttaaatttaaagagataagagagattacttggtaggctaagaaatcacacttattcatcttgaggctccagtaatgtgccaatgcacaatgtgcacttccacaaacagggtcctgaaaaaggcgacacattttaggcagaagaaatcatattctttggtggtttgttcaatcctaagagcaaagactataatgtaagttgcagctactcttttacctcatcaactccgaacttaggagcaaagtaccgactgtaaaaatcataggcagatcctgtagaaccagcagctgtcacaattatgccatcacaggggcatttcaatatatcatccattcttggttgcaattcagtgacagactccttagatggaagcacaacctacaagcaagtgcataaaagagtaaatcaaaagtcatacaaagattaggttaacgtatgagcacacatgaatacactgcgtgaacaaagtatcaaacttacgaggatgttgtttgtgcagtagcttttatatcaacaatg

SEQ ID NO: 9311 - DNA, 1577 bp, Arabidopsis thaliana landsberg
ccgtctctttcatgttccttagggtctctttcatgttcctttggaagctatggttagttaagttatataactgatttgctgtggtatgaaaacgagcttctctatttgtggtacaggtgatcccatggggtgatctagactcactcgccatgcttcagagacaactcggcgtcgacattctcgtaacaggccatacccaccagttcacagcctacaaacacgagggaggagtggtgataaaccctggctcagcaaccggagcttacagcagcataaaccaagacgttaacccaagctttgtccttatggacatcgatggtttccgagctgtagtctatgtctatgagctaattgatggagaagttaaagtcgacaagattgagttcaagaagccccctactaccagctctggtccttagttccttaaaaaaacctgaaaccgttttatgttttcgtcctaaacatttagaactttcttgtgaaaaataatcttgttaacaatcttcgaatcgaaccattgagaatgaacaacttttaacaaattattttgctgcaaaagtcgaatattgttattggcatttgcaattctgcattacaacgacgttggcgagtattcggaaaaattaaaccctaaaaagccgacccgacccgattagtgagcagtgaatctgaagagcataacatgcaaataactctcgccggggttaacaatctgcgacggaaagttcttgagattgacggaaatctgggaaagcctgaggtctccaaacacaagccaccttatttctcataaacggctttacctttaccgacgacacgtttcatcatattaatcgtgtaaaactgaacaccaggctgattcgtccacagctccatcttccttccggtgacttcctccgtcacaaccgcagttttcctcagatgtttcccgatcggtccatcgatcacgtaattgatgtcgtaacctccgggtaattcgtggatccggcttccgatctcgcgaggctcgagaaaatcgtaaggagttccggcaatggaggtgatttcgccggtggggatgagtttgtcgtcgacgggagtgatttttccggcgaggagttgaattttgtgggagaggatgttcccggagttgtggctgtggaggttccagtaagtgtggagagctaagttgattggtgtaggtttgttgagtggctttgcttccatttttacaccgagtttgttttctccgatcaacatgtacgtcactttcaccgtcacattccccggaaaacctgtcaaacataataaattattattttatttttttcacataataaaaatcatcttcattatttttttaatcatcttaaatttttttgctttaaatagatgatgtagttaatacggacttaatccgtcagcaatccaatccatattatttttagggcagactataaaccgttgtggatttagtttaaaaacggtccacagttagtctacaacggttttcttttatttttttgagtttgtaccgttacggactataatttgtgaatgataaataaaaagtgatccggtttatcaaacggttttgt

SEQ ID NO: 9312 - DNA, 1825 bp, Arabidopsis thaliana landsberg
  unsure (1)..(1825): unsure at all n locations
tttaaccatttgataatctgtgcattttgctccattaaagagcctcacccagggtccttccatgaaagctgcaaagataccgcctttctttggtacttttctcaaaagcttgtcggaatcttacgcgctatcaaagggtatgagnnnnnnnnnnnnnnnnnnnnnnnntttaagtcttccaaagatgaatgatgtccttggatatcccacattttatcctttttcgagcaaacttctcatgctggttaccgatggatcaagttgtcgtgatggcaaaagggacgccatgctggctgtgttactctgagtcaacgcgagcacaataaagtaccatgtgataaccagaagcctagctccaaagctgaacactctttctcctgcaagttgcatattaatagagtaagcattaaggaaagaagtatttttttaacactcactatatgttgagatatggaaagggaatttacttggagcaaaaaccatggtagaaaaggcaaaccagaagattgtactaacttggtacttagctggtccgcgaaagtccggattaatcctatgttcaataacccaaacagtaaaaccaatgaggaagaagaagaaaaaggaagtcatccaaagtttccatgttaagggcttcaagaaactgatactgtctcttgccacttggtcttctacggggacaatcaatcccacaccagatttagtaaatggaaatgtgaagtcgacataagaggacctatttgccaatatagtcgtatctcccacaaccgcgtcataattctgcgatagagacaaaaaaatgtaaaaggagattcaattagggacctcactaggataatctctctaaatgggagtgtgttgggaatgcatggatggtctaactcaccccaaggtaaacttggtagattagatcgttgtgatttccggctggtttaccgtccgatgtttcaaaaggaatgaactcataagagacgtcataaggcattgcttgaattacaacctcaaaaaaatctatgcaaaaacctttgactaccgttgaattggtgataggatcccttgtgaccttcacgagatcagtgaaattgattctcttgggaactccaatgcgcaacttctttccattagtcgggatctcccatccttttggaacagaactggcctctccaggccatattatatgtttaagatgatcttgccaagtggataaagtacctatgcttcgaggttctttgtcaagtttcttcacaagaccatttccctccgtccagaatcctattgacctttctccagttccgatcatattgacaatctcaaacaccgatggttgcagttgcttgctgacaaaatggaagtctcctgcaagtcctttgaactgaactgttgagagcgcctggagaagctttggaccgaattgtgataaaccaagaccatcaagttcagaaacattcctccccgtatccacattactgaaagtcatattatttattccagcttcttcaatggccatggccaatgcggtggtagcatcataagcccacaatccatagacattcagctccatatgtgggaatctcctcttccaacgtgatctaaatttttctagatctttggattttctaatataagttttaatacccaataccccttccatagcctcaatacccgtttcatttatcgaccgtaagccatcgataactccattggtaaggatccagacatatcctggattcatcaaacctagctcctttgctttaatgaagacccttgaggctagagaagaggacatgtggacaatgaacactcttgtgggcatgttcatcatctt

SEQ ID NO: 9313 - DNA, 531 bp, Arabidopsis thaliana landsberg
  unsure (1)..(531): unsure at all n locations
cgaaaagcaggagaaccattggtgatagaagagatccaagttgatccacctcaagcttacgaagtcagaatcaaaattttatgcacttctctatgtcacacggatgttactttctggaaactagacagtgtaagtttacattatatcgcaaaaagtcaacgcataaatctatagttcaaaaaactcgatttcacgaacatttttattcttccagggaccgcttgcaagatttcctaggattctaggtcatgaagcagtcgggtgaatcttcatttacttctttaattttcattcttgatcttcaagaatttgtctaatttttttattttcttgtctaacttgatattgtaatcaagtgtggtcgagagtattggagaaaaggtagacggatttaaacaaggcngacgtcgtttgccagtgtttcatcctcaatgtgaagaatgcanagagggcatatctcccaagagcaactggtgcacaaaatatacaaacgattatttatcaaacacacgacgatatggaatgacttca

SEQ ID NO: 9314 - DNA, 1888 bp, Arabidopsis thaliana landsberg
atggcaatatgtttgcatcttttcgtcagtttcatcgtcatttcgtagttatcaaagtcgccagtcaccgtaagtttcccttcttccatcacgtttagtgaagtaaccccttacgagaaaaaatggtacgaatggctttaaaagttcagcctaaatgaaactacttataggtaatattaaatcaggttttcccaaattaattggtttatttgggctttgtataaccattgagatgtgttagtacctgcaaatctacatacagttttcatagctttctttttcattcttacatcgacttccaacctaaatacaacgttagtgttttgctgcagatcaacatgtaaataaaagtgaagctttgtgtagatcagttcactatatagaaaataattgattgaatttcatttctggagggcttcctaccgtagagtttttttttttttttttttttggccaagtataattataactgaaaaaatgtatatttcttctagaaattaattatatataaaaaaagaaacgaacctgcattttcagaaaatgaaaaagtttgtagagtgaagagagatgatgtaaaggaacgtgaatgttttatggttgcctgccccaaatatactctcatgtgtgtatttatacacatccgattttttattatctttagctagcgaatataaaaacgattcagacaacccgaataaaagaagaaaaaatattcacaatttcgttgaagctagaaaataatatattcagtttgatgtaattatttcaagattcaagacttttaaatactattagagtctttataatagatttatatatttttgtctttaatttgtcaaatatccaaatattgtcaagccgaaaagtatagaagaaaaaagccgacagtttcgtagaaagctataggaaatgatataatcgttgagccgggaatggttgaggaaccacaaactaaaaaggtccataaattcgtcgtaatttccatgcaaaaactgagtactactaacataagcgatattgtcaaccttgtatgcatgggccaacttgcggaatcgccttttaacgcaaaaaaaaaaattgaaattatttttttagcttcattatcttttaaggttttttatcattgtgtactaaaacaatataatttaggatgaaaaatatcaagattgacacacacacgaaacaaaaaaaaaaaagcagaatggcgatataggtaaataaacaccacacaacaaacaagtttttaaatcatagaaatgagatatgaaatatcacaggatgatacactcatccgagtttttgcctggagtttttttctgaggagggtaaggtcgccccctaatcacttttggttcaggtttcttaaccggattgcgattttgagccggttgtccctccggtccaaccgcggttatgtcaacataatcacatatcttcttcagtttcttcgtcattataaacttatcaaattgtcccgtcacttttagtttacctttttccttcacgtctatcacagtaactcctaacaacaagaaacattattgattaattatttttagccttaataagaaaaaataaattattatgacttcttgccattatcggtttatttggttaaagttaaacgtaggaattgaattgtgttgatgtacctggaaactcacatacaactttcatagctttctctttggttcttacgtcaaaactttcccactcgaatacaaccgtcttctgtaaacatgattttaaatatatttgaagctttatacgtaggtgtaagtgtaaacaaaaatcatttattactatgatgatatattaattatgttaattttagcctaatttactgttttgtttaaattttttttaaaaccttttccaaattcaaaat

SEQ ID NO: 9315 - DNA, 1590 bp, Arabidopsis thaliana landsberg
catgatcttagtctaggaaggctaaacataaaaccaaagccaagaaatggactaacaaacggactggttagtctgaaacccaaaaccaaaacagaatggattttgtgctgtgtggggtgaagcataaatgtataaatggacaatatcatcattaaagtttgggcttatacgggccttatttctaataggaaatagactgatggaacattgaatatgcctaccctggatatgtagaacttgcatggctctcggattggatacgtagaacattacacttatgaaggaaaaaagattggattcttttttttttctggtcggcaaccaattaagagaaacactgttatgtttgtaaacaagtgtgtgtttcgctaaattccattgtgtgcttttccggtttaaatgacatctgtatttacctcgtgggcaatgacacatctatctatatttagctccaaaacattgctgcagcaaatttccaaaatagaccgactagattttaatataatattggtaatttttatcagttggtaagatatttaattcttcgtgaaaagatactcgtatatctctctttctgtttaaatggttgatatagtcaaaagaaaaaccttcaaagagggtttgttaaaaccatattccctatcactcttgtcagaatacccttcacagatggttttgttaatctttttgataaaaccaagttccagaatatgcaagccttttatcaaaaagcaaaagaaagtttctaaatatgccaacaagattgtgtaatttttcactatacaaggcagtcaatacttgtgtacaagtttatattgtaaaatgttttttggttagtatatagtaagaagaattcgaatcgaactctaaagtttaatattacatgaagaattcgtaaataaattaaacaatataaaacactataaaaatattttagtcggtggcttgccttcatttatatgtacgtagattcgttcgatatgctttaaaacaagtgaatacgaaaattctaaagtaagacacgaaaatacacgtcgataaaagacaaacccattagaaaaacaaaacagaaaatggaaagttctaagcaaaaacgatgtcgctctagcgtagtcgagaccattgaagcaccattaccactagtgtggtccatcctacgtagtttcgacaaaccacaagcttatcaacgtttcgtcaaaagttgcaccatgcgctctggcggcggcggcggcaaaggaggagaaggaaaaggctccgtccgggacgtgacgttagtctccggcttcccggcggatttcagcacggagaggctcgaagagctagatgatgagtctcacgtgatggtggtaagtattattggcggtaaccataggcttgttaattacaaatcgaaaacgaatgtggtcgcgtcgccggaggatatggcaaagaagacggtggtggtggagagttacgtggtggatgtgccggaaggaactagcgaggaagatacaatattttttgttgataacattattcggtataaccttacttcacttgctaagctcacaaagaaaatgatgaagtaagctctatatgtttaagctaatc

SEQ ID NO: 9316 - DNA, 512 bp, Arabidopsis thaliana landsberg
ttttacacacgtgctgtggaaatggtagtagcgacggagggaagacggtgatggagatgcttcttgcgttaaagagccttcttcctccaccggtgaatgtcggtggtggagagacggaggagctgtttcaagagacggcggagtatatcgtgaagcttagaacacaagtcgtggtgttgaagaaactgattgagatttacgataactcttctgatcagaagaaagatgttgttttataatgttcatttatattttctttaatttaaattatttcaggtttttctgtttttttttgttataaacttataattattatattgtgatccgtaattgttttaggttgtcgatgtctttaatgtattggctaaaaggaaaaagtattgatgattgataactttcttttctttgttctagtcacacacgtagtccaggtgttctgcagtagtattaataagtttattttttttgggtaatcttcttgcattcttttgttttaatgggaccattaatta

SEQ ID NO: 9317 - DNA, 602 bp, Arabidopsis thaliana landsberg
cgatagacttttaaatgttgagcatgtttcattaacaggataacaaagaaccctaaatttgcggaggtgaaaaggacagggtacaactagtgattgtctttctcatgacagcttctcttagatatcgtggaagatccattgcctatcattcaaaagctatgagccaaccaagaacctatttgtagatttctaccacatcaaaatgacttacgtacttttattttagtctttaaactattacaaaagtttgagagcaacagaaacttttttaaaaatgaaataagagcgtaacatactaactaacttactagtaattaagttactaacaaatactctatatatttaatattatacttacttatgtcccatcgaccatgactattgctagttgaacctgattataattcttaaaaactaaaactataatctaaaaattacaactttagatgagccaccctctccgagagcttagccaatgacttaagattaaacccaacgattgtatcagcaaaagacgtcgtttcctcctcactatttccttccggcacatccaccacataactctccaccaccaccgtcttctcctccgcatccgccgccac

SEQ ID NO: 9318 - DNA, 979 bp, Arabidopsis thaliana landsberg
tattacggatactgtatggtaaatagtaataatataatgatcaaaatatctttgcctttatatattaaaacgtggtcaaatgtgacgttaatatttaattgtactaaaacgttgccaatcatcttctacaagctacctcgctcctaaatctgtaattttcttaagagaatcaattattaattctagctctccacactttgtaacaaatgcatgcatctaaatgaaaaattgcatgagatcaattgatttcaagctctccacactttcacatgcaaaaagacatacatgctgttgtggcgctccactcggatgaaattaaatatgtgagatttcgtaattatacaaaacatgcaagagggtcagccttctatttataagtttttttttgttcataatttttgttctactcaatcagcatactaaaaaactatacagactaaacttaacaatgagcatactaaaaattaaaataaaaaactatgcaaactgcaaagtacgtagtcttttcagcctttacgtcctagctagctagtcatctaaacaaccatccccttggtctgtttataacgtctctgttttcattaaccgtttcgattgttccagacttccagttatcttaggaacgattccctcgggctattttaaccttttctgtttcatccatagataatccattagatatcaaacgggtggcaactgaggtaaaccggtgccagagttgtatttctccgaatagatgatcgtgacctcacggaaatttttgtaaacgatggtgaagagccagagaaaccagagaacaagaaggaccatagcgaacgcggcagaaaccacgtagatgagcactagagcggctagaccaccgaaaagatggctcgcgtgtccaacaagcctcgggactaaccctggttgtaggcgcacgtatctggcttcgcggacacgaagaacggcgtagaacagaacgaggacacaaaaagtgagg

SEQ ID NO: 9319 - DNA, 1325 bp, Arabidopsis thaliana landsberg
gtgaaaagcaaaagcctgcaaacaatctctgagtatgtttcatcttcactttgattgttgtcataatcaaacttgagtataggtaccagctccagagagacctccatggtttagacaaaacactagtggtaacaacatcttttactggaagcatagacaatatctgcagaagcagaacttcaggcaagtcactgatcctgtcttcattcacaccatttccatttctcaaactttcaaatacccaaaagaaaaaaacatgaatcaattggtctggaactaacaatttaagagaaccctagaacagttgataggattcagagagataacaattgttcataaaaacataccatcgtttcattttcgttgatagagacgcaaacgccgtttcaactccaacgcattagagaaagaatcaactcaaatcggagtttcgaccactaagagaatttacagcgtaagttagggtttcagaggaggcggagctgagtgagtcattttctacaattacctttttactcgggccggatgagatatttatttaccgatacaaaccggatgaaaaccaaaacatccctcaatttcgattttgcttaatttcggttttaatgtaccggaaaattattcaaaatccaaacaacaatctcttcacaaaaaaacgccttagcttaaaatttggttacgaacattaaactctcaactaagtcggaaaatttgactggtctttcctaatcagttaaaataacagaacactaaagataacaaaagattctcacaaacatataagtttcatatgaacacaagctgacatgaatttgaagccctgaccacgcttttgagctcaccaaccatctcaactctcttgtccggattaatttcaattatggagaaagttgcctttttcaaacgcctagcgttccttaggatatatttcgccagctctatctcattttctagtttcccttcataacatgtccacacaaatgtttcgaggtggagcaacaaacattcaggaacattcttcggttcattccatttctcccaaggcctctgttcctgagactaacgaggaggaaacacaaaataaatcacataaattagatcattaaaccgcaaaactgagctggaaacattgttgaaagatgaacttactgtcatgaaatcgaagatcttgaggacttgtaaattaggagaagtgtcgagcatgagcgtaagcagattccaccacttaggtttatatgtggatagctccaaatatgtcaagtgataaaaggtattactgataggaggaagtgaaaaaatctatacatgaaaggcaatttagtaga

SEQ ID NO: 9320 - DNA, 1401 bp, Arabidopsis thaliana landsberg
cagtctttttcacatcatcaccctttgagatgcttttgcactggcttgcagaccaagcttttgaccttcaatatctctcagtttctgaaataaatagctgtcagttgatatggtcaaccacctaaagatgataagaccaacaaagtacatggttgtgtatacctgtcgaggagcttccagtttctttcgaagatcttcagaacaaaggtcatatatatccaactccaacggataatccactttcttcaaatatcaacaagatggagactatcataacaatgttgtgcatctaagttctctttaaaatacaaaacaaaatgctaccatacccggagaatttttgctttctgattactctcccgtttccagaagaatctcacaaactgaacagtcaagtaccttcaagataagcaagaaaagttaaaaaaacttaaaaagtatcattaaatcattaacatgttggttagaaagcctgtaacaagaggattgcaaggaaccaaggactgtagtacagggcacaaattataaacagagactaatcaccttggcaatgaatctataagagactcctttacgtaaaccgctgtacgacccagagaaggagatgttttttcaagttctcctttcagtccctacagcaagccagaagaattgtaactctttatataaattgtctgagatatagcgctacatgaaacatctaacaaagttggccataagtttctaatttctatgcatgcactattcagagacaaatatcaaacatttataacatacaattacaaggttgtatgataaattaaaaaccaagatgatgcaccataagtatgggacttctttttctcaaggagaaaaaatatatgtctgagtaagaacttaggaggatcttccacataatcatgttatatctcacaataaaccgaaacaaaatcttcagtggattgatatagttactcacatgttttaatccttcatgcaagtggttcacctcatgtgatatgtgacatttcagagaaaagacagattctgtctctgagctttcttcgctactttcttggcaatgcaaccttcagcaatagaaatggattggagacacaaaatcaaaaatgaaagatctaaaaaaaaaatagcatacaagagggcatttgtatgaaatttgtgttgtgacctgtttagaaggttgagaccaaaaagagccttcacagcatcaggatcttcactaggcgatggcagttttagggactgggaaagagtgtacaacatttgtgtccaacattcttcagcatcctgttacacatttaaaaggtttctggattcaaaaactggaaggttaaaaccataatgccactgagttggcagaaagcaacatacctgttgcatgtgatttccgttatgcaactg

SEQ ID NO: 9321 - DNA, 1420 bp, Arabidopsis thaliana landsberg
aaaaaaggtgagtgaaaaagctttggaagagaaacaagaaactagtaatgttttctgctacaaacatataacttttacaagattagctagaatccaataactatgagatggtagattggtatgttttttgctgaggctttcaaaactaaaatgaaagatctacataacaatacatgcataaaggacggtttaattcaaatatagacagatggttaatggttacgagttcccaaacatcaacatttttactccaaggtaacgctcttaacagctcatttgattctaaggaaaccatttgatcatgagatagggaaacaaaagaaaataagaatacctccttcctcattaaggtctgaagtccacaaggtgagattgtctctaagtagctgcataataagagtgctgtctttgtatgattcctcgttgaggctgtcaagttcagcaattgcatcatcgaatgcttgcttagccaattggcatgcgctgtacaatacatagtttcatagtgtcagaaaatgaccacagattccactattatgttcaatccaaaatacaaaaacaaacctttcgggagagttcaagatctcatagtagaaaactgaaaagttcaacgccaagccaagtctaactggatgtgtgggtgccaaaccattctctgcagcagcaacagcagcctacattcccagtacgaaaaaagcaagacttgtcttaggttattcccagctcaaatataagaggggtggcacaaaaataagaaaacaaataaacatgatcaaaggaccttatatgcttcaagagactgatctgcagcttccttgcgttcagcaccagaactgaactccgcaagatagcgatagtaatctcctttcctacatagaaagaaaaaaaaacacgaaaagtcaaaacagtgaaacaaggaaaagttcatgaatcatcatcatttcaggaagaacacaagcaagagtggtagctatgtaatagcttaaacatttaactttagtcaaacggaaatgatctcattcttagtcacacaaatatcacatgaatggtcagagtataataaagatgacactcacattttgtagaaaaagacagttgactccacagcgttagacgatggaatgagatgcttatcaatgacagacaagatgtcattacaaactttagcaagctcatcttcaactctcttacgataattcttaagcctcttgacattttcatcatttcccttggactcttccttctgctcaatggaagatagtattctccatgatgctctccttgcaccaatcacattcttgtaccctacagatacaagattcctctcttccacagttagctccccatcaagctgagcaactttcttcatagcctaaaccatttctgcatcatcaccaacaaaaaaaaaaaatccgatcgt

SEQ ID NO: 9322 - DNA, 1143 bp, Arabidopsis thaliana landsberg
aatgctgcacccggttttcagaaagcgtactcgtttaacggaagtatcatcgcggtcaacgggaagaacacaactgttttaatggaagggctccctggactgaactatctccttgcagagaaagacggaaaaaacccgagtgaagactttcggatacccgggaaacagcagtcggttatctccttcaccaagaaactgactcctggaatcaaagttggttccaaagatgggtttcccaccaaagtactcttcaacggccaggaatgttcactcccttctgtactacccacgagcaacagtcacaggaaacatgtatccacctttcttctcatcctgacaccatttttggctctactgtttcttcggatttaaaagttccagtgaaggactttcctcattagccagaaaatatacagttttcttgattctttctaaccagatttgatgcagaattacttctactactagtggtgctttgtgcaccgtgtgattcttgaatttcgtatgatcagattttagtaatcagtatgtatacatacaaatattgaacagacaaatccctttgtgttttgatcttgaattgctttgatttcacgttgtggcgttgtactaaattaagtttgttaagcatttactcgaaatacatacttacaaaaccctaaacagcctcactacataaatgaggaacaaaagaatctccaaggatattaacccctaacatgaataattatttcttatataatctgccatttaaaatttcatgcagactacatatatatcaaacaagttttagtagatcgtcgtgtaaaaatgatacagtacagatccgggtagtccctccggtttatcggtttttttatccaatcaaaccggaatgttatcgatggagtatgcgtcaaagtcgaattcgccatcaaccggtgcaatcccttcctgtatatcaataattcaagattgtgtttttcaacttttttggttcactgattttttttgttatttagttgtaatttgcattattatgaaaaagacatgcgaccaatggtgagaaagcgtctgagagttgttatatatttgattttgaacgcaaacatgtacgttgacggatcagattatgcttctatataagtttgacaaaaaaaaaaa

SEQ ID NO: 9323 - DNA, 575 bp, Arabidopsis thaliana landsberg
  unsure (1)..(575): unsure at all n locations
aaagcacaaagattgtttgtttcaatgttcttgagggttacaaaaagtgtagaaacaaaactttgggttgtattgttttgtaagcatatttctcaattcatttatgttttcttctcatggacctaaaacgtgaaagccgcccctcaattttacttatactgatgatataaatcaaatttaccttctcacaagttcatatttttgtgaatatattatatttgattttttcttatatccattatgacacatccaacatgatgcaagtggactactaccggaggacttagatagctaagattggttagaagctactggtgactttcgaaaaataaaaaatctttgagatgaagacattggaaaagatacttcgtgagaaagaaatgtgaagaaagttgataaaacaaacaaaacagaatcatagaaaaaaacagaggaatttaaagggagagacaaagactgcaaacagatttataactgaaataatggaggaagataaggcggttttgtcagaagatcacatgtcttctttaaccactnnntttcctttttcgtnttnttttctttttcttactaat

SEQ ID NO: 9324 - DNA, 1754 bp, Arabidopsis thaliana landsberg
  unsure (1)..(1754): unsure at all n locations
catttacggtaatggacgtactcattcaggaagagaagagagatataatctctggtttgatcctacttaagattttcatcaatacagtatcctctggtctgattctcacatcatgtaagtaaaaaaaaaagtaccaattctctcttaatctttgtttgtttggttcaatttaaaggaggttaggctattgaccccatttgatttaaaagctttatggattcaataatatgatcttctatttaaggaaacccaagtggggttttaatgatgggacgatctttttgttgaaaaaatatgattcaattttctttggtggatattaattcttattacttcttgtggaaagttttgtgatgcttgggacattatttgcttttggttgtaatgttcctgtcaattttaagtgtgtgtgtgatcgcctaaaatggtttacagctttcgttttttggcatcaacaatgaccccatagagagtatgtttggggtccaattcacaagttgagaatctttacttaagttcacaaaagctacaaatttttatgccaataatgttatctttctaagcttacagaatctaacttacttaatccaaataaatgttttttttggttataattatgtagtttgtactaaactactgatcaaagttgtgaaattgttgttctttttggttatgcagattctttgtagacaatgttcctattagagaggtcaaacgtactgcggaaatgggtggtcactttccatcaaagccgatgtctctctacacaacaatatgggacggttctaaatgggcaactaacggtggaaagtacggtgtaaactacaaatatgcgccttacattgcgcggttctcggatctagtcctgcacggctgccccgtggaccctatcgagcagtttccgaggtgcgatgaaggcgcggctgaggatattcgtgcggcgcaagagattacaccttcacaaaggagtaaaatggatgttttcagacggagactcatgacatactcatattgctatgatcgggcaaggtacaatgttgctttatcggagtgtgtggtgaatcccgctgaggctcaaaggcttagggtttatgatccggtcagatttggcggcattccaaggcgccaccgcaatggaaagcaccggagcaagagaagccgggttgatggaaccgagtcgatatgataacatatataggcaaaatagtatgggtgagatttgggggttctataataagtccattattttggttatttatgattcaatgcattttcacatatagaggaggcatttttgtcatttgttagttgtatatcattataagaaaagaaaaaataattaatttatttatttgtgatatttttttttatatatgataaattgtttcttgtttttgtgaatactttacagttgtttacgaatattatcggtgtaaataatttcagatatcttggaatttatatttgtattcaattttgggtactttatgtgacgagagttttgtctcgcttgtacttgttttattcaatgggtccgacgaatattgttttaattttgtgtggtcatgttcatgcacatatgtagtattattattacatacaacanaatttttatgtgatcacacatggtacctttcgcattcgaacaaaatttgagcttgagtaaacaattcatttttgtcaacaaaaataatgtttgtttcgtattaacaaacgcattaactataaggaaatatcaaaagaaaagtttggag

SEQ ID NO: 9325 - DNA, 1372 bp, Arabidopsis thaliana landsberg
tagtggaacaaaatgagttcaatatcatcatcttcatcttccccaatcatttgactcacaaattctctttccactacttcgtcaaagttccaagatgccaaactcaacgacggaggactccgtcgccgttccactactcccctccctccgccgcgctactaactctacttctcaagtagcaatcgtcggtgccaacgtctgtccaatagaaagtctcgattacgagtacgaaaactctcaccgttgcttctccttccttcaatcatattcttcttaacttcaatttcgttgtttacgctttcgattcagaatcgcggagaatgatttcttcaagcaggattggagaggtcgtagtaaggtagagattttccaatacgtgtttatgaagtggctgctttgtttttgtatcggcattattgttagtctcattggattcgctaataatctcgccgttgagaatctcgccggtgttaagttcgttgttacttctaacatgatgattaccggaaggtgagtctttcgcattttccgattttcttgattgtaatgttgatgattggattttgaatagagtgttgatattgtttctcaggtttgctatgggttttgttgttttctctgttacaaatttgattcttactctctttgcgtcggtgattaccgcttttgttgctcctgctgcggcaggttccggtataccggaagttaaggcttatttgaatggtgttgatgctccagagatattctcacttcgcactttgatcattaaggtaacgattttcgaggatttaggagcgatagagctcggaaattacgcaagtttatgttagaaatttgtatttgatttctctttgattggggtacagatcattgggaacatatctgcagtatcagcgtctcttctcattggaaaggcagggcctatggtgcatactggtgcttgtgttgcatctatacttggtcagggtggctccaaaagatatagactgacctggagatggctcaggtttttcaaaaatgatagagacagaagagatcttgtaacttgtggggcagctgctggtatcgctgcttcgtttcgtgctccggttggtggtgtcctgttcgcgcttgaggagatgtcatcttggtacgtttagttgtgtcaagttattctcacgttcattaggctatttggtcattttgtgaatgattcgttaatctagtctgaggggtttttctttgtaggtggaggagtgcacttttatggagaatcttcttttcaacagctgttgtggcaatagttctcagagctctaatcgatgtctgtttaagtggaaagtgtgggttgtttggtaaaggaggcttaataatgtctgatgtctattcagaa

SEQ ID NO: 9326 - DNA, 1314 bp, Arabidopsis thaliana landsberg
atttgtaaaagagattagaggtgactgaacgtggatgaaaacgtttctactaaaagtacagaatgtttggctttagtggttgatttcttttttttttccttgatgcaggttgtggtatttgtggatatctcttttgagaaagcgacagagattgatgattattgtcacagtcatcagcctcctattgcattcatcaaggctgatgttagggggctgtttgggtctttgttttgtgattttggacctcattttactgttcttgatgttgatggggaggaacctcactctggcatcatcgtttctgttagcaatgaaaatcctggatttgtttcgtgtgtcgatgatgagaggctcgagtttgaagatggaaatttggttgttttctctgaagttgagggaatgacaaagctaaatgatggaaaaccaaggaagataaaaaatgtcaagccattttcatttaccctggaggaagacacctctagctatgggcaatatatgaagggtggcattgtgactcaggttaaacaaccaaaggtgttgaactttaaacctcttagagaagcacttaaagatccaggcgactttcttctaagtgacttttcaaagtttgaccgaccacctcttctccacttagcattccaagcacttgataggttttcgtctcaagcaggccgatttccgtttgctggttcagaagaagatgctcagaaactagtggaaattgcagttgacattaatgagggtttgggtgatgcaaggttggaagatgtcaactctaaactgttgcggcatttggcctttggatccagggctgttctgaatcctatggctgcaatgtttggtggcattgttgggcaggaggttgtcaaggcatgctctgggaaattccatcctatctttcaggtaaagacttttctgtttggtttttcaggggctcatctgttcggtctttgtatgttaaacttctacttgttgagcaatgctgttcatctatgttatacaggcatttactctacatgagtcctataccaggactaaagtttctcttcccttgttagtagtatttcttttatacttggtaatgtggtaattagtttgcattatttgtgcagttcttttactttgattcggtggagtcactccccaaggaacctcttgatgcatcagagtttagaccacaaaatagccgttacgatgcacagatctctgtatttgggtctactcttcagaagaaactcgaggatgccagagtttttgttgtagagggctggtgctcttggatgcgagttcttcaagaacttggctttgatgggt

SEQ ID NO: 9327 - DNA, 1455 bp, Arabidopsis thaliana landsberg
atcagccgaccagaactgcaatctttggtatgaataaataaaatgcttaaattttcactgtggcatttgtttgcaatgattcatgaacatttgtgcttgtatcaggtagggaatttaatcggagtatatcctgacctcatggattcctttatagagtttttggtgcaatgtgaaaagaatggtaacgaggcaaatctatgtttctctcttcctacattcattgatttcagaaaaaagacagatttgtaaccttttgaatcttcttgcagaaggactgctctctggtattctgactaagagtaagtctacttatcttttgcaagggtacatgaatctgatgctgagatatatttgaagtattcacgagtagtgaaactacacaactccactatgaaatttgatcttctttccagatatatccatttctagttctgaaaagaaaacaaatccattctaaactatactgcagaatccttgtggagtgaaggcaaatatcctcaaccgtcactggacaatgatagagaccaggaacataagagagatgacgggcttagagatagagatcatgaaaaggaaaggcttgaaaaagcagctgcaaatctgaaatgggcaaagccaatcagtgaactacatctctcgaactgtgaacaatgcactcctagttatcggttacttccaaagaatgtatgtggctgcagccttttatatgtggatctactattcttgagttcatcttttgtttcattagtctaatgtaagacattatactttttgcagtacccaatttcttttgcaagccagaagacagagatcggtaaactggttcttaatgatcactgggtctccgtcacatcaggaagtgaagattattcatttagccacatgcgtaagaaccagtatgaagagagcctcttcaaatgtgaggatgacaggttggttaatcaacttctaatggtggactggaaacctatattccatactttaaaaaaaaaaattggttactgacctgttattgtgagccattttctgtgtcaaattgtgagccattattcctctctttatgctataggtttgagctggacatgctattagagtctgtaaattcaacgacaaagcatgtggaagaattattgacaaaaattaacagtaatgaactgaaaaccaacagtcccatccgtgtcgaggatcacctcacaggtaacataagctggtgtaaaacaataagcagcatggatgttaaatcactagcagctgagctctttaaatttttttttttttttttttatggattgctttgttactgtctttgtagctctaaacttaagatgcatagaacggttgtatggtgatcacgggctcgatgtgatggatgtgctgaagaagaacgtgtctcttgctttacctgttatcctaacacgtttgaaacagaagcaagaagagtgggcaaggtgtcgt

SEQ ID NO: 9328 - DNA, 1638 bp, Arabidopsis thaliana landsberg
  unsure (1)..(1638): unsure at all n locations
cgaatgcatacttagtattagatgaaagttcataactcacctatgatagcagtgactattctattgacccccggattacacaagcaatcgataaccttagtgctaaactacaacattctgacgggatcggggtagacctaaacagagtaagatagaacgctttatcactacttagaaaccacacttgataggcttagctccagaactgatggacagcttacttgtccaaacactgcgcttagacctatgatgcgcttggcttcagaaagcacagcttccttggaaaacacatttaattcatccttgatctgattattcactatggattccatccttctcaaatcttcaggagcaaccggcttgcctactcgaaattatggaacccatcagacaattaagatgaccatccacatcaaaataaaaatgactttattcaaaaatgtaccatgagaaaaatcaaatcgcagtttttcaggaagaacaattgatcccttctgatcaatatgatccccgagcacttcctgaattcatgggacatgaatattttcagatccaatagaaaaaattagaaaatcacagtttaggttacttaaattatagaaaagggataccttcagggcataattcaacatatgtgtgcaagtatgattaggagcgatgagtttacgcctctcatagtcaacctatacgcatgaaaacgaaggtggaaacaaattggatagtaccaaatatggtgaatgagacaaacactgtttgatgcagagagttaccttgcaaatcactttatcacccacagatacctctccagtttctttagagagataaccaatgtgaagaacaaagcccccaaatatttgtacattgcatacattgaatgtcccaaacgagccttctataagtccagtgtcaaaaatctattgccagagaacaaatgttagaggcacagagtttatatacatatagatgattggaagtgaatcaaaagcttaaccttgttcatggatatgaaatctaaaaatatttatgtgactgtcaacgacaacttcagaaattagtatgcaaaaccaacaataactatatcatggtatttgccagccgatacataaattcaaacaatgcagttctgatatgattgtgttcatggtgttactgccatgtctacatttgtatatatatacaaatccaagatgaacatactgaagactgcaatttcatgccaccagtcatatgatcagaaatgaaaaacaattagcaaactaaaatacatatcaaataaaatggattacctgaccaccctgctcagcatagaagcttgtagaccccaatactagtcccacgttatcactagcagctgaactttctaggaaagtagagccagtatagattgcctttagttcactctcgtggtcctgcagcgatatgtggcnnnnnnnnnnnnnnnnnnnnngtaaagcaaaatccatttactattatatgccctaacttcttcatttctacgccaacataagaacatttcaagtgcaacatgcaagttttctggaatataaggacaaacctggaaccaaatgtatttaaaaagaataatctgttgctgaaacaccagccttgtgcaatgttgatgtagcatcagcaatcata

SEQ ID NO: 9329 - DNA, 1951 bp, Arabidopsis thaliana landsberg
gcacgcctgctttgcttttattattctctgctcgttgtgaaattcagaattttgtttatgtatatgattgataaatcattttgtgtatttcttgtttctccagtctgttttaggtcaagaagtgcgaatggacggtgctgctcacaattgtgttcatgacgcagcagctgccatgaaacttgtacttgctgctgtagaaaaaggagcagccactttaattcaaccaactgaagaagtaaggcaaatttttacaattcatactaagttccaaaaacaatgtgtatatatatttatattcttctgaaacctatacaaaattatctgcaaatcaatattagatgatggtggctgaaaagagaagacaggaggcaagacaggaggctggtaaggcacagctcttccttcataaaatccctcacgatgttccatctgaagagttacatggagttcttagcgggaatttcacacttgttgttaaggtagtattataaatgcgaacttataatacgaacattataatctgttatactctcttttatctctctcacggggatcatgtgtttgtgatttgtttttgggcagccaccaaaaacaggaggttattctactgcagtcgttgattttagtagtccggaagaagcaaatgaagcatttgaaaatgttgaaggagacgtagctaaggtatttaggatcatctctctggttatttcaggatctgaatctatcttaaaaaaatagatataacaagtttctattgtctttttctttcaggataaatcgggtttgccacaaaaaaaggctgtgttacagctgagttcgggattagcagttagtttattcgttcgtaaaatggttcaagatgattctccgtgtgaaatctctacctcctagagagctcgtgcagaggagaacaatgtgagttctaagagacagaagacggaagatgaaactgaggagaccaaagaagcaactgtaaaccaaagagaggctgataagacaaagcttttccttcataaaatcccacacgatgttccatctcaagagttacatggagttcttaacggggatttcacactcgatgttaaggtaatattagatatcgaacattctaatctttatactctcttttttctctatcacgaggttcatgtgtttgtgatttgtttttgggcagccaccaaaaagaaaaggaggttactacaatgcagtcgttgattttaatagtccaaaagaagcaaatgaagcatttgaaaatgtggaaggagacgtagttaaggtatttaggatcatctctctggtttttatcaggatctgaaactatcgttagaaaatttgatataacaagtttctgttgtctttttcttgcaggataagacgggtttgccacaaaaaatggttgtattcaagctgagttctggatcaggagttagtttatatgttcgtaaaatggttcatgatgattctccgggtgaaatctctacaaccaagagagctcgaacagaggagagcaatatgagttctaagagacagaagacagaagatgaatctgaggagaccaaagaagcaaatgcaaagcaaagagaggctgataagacaaagctcctccttcataaaatccctctcaatgtcccgtctcaagagttaaaagtagttattaccgggcagttcacacttgaagttatggtaatatcataaatccaaacatcctaatctttatactcattttttttttctctctcgcgaggatcatgtttttgtgatttgtttttgggcagccacccaaaagaaaaggacgttattacaatgcagttgttacttttaatagtccagaagaagcaaataaagcatttgaaaaagttaaaggagaagcagttaaggtatttagaatcatctctgtggtcatttcaggacctgaaactatctaaagaaaatcgatatgataagcgtatgt

SEQ ID NO: 9330 - DNA, 1241 bp, Arabidopsis thaliana landsberg
ccttggctctgggtgaacttgaacatctcatggacctcgcctttaaatattattactatgttatattcacacggtattataataaatctcaaacaacttaagcttgattgctaatttttatgatgctaactttaaacttgatgtatgcaaaaactatcttgcctttaaattttcttgattttgttttgttttgttttcctttctagattagctccaatataatatcaatgccatcggttcaagaggtctacaagattctggctgacctaaaggtcctaaaccaagatgtcgccaataccattactacaaacggcctacatgtatcttggaacgaaggactaaagtctatagctaatctctatttagagaataccaccaagactttgaatttatttgaaaagttcatgtacacggaggaggtcgtgacacataagtgtcaagtgtgtcaagttgatgtttactgggatcatgtcaccaccaaatgggatcatgtcaccaccaagactaggaatttatctgaaaagttcttgtacacggacgagttcgcgacacagtatgtgtctgtttacagggatcatgacatgctcttaggaaagatccgtgagctagaagtagtgctcgagaagaagtataagcatgcaaagagaaaaaggataatgaagcttggttttggcgcggttatctttatcccttgtttcgtcgtagcggtcgtaggccaattaaatcccgcgtttggaatggctggccaggcaggggaaaggggcgttgaggtggcgaagaagctctttgaaaaaggtttttggaaagggacgatggaagaagagaattatatgaagacattgttaggtttgtctcggttgattggaaacagaacaaaatgcaacattgaagcgatggagaagataaagagccacagttgaagattaagtatttagtcttaaattattgtgtctatgcaaataatggtgtgaatggcttcccaatttgtaatagaaccatattaccactctctcatttctttgttgtttgtttcatgtattttgcttctatgtagattattgtgttcttgttctcgattagtgtcacccaactttgaatgtattgtgtggtaactatcaatgtattttaagtgtttgaatcatgagtcactaatatgttggctaagagagcgcatgatgtttcgacttaagtttctaataaaattctctcactttctctgtttagatttgctctatctctgc

SEQ ID NO: 9331 - DNA, 1875 bp, Arabidopsis thaliana landsberg
acaatattttatattaattgatatgtttattcataatacattttatataaaattgaaataaattttgtttatccggttcggttgagttccaatatagcagaaacgattgcggttaaaattctggattttattcggtttgatgaaatagaatatggaccgttagatctaaagttaagtagaaacaacgaacggtggatagcgaggaaaacgtacacaagtgaagcatgacataatttttttcccatccaaagactttcacaaggtcgtttttttgacaaacgaaagaaacctgaaaagtgagaaacccagagatcgagattgagatttagagaagacgaagatcagaagatgatcgcagacggatcagaagatgaagagaaatggctcgccgccggtgctgctgctttcaagcaaaacgcattttacatgcaacgcgctattgtaaattctgcttttcccttcacttcttcctttcgtttctctgtgactattttcgttgaaattgagaaatttccaaatttgtacttttcattgatgtgtagaattgaaggaaccctaattttggttttgggaaaaaacttgtcttgtttttggttaattaggactcgaataatctgaaagatgctctcaagtattcggctcagatgctaagcgagttacggacttcgaagctatcacctcacaagtactatgatctatgtgagttgtttccgtcttctgatctaccttgatcatatttatttcgctcaatcccctaattgacttaatagggttttgtttgtgatctgatttgatggtttttagatatgagagcttttgatgaattgaggaaacttgagattttctttatggaagaaactcgtcgtggctgctcagtcattgaactctatgagctggttcagcatgctggtaacatattaccgcgtttgtaagttactctcatacaattccctttcgctgtctgttcctatgttttggcaagttttttttttatcgatcgtatcttcgtaaagaatcattttggtctttcttagttcaaattcatgttatcttaaagatggtttatttgattactacttgatgttgctagcatttcttctgatatttagtctgttcacttctctagctaatgtaatatttgttcattttattttcccttccctaggtatctcctatgtacagcaggatccgtgtatatcaaaaccaaggaagctcctgccaaggaaattcttaaagatcttgttgagatgtgccgtgggattcagcatcctctacgtggtctcttcttaagaagttaccttgcgcagattagtcgagataaattacctgacattggttctgagtatgaagggtaagcatgtagacactattgttggatttcttcatagcagctgggactcccatggggttcttgcttgtgcttaaattatcttcttagacaaagatccctagtttcttttgacttcatatagaatgttggctattaattaaaatcattttgattcatctagttggtgactcgttttcaaatctctacagagatgctgatacagtcatagatgctgtggagtttgtactactgaactttactgagatgaataaactctgggtcagaatgcaacatcaggtgagttatgatttaagattgttatacacccttctactcattttggaaacgagcttgccagaatgtttgcacttcatggagatttaattggactatgagagcatgattctgatcatgcaggtgttgtattgcttgtgaatcattaccctttgatgatcctgagttgaagcttcctatccggctttctggtctgcagggacctgctcgagaaaaggagagacgggagaaagagaggggcgagattcgtg

SEQ ID NO: 9332 - DNA, 1664 bp, Arabidopsis thaliana landsberg
agactcacagacagagtcagagtagtggctgagagatacaggaaatggggaccaaaagaccactgaaaagaagatcgagagttgacgtcatagtggcacgtttgaagttcgaacaaaagaggacaagcctgacacagagagattgaaatatttgtcagtacgcctttgtatttttggcttttacttcactgacaaattatttcttaatcctttaatttgctcctattttattattcagtaaatggtacagaaaacattggtatataattttcatgaagtaaacaaaaccatattatgcaagaaaaagtggagacaaaatgatgaaaagggagaagaaatggtgtgttagtgaaagatcttagtgcaattcaaatttcagtctcttttatgggaccataatactctcatttcaaaatcaaacttcatcacctcctttcctcaatttcaggggttaattctagtgtttttttcattcacatgaatttggtttagcttctttcgtttataccaaagaaatctagtcaaatgttacatacaatatatattacaaatgaacataaacgacaaaccatcatcactccaagcactagacaaaaaagagtaagagaataggctagagactaattaaacatccaaatctaaccccaaacaattcaattctaaaagctaactcaaaatactagattaacttatcggaccaagtagtcaacgccaagaggaaacggtgaggagaggcacattgttccaagccaaggagatgaaacctggctccgattcaacaagtgaatacaatgtactataattgtagttccatagtagcagcttcgcttggctaaccgcgtaattactcggtttaaccggctcaaatccagctttctccatcaacactctccattgttctttctcctccattaacccaaaccgggttcccggtttattattatcatcatctgatcggaccaaatccataatcctcctaccgaacagcactctctccactctcagcctttctttcgaatctcgatccaaattcggttcaagcgattcaaaaaccgcggaataaaaccggagagagttcttaacccggttagcaaattcaacccggtttaaactgacttcgtattctccaagcgtcacaatcctcgggtttaacgatctagctaaccggagcgccgtaccaacagtcgtcgctgtttcatctagaagcttataaagctcattcataaaattcacaaccaaaacctcatccgggtcaacccgaaaacttgacccgtttagtaattgaatcggagtcagaaccggataaaactcgaaattgagatccaaaatcgccgcgaaatcacggagacggtttcccgtagcgatcagagacggtcccggtgagtctcctagagacggagcgggtatacccgaaatccggatccgggtgggtttaccagaagaacgggtcgctaaagcttgtaacagagcagaccattgaataccttgaaaaatcccgaaatcgactatgtgaatgttgtttgattgattcgtagcttcgagaattgcttgattcgctgttaaatgagcgaactttgaatatggacatgcgtcgtttaaggttttgtatgagagaatgaaatcttctagggatgacgacgacgatgacgacggagactctgtgt

SEQ ID NO: 9333 - DNA, 1149 bp, Arabidopsis thaliana landsberg
ccttctccgaagcttctggagatgtcggcggcgagctttactccgccgcagtagctcccactcgcttcaccgattattccgtcttactcgctagtaagtcttcatgcaaagtttagattctagaatccaattcggataatgtagtgaatatgcttcaatctctggatagtaatattctccttcattggaatcttattggaacttcacggattagtagaatttagatctggaatttatagaatcaaatgaaatgcaggttctgaatctgaaaccacgaccaaggagaataatcaggttccttctccgtcatggggtataatgcctttggagaatccagatagttactgtgccatcaaagccaagatgactcaagcgcttagatacttcaaggaatctactggacaacaacatgttcttgctcaggtttgggcgcctgtcaaaaaccgtggacgatatgttcttacaacttcaggacagccatttgttcttggtcccaatagtaatggccttaatcaatacaggatggtttcattgacgtatatgttttcccttgatggtgaacgggacggagagctcgggcttcctggtcgcgttttcaggaaaaagttacctgagtggactcctaatgtgcagtattactccagcaaagagttttcaaggcttggtcacgccttgcactataatgttcagggaactttggctttgcctgtttttgaaccatccaggcaactctgtgtaggagttgtcgagcttattatgacttctccgaagattaactatgctcctgaggttgaaaaagtttgtaaagcgcttgaggtttgcccttgttttctccttctttttttagggttctttatcagtttcctttgatcttcccgtgacattgttgttttctcttgtgttgcaggccgtgaatctgaaaacttcggaaatattgaaccacgagactactcaggttatctgcgagtccaatgtcaaaaatctcgagtattctttcagaaactttcaagaactgtcttgagttcatttagtgctgttccttctcgttttgatctccatttctttttgacttctcctaaaccagatctgcaacgagggtcgccaaaatgcgttagctgagattttggagatactgacagtggtgtgcga

SEQ ID NO: 9334 - DNA, 1580 bp, Arabidopsis thaliana landsberg
gtcttacaaatttatataaggaaacggcaaagaagcccaaaaatgtaacaaagagacatatttatattaaaggaaaaaagaaagagtcaaaagaactcgaactatcatataataagaaaagaaaaagacataggacaaaataaattatattcatattcacaaaacacaaaacaaaattgttaatcaaatagtataagacaaaaaatgcctgattaggggaaggtagttgttgttgaatagtgactagaacgagttaaatggtttgagatctccaagtttacatttcaacatctcagattttaatccaacggttctcaatccttctactacgtaaaaacaccaccgtccccgttccgttccgttctgttctctctgtcacttttgtctcttctaagtttttaacacttaccttgtcgtctctgttcttcttcttctctcattcctttcgtttatcgttttcttcttccaattttggatctctcttccttttgatctgattcgttacttgctctatgttgcttcaattttgaattcttttgatttttgattgtgtgggggagatggggcaatgttacgggaaggttaatcagagtaagctaaatggggaagaagaagctaacacgactacttatgttgtttccggcgacgggaatcagattcagcctctaactccggttaattacggtcgagctaagaacactccagctaggtcatcgaatccgagtccttggcctagtcctttccctcacggatcagcgagtcctcttccttctggtgtttctccttctccggccagaacttccactccgaggaggtttttccgacggcctttcccgccgccttctccagccaaacacattaaggcttctttgatcaaacgtcttggagtgaagcctaaggaaggtccgatccctgaggagagaggaactgagccggagcagtcgcttgataagagctttggttatggcaagaattttggtgctaagtacgaattggggaaagaagtgggtcgagggcattttggtcatacttgttctggccgtggtaagaagggagatattaaggatcatcctattgctgtcaagatcatctccaaggctaaggttttaaattctcaatcttttgaacatctagtttttgattttgggattgcttgcattggtgttgaattttagcttatattgtgatttgtttgttgctgatgctgctacaagaatctgtggagggttttgaaatgtggaacgagtaatgcttacattttctcgtagttgaggtagtgaaagtaagattcttgggtttggataatggctgtgggacagtgaattgtctttttcttccagctgagtctcttgagacaaacaatgttgtctcttttgataggtaaattttttgtttggcagtgagttgagtagacaaaaatgtgaactttttgttgatttgtcagcattaggacaaggatagtcatcaaagaatgagtttcatgtactaatgtttatgagcttttcttctgcacacatttgtttgttcgaagcttgtaatcacagttaggttacgttttgattacttagcttgtgattttg

SEQ ID NO: 9335 - DNA, 842 bp, Arabidopsis thaliana landsberg
acatagattcggttgtttctttgttctcacaaatattcgaccctttttctaagtgtggtggtgtctatatgtaactttgagttacttgcctttataagacaccaaacaattgtttacacacaattagtaaaaaaaaaacgtacaatgaaatgtataaaacttgtatcggtgtatgtcattcacaattcttgtttttaaatcaatcatatgcaactgaaagaaagtttgtaacaatgtccctgttgtattatgagtatgtttttgtagcttctcttctaaatcatgtcttttgaatttcagatgagtaaaaagagatcggctcagagagtattgagtctatatgatgatgaagataagttttacaggctcaagattcttttaccaaacagcacaagtgtgacacttgcacttactaaccctgaacctagaatgtcaatgaagaattttgttaacttggtgaaagaggaatatgagaaaaccaggaaagattgtgtcttgtccggtaagatgaggaagcgaattgattggaatttggctgctatatcttatctcgagtttaacggtgaaaagattaaagacatcgttcgattcgagaagtttaagcccgatttgtgcaatataatacgtcttgacgtgagttggtttttaatctattccttatgctacttgctctattttttatgtgttgatataactaactatgaaaaatttgatgttatttctggatcaggatgggtctggagaagctactattatgtatgaggttagttttattacatagtttttgctatgtataattatctcctaaagttggtttaatgatggtcatattcttgttattt

SEQ ID NO: 9336 - DNA, 581 bp, Arabidopsis thaliana landsberg
tccaaggcatcactaagctaggaaacacccatgctgcgcccaattcttcatcaaagtggtccatgagatgaaatatgtctttcatattcttatcaaatgctaatcgaccccatgggaatgttttacaccattctagatcttccacggatttaagaaagaaatcttccacagcctctgctttttcccctgtttttctcttcccaatgatgacgctgcataagaagaataggaccgccattttcaaacgctctctcgaagatttcttcattgagagtagttttgtcttcactttcgcatatgttactgttgcaccaacaccaaaatgcttaccagagaaccctaagctgccaaatgctttatagttttttggataagaatggcagtataaaccagagatgagtgcaagttcttgaagagaatagcggattggaacaccgttgacaacaaaccaacattccttcttcttatcaacacaagcggtgcgaagaacaagcatccacatggccattaccttgtgatttgaatccgtatgcatatggaagaaatgtttgaactgtggatgctcccaaaaccatttcttc

SEQ ID NO: 9337 - DNA, 1616 bp, Arabidopsis thaliana landsberg
acaagataacaaggtacaataagctgcttctttttcacacgtgatgaaaacattaacatatattttggaaagtatttaaaacacttgtacaaatttcaggttagagaattgaaatccgcgataggaccattatcgggacatagtttagttttctgctctgatgcttccttgaggagatttctagatgctcgtaattgggatgtggaaaaagccaagaaaatgatccaagagactcttaaatggagatcaacttataaacctcaagagatccgttgggtaaatatttgactttattatatacttcattttaatcttcttgttactttgtatttttttcttactttttttttaatcatcttcttctgattctcttcagaatcaagtagcgcatgaaggtgagactggaaaagcttcaagagctagttttcatgatcgacaaggtagagtagtgcttataatgagaccagccatgcaggtaactaagcccattgtcacctttatgaatatttttcttgagttttttttaaaaatgatatctcacttaataaaaatgaaacagaactcaacatcacaagaaggtaatatcaggcatttggtgtatcttcttgaaaatgcaatcataaatcttcccacgggacaaaaacaaatgtcttggctcattgatttcactggttggtctatggctgttaatcctcctatgaaaacaacacgcgaaatcattcacattctacagaactattaccctgagagactcggtatcgcctttctctacaatccaccaagactcttccaagcagtctacagggtacacaaaaaaaacattggtcattattacaaaaccatcaaaattgtctctcttctctttttctttaaaaaggtttactatatacctactatattctttcatgtaggctgctaagtacttcttggacccacgtacagctgaaaaggtgaaatttgtgtacccaaaagacaaagcaagtgatgaactgatgacgacacattttgacgttgagaatctccccaaggaattcggaggtgaagcaacactagagtatgatcatgaagatttctcacgacaaatgtatgaagacgatctcaaaaccgcaaaatactggggactagaggggaagcactatccgaaaacaaacggtttctctccatccgatgttgttcctgagccggcgatagaaatcgcatcagcagctagctgagagttgaacgatatatacacacaagagcaagaagagaagaagaataaaagggttattctcattcatagaagaaaagccaatagaatgtgctggttaacttgatgatcaataaagtttcaaatagtctttgcctctttttcttattagtgagccaaacactttgtaacgttttaaattagcagagactatcctgtatgtgtgagagaatattgttaccatgtgtaatactactagttttgtgttattagttgaagatatgagattatccttttagttctattgtttctcatgttaaatacagttatgatgaaatcagagaagttattgtcgtctactgaagtgatgatcaaatcttagactttaaatataatattaacctttaaatataatactgaactcaaa

SEQ ID NO: 9338 - DNA, 641 bp, Arabidopsis thaliana landsberg
  unsure (1)..(641): unsure at all n locations
aaagtggtatgacagctttattatatcagaaagtttcgcctaccatcaaagcggatctctttcatttagtcaactcgtttctagataatgggtctttcgattatcggttgaacttaacacatatttgcctaataccaaaaacaagtcgaccaactcggatgatggagctgagaccaattagtctctgtaataggggatacaaaattacatctaaggttttctgtcaaatactcaaaaacgttctatcgatgctcatttttgaaatacaatcagcctttgttcgaggaagattaatttcagataacattcttactgcacaagagatgtttcttggattgcggatgaacccgcaaagattaatatattgccattaagagatatatgagtaaaacctatgatagaatagaatggtccttcattgaaagcttactaaagaagatggatttttgtgataaatgggtctcacagataatgtggagtgtcacatcagtttgctacagggttctaattaacggaaaaccccgaggactgatagtttcccgaagaggtttaaggcanggggatctgttatcaccatacttatttattatgtgtatagaggttctgatcgctaatattcgaaaagcagaacaagaaaagat

SEQ ID NO: 9339 - DNA, 517 bp, Arabidopsis thaliana landsberg
  unsure (1)..(517): unsure at all n locations
cgactttgaatgctaaacccgattaggtatttgaattcgtgattaagagatcactactcctaacccacccgaaattaaaaacgttgatcctacaagctttaatagattgagttgatatgcacatccattctttatgcacctctgtttcttccttatgttttgtttggtttggtttctttattaaagtcgagactgtttagtatgccaaaaaaaaaagactaatttgagataattttggtaaannnnnnnnnnnnnnnnnnnnnnnnnnnnnnnnnnnnnnnnnnnnnnnnngtagaatgtttagaaccatacaaagctttatttatttggcataatgttgaacacaggtttgatttaccaagttacacaacacaacagatcatattgttcaaagttatctcttatatcaaataagttttggcctttcctttacctttccctttacctttctgtttaccagctttcttcttcttttttacacaatccaaagaaccattctgtttatcgtcatcatcag

SEQ ID NO: 9340 - DNA, 542 bp, Arabidopsis thaliana landsberg
aagcttacaatctcattgtttcactgtttaacctttgacggcgaaaaaacaatcggagttacttcgccgatttgtaattacataactaatgggcctaaaggcccatctactgatcttgggtttgaatcatgttcatgttcttctatattactaacttcacttcttcagtgaatttatttaccagaattttgatcccaatgtggacttgtgataaagtttgagattttgttttttcataaagtaaaagaactgatgtgcataataacaagaaaaagtcagataattcaaaataacaaaagtgttaacagacaaaaacagtagaatttgaaacaaatctagaaatcatcatcgtcttcctcagccatgtatttagcgagctcctcttcttgctgtttcatctcccttcttttctcctcgctctctttctccctgtgcgtgtttggcgggaacctcagtgctctaaccgcttcattgtgcatattcaaacagaaggcaatcctcgagttaaacgcagtctgtggttcattagtggagtagatgtc

SEQ ID NO: 9341 - DNA, 1580 bp, Arabidopsis thaliana landsberg
tgatttgaatactaaaaaaatatatggtttgtttattcggtttcttgtgttggattggctgttgttcttaacttatatataatcttggattcttcttgtctgatgtctgtcttgatttgtatctttgctatttccatttctaaagatggctgggagaacagatgggttaaatctgagtggaagaaggatgatcacactgctggggagtggaagcacactgcgggaaattggtctggtgacgctaacgataaaggtatgattcagccttcagagctaatcacagaatcattatttattgttttacaagcttgtgctaatgcgttgttgcaattgccattgtctggcaggtatccagaccagtgaagactacagattctacgccatttcagctgagttccctgaattcagtaacaaggacaagaccttagtcttccaattctcagtcaagcacgagcaaaagcttgactgcggtggtggctacatgaagctactaagtggtgatgttgaccaaaagaaatttggtggagacacaccatacaggtacaaatcctatctcatctcactcttatcatctcaacctattatcaattaacatcaatgtttaaaaataacaacccatctgcttttttacctgcagtatcatgtttggtcctgatatctgtggctacagcacaaagaaagtgcatgctatccttacctataatgaagccaaccacctgatcaagaaagatgttccatgtgaaactgaccagctcacccatgtgtacacatttatcctccgcccagatgctacttacagcattctcatcgacaatgttgagaaacaaactggtagcctttactctgactgggatcttctcccacccaagaagatcaaggaccccagcgccaagaaggtattctatttcttatgaacaaccaggctaaactgagaaccaaccacttatactcaattttggagcaaactagaactaaccacaaaccatgccaaagctctctgatgaacttggttgattatacctgagataccatccatcatacaaattgatccttttatttatttgtacagcctgaggactgggacgaacaagaatacatttctgaccctgaagacaagaaacctgacggttacgatgatatccctaaggagatcccagacaccgactcaaagaaggttcatacttgtctataattgatgtaaaatctaaaatctcttgctgtgttccgtatttgctgatttttcgttgtcctttctcttagcctgaggactgggatgatgaagaagatggtgagtggactgccccaacaatccccaaccctgagtacatgggtgaatggaagcctaaggtttgtcaatttctattccaaaaagtatctatatcctggtcaacgtttttcttcctctcaaggctgtcaaatatttttgtagcaaatcaagaaccccaactacaagggcaagtgggaggctccattgattgacaaccctggtacattactactctctgtggccatattatacatgttgcatgtaatttgtggttcaacttctgttctttgttgtttgatggtcgtttctggta

SEQ ID NO: 9342 - DNA, 1009 bp, Arabidopsis thaliana landsberg
atgaaacaaatatcttaatttctatcaaattttttttttgtaaggttaatttttatcaatattgagaagttaaatgtttcaaaaaggtcaaaattatttatataaaagaaataaatttaaaatctgaattccagccaaaactggtgtatcaaaagaaacaaatgtcaagaaaataatgtaaatatataacaagaaatttaaattaaaaactctccaggaatgtttcctaacgcaggagtccaacatgacgctcctttcttatccaccaccttcacatggtgttttcttcctagttgtctcaatctttgttctgcaaaaggccgtcctaaaacgtcgtcgtatccaactctatcgtcaactttgtaaatgagcttcgcaaggtcacatttctttatcaacattctaatcctgatcactctattatatagctgttttcttacagttcggattagtttaaacgtagtagggggtgccattgcaattgctagagtttgtgcagagccgtacgcacgttgatatactacatcggcaacataaaaatgtccaatacatgtaaaactagtataaacataaaaaatgataaataagtaaatatttcaaaattttactgaattttacaatagatcgtagaataaaattataaaatacgatattaggtgccacaaaaacaggattgcaatttagcataaatttgaatagaagaagaacaagtttacatgtgaagatagttagaatatatatgatttaggagaaaaggtttggcaaaagatggtatcacttaatatatttggggctattacagatttgggaacattttgggccaaaaattagaaaagagacacattctattgggcttataagatgaagcattttttatcatgtcaattgtctattttgcccttgattttctctgcaatgtttcttcttcttcttcttctttcatctctgcatttctttctcttcttaaaatttccagaaattttcaatttctttctttcttgacaaattt

SEQ ID NO: 9343 - DNA, 389 bp, Arabidopsis thaliana landsberg
ctatttcaccctatcttctctttccctaacaccatcaaaaacagagatggatattgagtttttcacaatcgatatatatgactggaggtttatctaattgtttcatatatagatgataaaagtattgggtatgtgtttattagtccagattaaatcatcttttttattaaattgattttttgggctttcaacaaaacagaagaagacttgtcatgaattcagtttacaatggtgaagacgacggtaagctccgcaacaacaacggctggtagcagtgagaagtgaggcagatgacattgatgcatcattgttttggatattctaaatggtaattaatatttccagaaattgttgatgcgtttatagatctaaaatttgggaacattcgt

SEQ ID NO: 9344 - DNA, 1721 bp, Arabidopsis thaliana landsberg
cccctttcatagtttatgctttctctttcaatcaatgccatatctgtggtaaaaaaactcaaacttatcttcttttttgtctatcttcaccagcatacggggtggaaattttgaacacaatggaatatatatatgtcagacaagcggcaaaagagcttgggaagaaagctatttatctcggtgtgccattcgtagctgaatggtttaggacgaaaggtcacttcatcaaatcccaagtaacagctgcaacaggttagtgacttaggtacaaaggcgacctcaacaacatcatgttcaaatcatatgctagaagaagtagtatgggttacataaggaacattttatttcaactactgaaaaagaaaacccaagaacactctcctagctttctagaacttggtctcctctctaggggggtaatatttagtgacttttctttatctgtcgtcctaggtgcatacgctttattccagctgcaagaggaaatgaaaaggcaactaagtgctgaaggcaattataccgagaaggaacttgaagagtacatgaagacccataagaaagtaatgattgattctctgtggaagctcaatgttgctgatatcgaaagcactatctcccgtgtttgtgagcaggtagtccagctacaactgttcactagttgactgaagtagcattttggtcaatttctgttgtgaccactctatgattattttttggcttaggtacttcaagatcccactgccaagagagaggagcttcgtgcaagggccaaggggttaaaaactctgggaaagatcttccaggtaaatcttttttcattcccttcttggagaatgtagcgcatatttattccaaatatagtttactaaaaaggaagcactgattgcaaaacgctttatttttgtggttatatagaagaacaagatagccagtgagagtgatcctttagtaagagccgaacttcacaaactaaacggaaatggtcaagaacatgatcattcatccacatcaccaaaatctgatgaagcatctcgctctaccgttggacctcaggtacatctccttcctctttagccattcatctactagtatgtttcacataaagaaaaaccaagaaacataaccttgtgtaatctaaatatcttcccttacattaccctcatctttggaaacctttttcacacatcgtgagacacagctgcatgtttgtatgtgatagacagatagagattcaggaatgatttagggtatgttgatggtgtgtaattgattgaaacttgtctatgttacgacttatgagagatcacgagatatgattgtcgggaatgatttagccagaagtagaaactgtttcactcgtagtaacttacagatactaaaaattcttggatgccattgtgaataactaatagccacttaaaggactcatgaaatgcaatgtacacggcattcttgtaggaaccgcaaagcccttatgtggaagcaccgaaacttggagaagagcaaatcaactattacttcccaaggcctgcgccgcctccaggagcacagagacactcttaaactggcaatggattgattcacagatgaacgaaaaggttattttttcctttttttgctatataatataagtctttatgcatatttgatatataagcaggcgttggtattaccattatgtaatttttattattgttagaagaaggaattattggatcttt

SEQ ID NO: 9345 - DNA, 623 bp, Arabidopsis thaliana landsberg
ccacctgacaacacacgacaaagagtggcttcgatatcagcgacattgagcttttacagtgtatcaatcatcactcttttatggggctgaaggtattcctcaagttcctcctcagtataatttccttcagtatttagctgccttttcatttcctcctgcaactggaacaacgcatatgcgcctaggatgacaataaacagccaggaacaaaaatcaaaatcactacatttctttcttcgtaagagagaagaccagattctaaaatctattcttggtttagtttcttctttaatcttacctgttgcagctgttaattgagatttgatgaagtgacctttgttcctaaaccattcagcaatgaatggtactccgagataaatagctttcttccctagctcttttgctgcttgtcttacatatatatacccaattgtattcaacatatccacaccataagctgaagaatacccaaatagaaggggatgagactcattttagcacagagatggtatcgattgatagagaaagcataactacaaaacaggaagcactctacataaaatgttacctgcacttgagagtcttgctacttcagcttcagcattactgataaattcgtcttt

SEQ ID NO: 9346 - DNA, 1920 bp, Arabidopsis thaliana landsberg
agaatccaaataaaataaatctggtaagtattcatttttaattttaaaatttattatgcatattattattagagaaaataaattttggagttgtcagaagataattatttcttaaaatgcagttttatatttatttttagagaatagtaaaatcaaaaactacacgtgacaacaaaaacatgtactagcactaaatatttttttctaaggttatttttgggaaaatatataaatattttttcatataatttttctataaataaccggtatgtagtctaaagttttatcaaactaagaatttcacgagagacagaagaacaatgagaggacggatcgttagatcgtacactaggtcaaaagtgccgcattggcgttggacagatgatcttaatctcctttttattcaagttgttgaattacttggtggcgaaagaagtaagcgatttttttccatattgcaaaactaaaacaaagacgattcctttaaacaaattgagagaaaaacaaatcgccattaaaatcaacaatctcctatttttcctttaagatacctcatctctcttattttttattattatatattacacatgataatatttttgttgatatcatcttttagattcactataatcaatatcaataatctccttaaatttgcaggggcaactcctaaggttattttggaatttatggatgtgaaaaacctcacaatatcacatgtgaaaagccatcttcaggtctttatagttttttttttggacaacaacaggtctttatagtttttacccataatcagttagctatataagatacgtctatatatatatatataacatgtatatgcattgatgtataatatcatatttatatttaagattgtatgtaatgaattaaatatttttttttttacttttattagatgtataggaacaagaagaaagaagaaactagaaaaggtataagtaactatcttccatttaaattaacatttaataattatgtttgtagtgtaacgttgcatatggtaatatgttgatgttcaacataatgcatagtgactttatatccttttcattcataattatacacgctcaatcctttggcagaaaggagaatgatgcgagaaatgagcaggaggcaatctcaacaatacattcagatctacgaaagtgctcgagatgttacccaatttatgttcatgtataaacttaggtttttgtataatcgacttttgatttggtcactaaaacaattttttttttcaattgttttgtagggtacaattggatattagtgagaagataactccagttttgggatcaagtaacaagtctctctatcaatcttcaagtgtattttttcttcttcttctttttttttcttacattagtatcatgaatgatcatcaacatgtagatttgaggcatatgaaactagataaatatatactttttgtaggtgagacttaataaaaacagagataatgatgttgttgttgcttgtggtggtgcaattggcgaagaagaattgtcccttgaactcactcttgggcgcaagtactaagacaattttgctttctatatttttttaatgcttgatctctatattatttaatgcttatcccatatataatgagatagaaaaataaaaaccaaataaaatattatggtagtcctcttataatatgctataatgtgatttttcgtccattatatgggtaaacaaatatatttagaaatttatttaattatgttttacaagttctcaatatattgctgattttgcttttcctaagaatatttatattgatgattaaaaagtctcaaaaaccaatatagctattatatgatgtaagtacatgtcgttaaatggtacaaacgtaaaactactaaatattatgtactggtcgcaaaatggtac

SEQ ID NO: 9347 - DNA, 846 bp, Arabidopsis thaliana landsberg
agagtaaaaaaagtcttatagaaaaagtaactaataattaattttttttcttcaacgtccctgaaaaaaatttaccacatctgcatgtaatcctccgttaagctgcgaaaataatttttctagtagctacaaaagtgtacaaaacacatccattaatgatagtattcaattacttcatctttcagctagtaatttaataagcctaataaacaacgattagtaccttggtcttatggagggaaaatccgcaacaaatgtgatatccaatctttcttctttcagcttctctaaagtaaaactacaaaataaacaaataataactatattggtcatcatggagaatcgtttacataactacgtttggtaaatgaaatgtttagttactttggtttagaagttcttctatcaccatcacaagctaaaccgttgttgcttgatacatcctattcgaaaaaaagattgacgcaataatggaaaatattatgacttacgagtaaatgttaatgcatcttgtttaacaaatttgcattattttaattattactatagaacttacaatgtatctaatggatctgacgtttcccgcgattagtgaattcaaaaacttcacaacttctctctgaatatatttgagattcaatagttaggggtcatgattgttacatgaagaatgagacatacaactaacaaaattttctatagtcaccttttgaagagaaaaacaattacgtagtattagtgtctggagaggactgtcattagatctatggtccaaaaccctaccatcaaaattttctatcatgagagatcttgctaatagaaacccagatggtatatcatttcatt

SEQ ID NO: 9348 - DNA, 1407 bp, Arabidopsis thaliana landsberg
aaatgttatgccttatgagtaaatgttaatgcatcttttttttttttttaatcatatttgcgttatttcaatggttaaatatagaacttacaatgtatctaatggatctaacgttccccgcgattagtgaattcaaaaagtccacaacttctctctgaatatatttgagattcaatagttagaatcatgactgttacattaagaatgagatatacaactaacaaaatatgctatagtcacctcttggagagaaaaacaatcacgtagtattagtgtctcgagaggactgtcattgggtctatgtcccaaatccctaccatcaaaattttctgtcatgagagatcttgctaatagaaacaaagatggtatatcatttcattgtgtattaaaccatatgaacctcaaaaagcttccagtgattccagctgtgttggatagattgatatacttcagtatgcgaaaaccctgcaaataatcccaacatatttttggtggtttagaagcttatatatacatatattaaatgaagtgagaagacataaaggaagaagagccctaccgtaacaaggatttgggccattgcgtcatttagcctaaaatttaggagtgttagagaagttatcttgaggcagttggtcacaaaaaattcgatggttggatatgttatcacgcctaaaatcaaaatcaaccagacgcaaaagtaagtaattaagcttaagcaaacttgtgaggaaaaaataaaggaagccccaccatgtaaaagttttaccttgagaacagttatctaagaaaagatgctctatcaagcaacagtttctcgcaagtaactctaatatcggctctaacaaaacattcctgacaaagaaaaaaaaagagataatgttcccaaagaattcaatagaagatgcatctctataaagaaataaaaggcaaaaaaaagaggacatttcatgaaatttaaacatgcatacaaggaatatagctaataagaaaaagtaggcactctaacttacactccaacaattttcaaatcttttatattcgagcaggctgacaatggatccaaaaaggaattcatgttcatgaatccaagagagtaaatgtgtatacttgtcaatagatttctagttgaatggagaagacaaaataccaaacaaacatgctgttagagttaaaacatataaggcacttgatttattgatgatcaagccgacaatttatatatacccggaaaggttttccggatccaaacaagattttgtgaacatagatccaagaccaggaggatcaccaacctctttaatggctcttctcgcattatgtccattgagtaatagcggacgaagacaagatcttatgatgatacttctgggagcgttttcgctagcatgctttgtggatctaaat

SEQ ID NO: 9349 - DNA, 1734 bp, Arabidopsis thaliana landsberg
gactgactatgttagtaagacaataagtttataaaaattataatttttgttaagtactatgattaattagattaaaaagttacattgttacctctatcgggagagcatgaatacattgctacagaagatctatcaggagaactagaagccgtcttcatcgactttgtgctattgcttttgaacgagcctgaaaaatttaatcggtttatgttgaagacttggtatataagaacataaaagaaaaaaatgaagaatattggtaaggattttttacttggaggtgcgaagctaccgtaaaccgggttcaatccatcaaatgaacctgttaggagtgatttattattatgatcagaaaagttcaaagtcgatatgcaaatagttgcactcctaagaagagagaagaaacattaccttgacatgagcctttagattgtaaaccaaccaataagctataatccattataccttcttcttccaaaagctcgcaatctagctttgtttgcctgtaatgacatgaccccttttgtgtttaataaattgttgagtaactagaatcaagatggtagaaagaaagaggggtgggggtgggatagtacttgatgatgcgttgtctcgccaaaggatcaacgtagaaacagaaatcgaaatcgatgtccttcaaaacagtggtgtttctcacttcaattttcttgttagatcgacctttcggagaacctttaagatcatagagcttgttcacaaagatcgttgaatgtagcatgtttgacatcacagcaaaatatgtctgtttccaagaaaaaaagtaactaattagtggctgatcaaactctaataatggagtggtatatatatataatccttgtcaccttaacacctccaagaggcttcacagaatgagcaccaaaaatccttgtgaatagtgatgatctgtgataattaatatgtctgtagtaacgtggaagcatctctagtgtcaccttcacaagattgttttcaatgaaagactcaatatggaacatatatacacacttgaaaaaattaaaagtagattgtgttaagatgattttggggtaccttaatttcggattttcgaagaatcttgatgagaaaacggttatcattggaaatatgaaagacatttccaattttcccagaagaaatcttcttgagagtctcatcagtgcaaatggatagcaagtaatcatcatgatctataccctcaagttcttgaataagtctacaaacaacaacaaaaaaaacattacaaaaaccaattctcttcttttttttaccttaaaacatgaaactatgttattacgtacgtacccgaaaccaacgggacagtaatccttccaatcaaactcagtgattgagccaggtggcaagtgtttaatgtgttttgtagagtatcgaattcgattctccaccgtggctctcagctccatggctgttatcaatctcgtaaactttgccataatttaaaccctaaatagatcatagcaaaatcataaatttatgaacttaataaaaaaccttaaaactaaaaatttgattgctctacgtatatgaagatttacctgttttcgtacaagctgcaatttctgataaagaggaaggcacaaacagagaagatgaagaagacaagagagagtgattgacttttttattaaagatgatgattttgtatttctggtaggacgtaattagtgttttaactaatcagccgttaactac

SEQ ID NO: 9350 - DNA, 1709 bp, Arabidopsis thaliana landsberg
  unsure (1)..(1709): unsure at all n locations
acattgtttgggcagcagaaaacaaaaaagaatttacaaagttttttcatgtagaagacaagaagtttggcatgcaccactctctcttctgccttgcaagccaaatacaagcatgtaggagcaacaagccgaggctcatattccgtcaaactctttctgccaaaacacagtacccataaatcaaatgaccaagcctcgtgctacacaacgattaccgaagaagccataccttgtgtaaacaagacgcatatacgttactgcagttgcaacaactctgaatcatttttattcaaaaaaaaaaaaaaaaactctgaatcatagaagtgctaaatcagtgagccttgttcaaattgccaatgcctaatcttaatatgtttagatatatccgaaatcgaacaacaacaagaccatgaatatgaattaatatcacatacatcaaaactaaaactaagaaaaactaacaaaaaaatggagactggttattgttccatttattagacctcagcttaagaaagtcaaagagcttaaactaagatttaaaacaattataagagataattgatggacacgtgagagtgaaaaggcaatcaaaagtcttctccacactttttttttttttttgattttgtaacagcttttaatttcttgtttacagatgagatttaccaacctcaattaggttccatgtcttcgtgtttggtgaggttagattggttttacaactaaatgggagagaacaaatttggtgttggctactccaatgatcaatgtagtgaaggtgttcgatgaaatgactaatagagactttggggaaattacttcacctgaagtgtgttcatttcatagaagagctagtgaggaaagaatctttgttgacttgatactgaattctagaagcgattatgttaccaagcgttgttgccaaggatgctactgatgatttgagtgagtaaagatcttcctgcaggctgcagctttactaaagctgttgaagaaaagatacacagtgacgtggtggtcttgtctcttaatggctttctcttccggctgaaacggtatcctctgatttccttttgatttgtatgtaatcatctgtatataatatatatagcttattaaccgatcaatatgttgctattttgccctgcttgctaactgctgttttagacagttcatgtggtgttgtaataccctgggatgagaattttgttaagagtatttataagctcgtggaatcctgatcaaggattgtttatgttcagttcaagtttgattttgcaaacaccaggtttcaactatgttttctgattacaaccccactaaactgtattcaagtttcgtgtgcatatatataatataagcctctcttgaaaatttagcctctgaagttaacaagcnnnnnnnnnnnnnnnnnnngagttgaagcagcagtgcgaatgagctggaggatccaataggcaatgataggattgagtcatcagttcaagttacatttttgcaaacaggtttcaactatgtccttcaatacaatccgctaataattttcaacagtgcatggttttgtgctcttgaaaatntagcctctgaagttagcaagttttattgactggnggatcgaataggcaatgatagcaagaaaaatcgttaccagaaataatcctcttttctttctaagctcacgatgcagattagcattcacgacaacgagt

SEQ ID NO: 9351 - DNA, 1638 bp, Arabidopsis thaliana landsberg
ttttttggctcaacatagaattttaacgctctccatccatcaaacgtactcagctttacctttgttcttcatataccgatgcaagaaaacagcaagctcgtcgcttatacctctttcctctaaaaattgatagagtgcgtcttgaagctgatcatctaattccctgtaataaccaaatgccaaagccaataagttgagttatttcattcgtgtatctcaaatttttaatgttgaagaaaagaatcagtggccatactcaaactctggtccaccataggaagagggtgaagtgttgatgcctctacgaatgcagagcttcgatatctctatggtatctggccaagcagaacacatgatctctaaagcttcagtagcaccagccttggagatgttgacaatgaaagtgatgtgaagaatatattcaggttcagttttggtagattttgacgtgggaactgatctatcaaacatagttgcttcaattttgatgtcttctttatccccaaaattccttttcaagctaatccactgctctccaggccgttcatccacagtgaatggaccaaaactgttaggaggctgcaaatttgtacaagcaaaagtgctcaaagtattattcaatgtagccagtgggagaaatgtcggaaatggaagcaaaagttcatggaaatgcattgtagacgaactagaaagttgtcactagctaacgtatgggtttataagaggtcactgcaacttgccaaaaaaaaaaaaaaacttgcaaatcccaaaacagagaggccattgcagagatgtgaacattttcttcatccaatagtttccaaattgtatcaacctaagttacactatacagatcaacatttatatgattctcatgccaaaacaatcaattgatcaataacactattccaaaaccagattcctagaaggcttaaagaatatagaaccaaaaaaaaagagattcatagagaacctgaagaggaggcgagtgatcgagttcgtactcaatctcattacggatcagtcgcaaaatgttgccctggaaagctgatttctgcatttctgagacgtaactcccggagctcagacatctgcggctgattaaaattttaggatttagattcgtgggcaaaccaatcctagggctccggtgagcaatagaaggagacgaattagaaaagagtgttcttctcagacatctgacgaagcgagccattgacagagctcgattggggtttttcttcttttagggtttaagtcattaagatgctccatcgtacggttcttaaaatttgggataaatgttaaactaacctgcaccgttcaatttagatcacactttggtgtaaatgtgtaattatatattttcgtttttttatttttttggcggcagttgttattctgccgcctatttccgacccatcaaatgttgttagcttttttctttttcttctaggtcttctttcagttttggtgtgaagaaaaaaatctctccttttttgtttgtgtgtaaagagaaaaaatctcaattttctcaagcatcaatcaatcaatggcgacggagtacgagcggaagagattggagaacataagacggaacgatgagatgttggctgctctcaatgtccgcgccaaagc

SEQ ID NO: 9352 - DNA, 1072 bp, Arabidopsis thaliana landsberg
tgaattggatactgatactgatactgttataacttgttgaattggatcttcattgatttttgtatctagatcagagatctgtagtatcactgtttcgttttgcgtttctaatttgctagaaaagatgagattgaagtggaattagtgattgtcacaaggtgatgatgattgattttgaattgcaggggaaaattaggctatggcgatgttaggtgcacagcaagttccagcagcagcttgtactccagatatggtatgatccagattctttttgtgttgttttcttatgaaagtttccgtttcttagaagtacattgttgtttattcgtgtgtttataggttgggaatgcttttgtgcctcagtattatcacatattgcatcaatcacctgagcatgttcacagattttaccaagagattagcaagttaggtcgtcctgaagagaatggtttaatgagcatcacttctaccttgcaagtgagtgtactatatttacctcttctttgcatccttgaagttttcctacctataatacaagtatgtatatatattttgagcaggctattgacaagaagataatggcgcttggttacggtgtaatcagtgcagagatagctactgtggacacacaagaatctcatggaggtggttatattgtactggtgactgggtatttgacgggaaaagacagtgtcaggaggacgtttagtcagaccttcttccttgctccacaggagactggatactttgtcttgaatgatatgtttcgattcattgatgaaggcactgtcgtacatggaaatcagattccagtgaacaacgtccaagctcctgtcaacacttaccagggtgagttgatgaacctagcttttgtatttgcctccttcaaatcaatagattatttgttgctttctttttaatgggactttggtttttataagcgttgtaaatattcttttgccttagacacagctgctgcgaaggaaattccagatgactttgttcaggagatatatgtccaagagaatcatgctgttaagcataccgaggtgtgtccaagagcataatgagc

SEQ ID NO: 9353 - DNA, 1484 bp, Arabidopsis thaliana landsberg
gaacactgctcaatttgtttgaccgtggccccaaatttcgtttgtattttatatgagtcaaatcccggatagagaatgtgggcaaccttttaggaaagaaaagtggaaacaacgttgaaaaagtttggaaagagatttccactagaatttgaatttcatatagaaaagaataaacgtaaaaaaggcaacgtaattatagttgattcggtagtagctggacacattaaagttttaaacgctatcatcattcagaatgcccaaaataagaatcttacaagtgttttacatcttacaccacacggacatattttaattttactgtttgttggtcacttcgtagttcgtacttgggtaattacaaatttacgacaaaaaaagattgaaaaattagtttataattccctacaagtattctgaaccacaaaaacacacgaaataaaaggcagagctacaaagaacaaacactaagacatatatgtgtttctgctactatacataaaacacacaagtcataatcatcatcctcaaaacaagcaacgtcaagagatgaatcataatttgtggagaaagacaatgcaatttctaacttcaaaaaaaaaagaaaataaaacaatacaaatcctttgaattaccaacaccattaggccttgagaggctttgtagacttggcagattttctcttgaggacaatgacccaagtaacaacttccaagagtaacgtgatgcctcctaaggtcccaatcacagcgatataagccgtcttgtaagtatgctttggattcaagatgctaagacctttgaaaacattgatgattccaaggatgaggatagagtatccaactccgtggtggtaaatattccaaacgaatctaaacttgtggtccttccttggccgcaacagcatcgcaaacatctttaaacacgcgcaaaaagacacaaagcatcgtttcaataacagaacaaaacatatctttttaaatggccaacttgcaatatccactaatataacaaataaacactctttggtcctaatgagtattagcaatggtttaatttacctgaagagtggctatagagaagagactgatgccgatgttccggtgagtgttgtactgaatacctttagattctgaaccaagcttgagtccggtggcccatccggcaacaccgatgacataagcagagaattggcatgacacgtggaggtaaaaccaagcaggatctgctgattcaaagattctcatatacctagctatcattgctccaatgggaaatagaagtccccaactcactgcgttcaatattccatggatctgccaatttacacattcaaatggttgattcttcatgactttcataaacaataacaaatataaaaatcatacttacatttctcttgtggattctagaattaccggcaccaccacctccggagacagggactccgggggtgggcccggttaaatcgagtgatcccactgagt

SEQ ID NO: 9354 - DNA, 592 bp, Arabidopsis thaliana landsberg
atgtttgcgatgttgttgcggcctaagaaagatcacaagtacagattctattggaatatctaccaccatggagtcggttatgcgatcctcacccttgggatcattaatgtcttcaaaggtctcaacatcttgaaaccacaagacacgtacaagacggcttacattgcagtgattgccgttcttggaggcattgctttgctcttagaagccatcacttgggtcgttgtactcaagagaaaatcaaacaactcaatgaagcctcttaggacctaagccaacaaagatctggtcaacttattaaaggttcatctgcagttgttgttattaatttattatgagctcttgtattattaatgtttatagaacaagggtgtcacatgtattattgttctcttgttttgtagctttttggttttgtttgttgagtatttcttgggttatgaattcttgtaggggatgaatttttttgaaatagttcttattttactttgaatcaatgagttttttcagtttccaacaaattatttggacttattcccatgtgattacaaaagacaatcaaatatgtccacatgcttgatgcttgggcgta

SEQ ID NO: 9355 - DNA, 357 bp, Arabidopsis thaliana landsberg
tgcagattcatgggatattaaacgcagtgggttggggaattttgtttccgatagagcaataatagccaggtacatgagagtatttgaatcggccgatccggctcggttttacctccacgtttcttgtcaattctctgcttatgtcatcggtgttgccggttgggctaccggacttaagctcggtaacgagtccgagggtattcgcttctccgcccaccgtaacatcggcattgcctcttcacccttgccaccattcaggtaatttacaagaagatctctgttctaggctctgttttttttaccctttaatgttcatgttcaaagattaaagcttttgactatgttttggataccaag

SEQ ID NO: 9356 - DNA, 497 bp, Arabidopsis thaliana landsberg
ggagttaatacgcgtggaactcaaggatacatagcaccggaagcagatgagttcgcgttggtttctactaagtccgatatctatagctatggagttcttctgttagtgcttttaactggaaggaaagcctatgatctggcgagacctgttgcgaaagagaaactcactgattgggtaagactcaaactttgtatctaagttttgtttttatacgtttcgtgctctgtaagtaatgtattaatttagggtctcacgaaagtattttattttgcagttaatgccagtatggactagattggagtatgcgcctatgatagttgatgttgcgctcggtaataagtattcaattgaaggtttaaacaaactacttcaaactgcgaggatgtgtataaacccacaggcacttgaacggcctgccatggattttgtggaaacgatggttcgtgaagctgcagctttcccggtcccaaaggagcccctggtgaaagagaggattt

SEQ ID NO: 9357 - DNA, 550 bp, Arabidopsis thaliana landsberg
aattttacgactgagatcttttgtcttcatttctctggggctaagctttcttaaaataggagagaagatgagggagaggaaaaaacagaacagaaaagttcttacctttggaattttcttagatcatacgtctttcaaaaactaatctttctggtttcccgatgcattggtttggattcgagttccacgagaagccaccaaatcaaataggatcagatggatgattcttcaactttacaagacatgttgtgaaagatcttgactcttgatcatattataaacgaacaagaagctataccttgttaggttatctttagatccacgtctctttaattgttttaattagactattagcgttaacattcaaaaattcatgttgtttttgatcccatttgatataggagtcatttgttggtattgaatctatttgtaactacctgcgttgatataatggaggaagcatcaacatcgacaccagcaccaatggctgcaaaaccaaccgctgttaaaaagacaatggcgaagtaattcaccgggaaacgcgaagatt

SEQ ID NO: 9358 - DNA, 847 bp, Arabidopsis thaliana landsberg
ctctatcatctcaatgttcggcttgatgatatcacatgcagtattactcacaacggtaatctcctacgaatccaaagaacataaaatattaacagaagaaagaaggtaaaacattaataacaatttaaaagaatatgcaagtaaaagagaacctttgcaaatttttcaaccatatctgttttttcccaaaatttctcgacaacatacgcagccttcatgctcttcaaattatcagcaccaatggatatcttgaataacatggttttttcccattaaatcagcaagaaccttgggtaaaatagaagggtccgactgctcgaacaaatagaataatttgtatatcagcaagttttttttcagtcatgattgcccaatttataagttttcagaaatttaaaaacatgaaaacaatgaaaactcctctacgtacctctggaacttcggcaaacagctcagcagccgttttaccaataagacgttgagccaacccatcaaagaagagcaattttaacctcaggcgaagctccataagaagcacgcagaatgagcttatacctatatagattgagagacaacgttatttacaaaaaaacgaagctaaaacattgctgatgaacaaaccatctaattatgatatttaaagcgcatatgaacctataattaagttagtaacgttagaatcgcgtacaccacaactgtagataggaccagcgttgccatgagaaccctgtggatatggctgaaccttcttaccacatactttgcatgcaatatagtaccatttaggcatagcctcgacgaaacagattctggtattgtgcacatgggacacctaataaggagacat

SEQ ID NO: 9359 - DNA, 581 bp, Arabidopsis thaliana landsberg
  unsure (1)..(581): unsure at all n locations
taatgatgtctcttgatctgtatcgatataagctcattctacgtgcgtcttatggtgcttcgcctgaggttaaattactcttctttgatggattggctcaatgtcttattggtaaaacggctgctgagttttttgcagaagttccaaaggtacgtagtaaagtttgaatttttaatatttaaactttctaagaatttcaatatttgcccacaataagtataagaaaacttgatgagtttaatgttattctatttgtttgaggagtcggacccttctattttacccgaggttcttgctgatttaatgggaaaaaccatgttattcaagttatccattggtaccgataatttgaagagtacgaaggctgcgtatgttgtcgagaaatttttgggaaaaaacggatatggttgaaaaattcgcaaaggttatcttttactttatgaatcttaaaagtattattaattaatgttatgacttctgtcttctgataatatnttatgttcattggattcgtangaagtgacttgtgtgagtgattctgcatgtgatatcatcaatccgaaaattgagatgattgagtc

SEQ ID NO: 9360 - DNA, 1109 bp, Arabidopsis thaliana landsberg
tgaagaagtttcagttccagttgttgatgatctaatcctgatctctgacaaggcttatactaggacagagattcttgatatggtaaaatccttcactaaatcttgtcctgattataaccatggatgctctgttttatatgtggatgatcattattgtgtcttgcaggagaagttaatggcgaataccttgcaattcaatttctgtctgccaactccatatgtgttcatgagacggtttctcaaagctgcacaatctgacaaaaaggtttgtgtaactttgatgataatcttctgtcttatgtgatatataaagaatcaaaacatgatcataaggtttggtttttcagcttgagcttttatcattcttcatgatcgagctttgtttagtggagtacgagatgcttcagtacactccttctcagttggctgcatcggcgatctacactgctcagagcacacttaaaggatacgaggattggagcaaaaccagtgagttccactcaggctacaccgaagaagcgcttctgtaagaacatcaaaactaagtagctttttctactgatataatttggaatttctaaaagtgttgttgagttttgatgatcaatctctcacagggaatgttcgagaaagatggttggtttgcatcacaaggcagggacagggaagctaacaggtgttcacaggaaatacaacacatccaaatttggttatgctgcaagaattgaaccagctgggtttcttctgctgtgattcaactgttaaaattaggtcacacggaatctataatgacttgacctaattttatcactgaagagagagcaacataagttgcatcatatgggggggaagtttctgaacacgtacgtatctctgtgtgggttcacttgtttgttttcgaaatatctgtggatggtttagtcttctcattttcgttgataagagaataacagaaagcgttttttaaaactcttaactttttagggttcttcatttcaacatatttttccgctcttctgtccaaatgtccaagtcatatcttatcactcacaatcacaagttcacaacatttgtcgcgaaaataaattaagcttctggttttgggacat

SEQ ID NO: 9361 - DNA, 1889 bp, Arabidopsis thaliana landsberg
ctcttcaatgaacagtgtgagtttcctaaaaaaacagctaaacagttatcggtgatcgctaaaacctttcacagtttgattaagttttctcctgctctagtttaatttcatcaattttggaataaattttatttaaattatttttggcttacaaataaatttgtattggactgttcttgtaaaaattaaaacttttgtaatgaatagttgttaaatataaatattttgatagtcaaattattactaactattaagaatttagtccatatttaatttaatatgaactaaattctttgtttttgatcaaaaaacttataaaattaaacgtggaaaaagatccgatcctctcaaaccaaaacaatgacttggttcgtcacattgaaaatcaaagagagtgttaattaatttttattaaatatatcatgttaggtttgataaataaaattgttattctgaccgacagtccaaatcccaaacgcgttccagactacaccaacctgtgaaaataacatttttctatacaaaatataaaaaaatacaaaaatcttgaaacaaacgtttaaaaagaaagaaagactcaaagaagtaaaacaaaagtaattaattaaaatttgaaatagtagccgttacaagaaacttgtcgatatttgtatcaaaagacgtttttacacaaaatgacgaaaactggacttatcaataaaactaacacgtcttcacgtttccttgagaaattagcacatctaagtaaatgtctacacgacgtgcaatgatgcttttctttctctaattttttctttttaataatgactcagctactttagatttctttttggaaaaattcactcacgttttatcattcttttcctattttgatgtaaacttgataaggtcatttttgaattttccgtttactaattaagaaaattagaatattttatcatactctctttctctttccctctatcagatcatctttctcaaatagctctatttagatattcacatacatatccagttgtgattctcttccttatataaacctccacttaactcatcttcttaaaaacaaaactaagattgaataatcataaagaagaaaactgagaatgagaggtaattatctttctttgctagtagtgctcattgtcttggcctccaatgatgttcttgccaacaacaactcttcaacacctagattaagaagaagtgattttcctgaagatttcatttttggatctgcaacatctgcttaccaggtactttttagttagttttcttacaaaaaaaggtccgatcactggttagagaatttatgggtttttttttaaaatacttggtaggtcgaaggaggtgctcatgaaaatggtagaggacctagtatctgggataccttctctgagaaatatccaggttgttatttttaatctcattgttttttatgatctaaatatgagtatttaaagatccgtgaattttgttgaaccaaaaaaaagtaaagatccgtgaatttagtctagacgtatatttgtgaatctgttcatatgaaaaatggattgatcactggagaaatgatgagatttggaaaaataagtaaaaagttagtttttgattgctctgtttttgattcttcaatgagattatagttaataagctggaattaatgctttattttaattttccagagaagataaaggatggtagcaatgggtctgttgcagataactcttaccatctttacaaggttattttccattatttccattggctacataaccagtcacattctttgattatcattattaagaagaaacaagatacgttgcaggaagatgtggcgttattgcatcaaattggggttaatgcatacagattctcaatctcatggtcga

SEQ ID NO: 9362 - DNA, 1407 bp, Arabidopsis thaliana landsberg
caatcattcattggccattaatacattgttcgcgtgaattcttcgctgactcgttacaatcacaatctacgcatatcatctctttatatttgtgatgaatttgaataatcagtctttgctttagttcagaatctcattcgatacgcttgttaaacaaatgctaatcgaaagaagtaagcaaaccaaaaaggtgtggacaagtttttcgtatggttgattctagcgacgtagggaaagcggcaatttggagtgaatatgtcttacttccatccattcatggcagtaatattatgttctaattgactagttgatacccttaaaatatgtataatctctaataagctttcttctttatttctctacataatgaatgaatttcatgatgttcacattgctaagcatgttttaggtgatatgatttgcacataaaagtttttcatatgcatatgttttgctcatgttttgcatagttatgttatgcataatggacgcatctatatatttataatttacaattcattatcatgtaaaagataagtttaaaccatgattttttttgtaagaaatgttttaccttttctcttcctagtgattttcaaaacttccatatcttttttttaaaaaaatcttgtgtagtttatatttaaatttacaaattgaaattgttatgtgattaagaaatcaatatctaaaattatttctatgagtcggaacaaagaataaattaaattttgtaatttaaaataggtggaaaaccatatgacggtttctttaatcaaagaacatgagcagcttgatatggtttcgctataggctttcatcgtttcatccatttagctctattctttttttgtgaatggttttggaacctccatccaaaccatcttcctcctcatattcatcagcatgaccgatagcttaaaagatcgttttataattgttgttgtgtatggagttgaggttttggttatgagggtaatcgccttcacgacattaacttttgttcaatcattcattggccatgagaacattgttcgtgtgaactttttgctgcctcgttacaatctcaatttacacacatcatctctttatctttgtggtgaatttgaataatcagtatttgttttaatttagaatctcatttgatatgtttgttaaaacaaatgctaataaaaaaaaagtaagaaaaccaaaaggtgtggacaagttttccatatggttgattctagcgacgtaaggaaatgcggtaatttgagtgaatatgccttacttcaattcattcatggcagtatgttatgttctaatagactagttgatacccttaaaatatgtataatctctaataagttttcttctttatttctctatataatgaattgatttcatgagattcacattggtaaacat

SEQ ID NO: 9363 - DNA, 733 bp, Arabidopsis thaliana landsberg
atgattctgatgcttccgcatttgcattctttttcggattttcattcttttgtatttgcatcagtttcctcctacaaaacaaaagcaaaaatatgttcaaacaccattacaaattccaaatatcgcattgttaattgcttctttataagaatgacttacctcttacaagagatatatttctctatctctggtttctgctcaggtttaaaagctaaccatctttcatgtggacataaatcatcaaatgttcctagatctgtgcattgataagatggagattaaattactaaacacatttgaatataagaaacataaacaaagagtaagtaaattcaaaccttgaagcaaaaaaaattgttcttcttcaaaacacttcaatttccagagaacaaaaccattatcatccaacatgattggttccgttctacgcgcatcacatataagcgtcactgcagatagatttcaccatgtcaaacaaaataatatctaagataacattcgttagacaaaaacaaaagactcaaagaatttagacttacttttagatttcatgccctttgcctccatcatttcttcatgagcttctttagcttcatctcttatttgagacacgattgagttgtgttcctcaatagacaatggagctccgtttttctccataatggatttggcaacctcaccttgcatcttctgtttgagctgcttcttcttaatataaagaccaaacgagctt

SEQ ID NO: 9364 - DNA, 963 bp, Arabidopsis thaliana landsberg
ggtggatttcctgttaagttgagtatgtgggttttagaggatgtcgagaaaccggaatggtcgaaacatgtctactctttgtggacggagagtgaagtcgttaaggttaaccggaatctttctgtttctgggatgactgcaaccggtgacattgttttatcgatggaagatgcaactaatccgttttatgttttcaacttcaatccggataggaacactctccaagtccaaagtgttgaaatccaaggtcttggagctaatcgtgatcacatagcttgccatgcctttgttgactatgtagaagattttagtgttagcgatgcagtgctgcaactcaagtcaagccctttacaacaacaaggccaagatacatctcatgacctctccaagtctgtgaagaacaagcaactggacaattatgaattcttagcaaacaagctcaatcactctgttagcttagctattttattttgtttgtttttccttctttttaactatctcattcggttgtgttgggttagataattcatttcttatcgagtaaataacgaaacaaaaataaagagtaatcgagttgtgaagtaaaaggttaatcggtgtactacagggccgaagtatcgttatcaacaagtcaaagccacaacaacgccggcatacatctcgtgacctatgcaagtctgcgccgtctgtgaaaaacaagcagcataacaagtatgaatcattagctaacattctctatcactctgttggctaagctattttcatcaactgtggagacattcgtgaatatgcctaatagtttgtaaatctttgtcaaaagtctcaatcggctcttaagctccaatcccaatttttcttgatcatggccaaattaaaaagcttatccatggataaaaaaaaagtttcatgtagttttgaaataggactagcttttgatatacctggcaatgtttagcataactc

SEQ ID NO: 9365 - DNA, 738 bp, Arabidopsis thaliana landsberg
cagctttttgaagtccatatttaagctcctcgagatttatcttgcctttcttgtttacgtccatcatttcaaatgcttcctttatccctgctgcttcctccactgacaaatgttcagctatcacctagaaggacgaaacaaatttacattttcatttttgattctgaatcagactggaagcaaatcgataatcagtgacatggtttaacagaatcaatactcgtagagctcgtttcttgagcttgttcataacagaaaactgctttagtcttgctttcacagtctccccaagagagacatttggagccttctttgcattcagtatccaagtatgttctgcaaatggaatatttatttatgagtttacgatttcagaaagctcagccttgctgaaaacagaagcctaccgagaacttgtgcagcagtaagccgttttttgggatcaggttcaagcatctttctcacaaggtctttggcgctgtcagaaactcttggccatggatctctcttaaagtcaataactgatctaatgatcgcttgagccaccccttgctcagtctctgtacccaaaagaaagataaaaacgtctgaaagaggtcttaaagtgaataagccagaggaaacaaagagaatgcggtaaagcataaacaaacctgcccaaaatggcgggacaccacaaagtaggatatagaggataacttcagcgctccacacatcgatctcaggaccatagtttcg

SEQ ID NO: 9366 - DNA, 579 bp, Arabidopsis thaliana landsberg
gtgtgcattggccggggcggccaagaagacttgcataccaaaaaagcaatgcccaagcacagaacaagaggctatatgttaatccaactcctaaacctttagcaagaccacttcttttactgagtttcagagctttcttgagagaatttgagtaagattttacagctttctcttctcctacaaatgcatacactgttctcacctgtgacatgacctgaagttcatagagaaatatgtttttcagagatatattgcaaaactattttggataaacttaaaatgttaaaatggttttgatcatactgtactttaacttttttttttttttgaaaacttttttcacacgtaaacgcatatatttgtttttttgaaacaatctcagccatggagtctaaaacaaacctcttctgcaacttttcctgcatcagcataagcagcctcactcttctctgatattgtagacatgactatagcataccctcctcctgcaattgctatcagtggaaccactcctaacgtaagcaacgttagttgccatactgacaaaaaaccgatgacagatcctgggatgaactgaca

SEQ ID NO: 9367 - DNA, 1505 bp, Arabidopsis thaliana landsberg
aagtaaaaacaagagcttatcgtaccaaaaatgcgatggtgtcaatcgacacctttttccaaataagccgttttaacctaaaacttggtcttctttatttcatttttctcaaacccgccgaattcactaaaacctccatagatccttggattcttcaccatttctcgtgattccaggctttaaactcaatagaatctcaccctccatcttccccaagtgtcaattccatcgatctgcaagatgacaagccagaaaaagaaggctaggatgagcgtcggaccttcctcctcctccgccgtccctccacaccgccggcgcttctccaccgccgacttcttcaccgccggcggtcacagccaatcccaaccggaatctgacgctgcagcccctcaacctcctattcatcgatttccatggccaaagcatccaaaagagaaaattccttctcaaagagtttgggagaaagatgtcaacaaggaattcactaaaggtgactatatcaatcgccctttttctccagattgggatgattttgatactctgttctataatgcttggatgagtgtaaaaattttgcctactcaggttgcggattttggtttgatgcagcgtttgcagatagagaaatctgttttaggtttgctagatgatattggtttgggagccatctattgtaggtagtacgatctgtatcctgagctagttagacaattcatggcttctgttagggtctactatgtgaatgagaggaaacacaatgcttaggaaggagctcttatcttcttcattcgcggtgtcagatacagtctaccactgagagagttatgtgacctatatggtttagacaatgatctcactagagttgctctacttggacagtttaaggatgctcagattttctggagcaggtttggcaatggaatttacgattccaaggacgcagtacactcagagattcgtcaccatgttctgagatatttggttaggctgattagtagcacactgttgtgcaagatggaacctggcaagatgagacattctgagttgttgttgttctatcatgctgttcatgatttctttccagacagctttggatttgaggaggttgaccgtgatgtcaactttggcgctgtatttgctcatcacttggtctcactcaagaccaagtcctttataggtagagggaagaaatctgagagagttggcagtcttctactcctatatttgagcattttcgcatcagctttgagggagaagaggtcaacaccacgagattcactatggatgagagttatcttaaaaactctcactggatgaaaggcaacttcctttggtgtttcagagacaagacatggcaccatatgattcagttaccttgcaccgcgcttacagagattaatggcgagcatgaggagctcggtttttgtcccgatccttccttttgcatgttgcaccacgcaccaggcgatagagaggttcaacttcaggatctgtgcatgcatact

SEQ ID NO: 9368 - DNA, 1943 bp, Arabidopsis thaliana landsberg
  unsure (1)..(1943): unsure at all n locations
aaaaatattggccccaactttagtcttacaaatcatttttgccatttgctttcaatgattctgttcaggtgaattaaaagacagccgtaaatgaccaaacaagtttttttctttggtttgtgccaatgttgtcttcatgttatataattcgaatttctatttagaaaaatatgcgtttttttaaagattaaattatggatatacacaaatgtaggctgtataaatcattttctttcaataaaaagcttttgtcaaaagtatggatatacacaaatgtacgagttgctcgaatttaatttcaaacctgtagctcagttgcttgagaagattgcggtaaaggcaagaaatgttcaaagtagctatggttgtacttacatttagtcttgaaattcaacttcttcacaccttgcttaactgccttgtcaacattttttgacatcgtgaaccaagttccacaaccaggcttactagtttcggtgcctcatggagttgcagtgacttgtcaatatttttgaatcaaaatataatagtaatcaaagtcaacatatttatgtatcatgatgctatactgttattttacaaatttatgtacatataggcgttttattgattattatacgcaaaaaaagcgtgtaatgtattcatgctattgggtttattttaaatcgttccttcttcatctatattacagtaccactctatttataaccacacaaaagactactagtatacacaacaccagcatgatgtttcagacgatgatgatgaatcaatctccgaactcaaagtaggtcggcttgggagtcgaagggcagctaatggcttcaacaagctcttgaacagtgagcatttgaaactttggaggcgnnnnnnnnnnnnnnnnnnnnnnnnnnnnnnnataaatcttgccattcttatcgaatttatactcagaagtaccatcgaatcgaccacgagtctcccacggaccacgaggaattccatgaacagtccatcgtatcatcagagtgttctctgtgggttgccaaacactaacaatgtccacacatagtgctctgaagaagatccttccatggaaacgtaaggccccaaatatggatttgtagttatcaattcccatgaaagtgttcatagggtctttgaaaacaatatcatccctgcgaaattagacaagagaaagagctaatcaccaactgataaaacagatcattctctaagaaacctaaccaagaacagatcaaatttgggatataagcatgactctgaagcaaaaagattctttgagaaagctaatcaaagagcagttcaatttaaatcgagaatcttcatcaaacctgtaaatgtcaaaattaagctctttgtagaacaacaaaggaaactcttctctgatactacgaacggcgtgacccatattcacgtagtaactctgcttatcttcttcttcttcttcttcctcctctctgctaatcttgtagtcttctttcaccggagctgagaattgccagtacaatctcgatttcggattcttaacaccaggcaaatctctggcgtcaatcgccgaaaccgtagccttcctcctcataaacacatgactaataacactcgaattcgcatcggagaagattctcgccgagacggtgggtatctccggcgaacgaacaaggaatgccatcggaggatgaaaagaccgggtaggagattgaagatttaaaccaggacaaacatgaaaacgataagggatttgcgtaggaatatgctggattgagagagaagacaagaaggcgcgacgcgaggataggtcaggaaatatgtcctaaggataatttttcaagtccgcatggataacgattctcggacttgtcacttcaattcttcacgacaatgactcgtttgaaggtctgatgattatccaaaattgaaatatatgcggtccattatggtag

SEQ ID NO: 9369 - DNA, 643 bp, Arabidopsis thaliana landsberg
  unsure (1)..(643): unsure at all n locations
cttgctttgtctgccctaacaagctctcgttttgcacaacgacatccgaactaccttgcgtcttaaacccgtcatttacatcaggttgaacgaccatcatatctccttcaataggaggtaaagaagcaacagacaaaggctctgaactagatttatgtctcttcctctgacgtctcacagttccatcaatacactgctgcaaaaagagcctnnnnnnnnnnnnnnnnnnnnnnnnnnnnnnnnnnnnnccctttttaccagcaagatgttccttaaccctagttataccaccacctttgaacattttccgacagtagagacaacgcatctgaagtctatcaccatatttgtaaatttcacaatgcttccatgcattgtcttgtttctgaggtgtaagagctacaggttctaattccgcatccatctaattcattcaagaggaagaagatataagaaaaggtaaagactttgttaatgggtaaataagcctagatcctctaataaacaattcgagaaaaaagatttgaaatttcgcagacctcatgcaccaaattcttagccggaataaacaatttcgatacaaacaaaacaaacccgtaaaaaatttgtacaaggagatgaagagaaaagaacctgatttggt

SEQ ID NO: 9370 - DNA, 1275 bp, Arabidopsis thaliana landsberg
aacagtctagaaacacaagatatgatgcggtagatgacctagaaatgagaaagccaatttctttgaaggcccataattctaagggtgataagttagaagaaacgtgggccaatgatgaaaggtaatttttcaataacctcatccttgttaatgttttgttgtagatcagaaatcttttgggtatcttgtgtggctcgtaactattttgcggtcaggtcccgaaatgaggatggtcaagatgataatgacgaaggacttacatggaaatctcctgaggaagaagaagaagaattactaaatagaatcaaggaagagagcaggaagcgaatggaagccatactggagaaacataagaggaagcccgagcagcaaaatgaacttttaactcaggataatgggaaaggtattcgttcagtctttattgtgatcaccatatttcacgactctgatttcttcaaatatgaggttttcacctttctactcgtggtatatgtgaatggctctttaacaaaaagctgtaacttgttttcattagatttcactggttgatctcacagacaatgtctttgtccatacaatactctcccacgttcaaatgtaaaaacttgttttgagatgtttagcattgaggcattcccagtgattcttctgtttttgtggcagatgttgttccagaaactggtgctccagtgtcgacttctcctgcagttgtcatagcagctaatgtaggccaggccaaaactaacttggactttgatactgtcgctgccaaggcaccattaatagccggtgggccacctactatgtctggaatttcagactcagagaagaatcaagctcaagcggggcttggtgaaggtagcccgaaggtgcgttagcaaaggaaaccttgattgtttctttggtattggtgatcatgtgtggctcgagtaattcttggttgtaggtttatactatcggtatatataaatatatgtgatgatgatcttatattcttatacacttttatatgaccagagtgaaaggtcaggtgacatgtatcatgatgatatctttggagagtccccggatggtatccgaaaagcggtatgtgtttaactaaactacttaatatcgactaaccgtgtatttgtactgtttactaacctgttgacgtcgtcatcttaaggatactgatatgatcatcatgaaaccctttttctttagtgtatgaggaaaattttgtgagggtgcttaatattcactattctcttatattaaacctacttcttttag

SEQ ID NO: 9371 - DNA, 2396 bp, Arabidopsis thaliana landsberg
gtgtttctcttggtatagaaaagagatgtcgagtgatttgcaatcgaactccggcagatgtacctccgaggactagatattatgcggatagctcagcccgtttgggtttcatggaggggcctgagatggagagaaagatgatgacaagctatgcgggaaacccaaagtactccttcttctggagctcagatcgttatcatgcttattaccagaaaaagcttgctggataccgtgcgcagaattacatgagggacctgagatcaaacttagtgattatgggatacctgatgttccattgagggtgagggtaagggaaccaccgcttcagattccaaaacctcctccgggctttgctagtgaccagaagccgacaatgaagtatccgcctccaccacctcgcaagtatgcagctatactccctgaatggattactggcaaagagcttgaaactatcaaggaaggggatatggacgagaaacagcaacgatagctcttaagaaatcagctaaactctagcaaaaacacgtggattgctaatatgctttataggttataggttaaatttgttgaggtataaaacagtcatttcaaaaaatcaaaaattcacgattaatttagctattgtttaaaagtttagatattaaataatatttttttcttttataaatcgaaaatgtttggatattaaatgtataaaaaactagaaaagtaaataattgggcgtttctctttatttgttgtttccctcgattagccgattgcgtctgcaaacgcgccaacgtgctactttttctccggagccggagctctcaaagctgaaaccctaaattttcccggtatcttcctcatcgtcgattttactcaatttagaataaaaatcggaaagcaatcgaattctagcgacgtgaattaagaagaaagagagaggcgcgattattgagtgggttctgaaaaacccgaaaatgccggagcagccaaagaaagttgctgataggtatctcaagcaagaggttcttgggcaaggtacctatggagtcgtcttcaaagccactgatactaaggtcatatctttgctgatttttgtttgcaaaattagggtttaggatctgtcggcaattcctaatttctccttcttttttggttccggattttgattgaagtttttgttggatcaaggggaagtaattgtggggtgtaattttgcagacggaacaaactgtagcaattaagaagataaggcttggtaaacaaagagaaggtgtaaatattacagctctcagagaaatcaaaatgctcaaagagctaaagcatcctcatattattctgctcattgatgcatttcctcacaaggaaaacttgcatcttgtctttgagttcatggagactgacctcgaagcagttattcgcgattctaacattttcctctcacccgccgacattaaatcctacctcctaatgacatttaaaggacttgcttattgccacgataaatgggttttgcacaggtacatttgtttatccttaacaacttgcttattgtctctgtaatgttgcttggtttgggcactgattatgtgtggcttgagttcagggatatgaagccaaataacttgttaataggagttgatggacagcttaagcttgcagattttggcttagcacgtatatttggtagtccaaatcgtaagtttacccaccaggtatgctttttgccgcattgccattttatctattgctgtaatataaccaaattgatcgactaactcatatgaaatattgataagaaagttttaagtagttcttatcagtagttatgtctagggatgaggaagattagatgtctcatgtcttttcatttctctagttgtatactaaatgtaacatgtattaaacagtctcaatttatattaaatgatggtgcagtagctatctcatatctgtactaaaagttttgctgttaaccggatttttgacctgagctatttctgccttctttgtttccctttgaacacccaaaattacaatagaatccatgtgagctctgtttccaaatgcgcaatgcaacttattttctcttgtttctagttgttatattatcttcatatcttgatatatctgataatgcacaggtgtttgctagatggtacagagcaccagaacttttgtttggtgcaaaacaatatggtgctgcagttgatgtttgggccgttgcctgcatattcgccgaacttctactacgcagaccatttcttcaggttaaataatcttactcaaatctaatggctaccattaaaactttagtccaattgtcatctctttggatgttatactcactctcagactacataattacatattcattatcaattttctccgtatgtttacttattctattt

SEQ ID NO: 9372 - DNA, 2170 bp, Arabidopsis thaliana landsberg
  unsure (1)..(2170): unsure at all n locations
gtatatcagtatatgtatatgtgcgttgagtataaatacgaagtctcatcttctaagtccaacaccaaaattatttttctctcttttaactacaagtctactacaacttccaataagagagaagagacagagcattaatggagtcaccaagccttccgatgacggccaaagactggaccaccaccagtctccaccgtgtcttcgccatgcaaggcggcgaagatgacctcagctacgtcaacaattccgatagccaagctttggctataaccttaagcaaaccaatccttatctcatctctccaatccatcaaactcttctccgaccaaactcccatcaaaatcaccgatctcggctgcgccaccggctccaacacgtttactaccgttgatacggtggttgagacgttacaacggcgatacactgccaggtgcggtggtggtgggtcgccggagtttgaggctttcttctgtgatttgccttctaatgacttcaacatgttgttcaagttgttggctgagaaacagaaagttgactcgccggcgaaatacttcgctggcggcgttgctggttcgttctatgaccggctttttcccagaggaacgattcatgtcgctgtgagcttaagtgccttgcactggctctctcaggtctaatacactaatcacttttctataaattattttttgttactctttatttatttatttattcataatattcaccattcaaaataattaacgacgtcaatttgacattataagatatatatgatatatgattttttttagcattctactaatgttaaatcaacattttcttaaatatcataagatttttctatttttctatttaaggtaactaatatatttttttaagtgttaggaaatactatacgttacgactttaactataaatttgttaccttgattattgcaatgaagattaatgtccatcacccaaattaattaatcaacaaagacaatttgacaatataaaaaatataaaattttgtttactatatttcagtctcaaaacaagaacctaaaatgtgtgcattgaaatatatatgcagataccggagaaagtattggagaaagaatcaagaacgtggaacaaagggaaaacgtggatagaaggagcaaagaaagaagtagtagaagcatacgcagagcaatcagacaaagatttggatgatttcatgagctgtaggaaagaagaaatggtgaaaggaggagtgttgtttgtgttgatggctgggcgtccttcaggctcaagtagtcaatttggggaccaagatactcgagccaaacatcctttcacaactaccatggaacaagcttggcaagatttaatagaagaggtaaatctactctacatatatacaaattacaaacacgtgtatctttcatgattatattacataaccgttcatgatgttgtcatgtcactatatatcacaactaccatgaaattaagctttttcctttttacttgtttttcactaaaacattacttttaacatttcatgtgttttttatcacctatatttaaaagaggagaaaaattcttatcacaatccatatcttttaagaataaaaatcttcaaaagttttttgtcatttaattttccataaattagccaaactatttgtcactcaaacgttttatgttcgtttggacaaaagggtttgatagatgaagaaacaagagacggtttcaatattccggcgtacatgagaagtccggaggaagtgacggccggaattgaccgttgtggtggtttcaagatagggaaaatggacttcctgaaaatagttgaatattcagatgagaaacaagaagagtggaagaaagatccggtttcatatggacgagccaggaccaatttggttcaagctgctattcgtcctatggttgatgcttatcttggaccagacctatctcatgagctcttcaaaagatatgaaaatcgtgtttctacaaaccaagaatttctccatataacttgtttttatggagtcgtcgtgttttccgccatccgagtttaatgttgatataatttagctatagattatagatatgaacggaaacattntttttttatgaacggaaacatatgttatgcaaaaaaaaaaaaaaaacagctatgctttgttcgtttccatgt

SEQ ID NO: 9373 - DNA, 1551 bp, Arabidopsis thaliana landsberg
ggttaagtatttaggtaatagacactagggagttttcttttcaacgagaggtaaataaagttattctaatgttattcggattctgaaaacatctggtttctcgaatgttattcggattctgattatgatgacaccgacagggatgacgacgactatgccacaattatgttgactatagtctatattggactcttcttaacaatgcagtggcaggttttattttctgttcttgtcaagttcaatggcgtgtggcgctgtgaaatgatattatggtgatccgttggatttagtaaaaaagttaatgggctcggttaaggaatgttctcttaaggcccttgaggaactcacaaaggccagcaaagttttggtaacgatcgagggtttgtttcttgaggttacaaacttaccgcacaaattgttaacaaattatagttaattttgtttttttaaacaaattgtaattcaatgcaatggtacatatatgttgtaatatatttagtaactttcagagtggaatttagactagttgttattatttgttttgtgattattttctttattttaatacttatgttatcagtattttaattatgtttaagcttttctagggctttgcaagcttttgtgtagagtcgaagctattttcatattatgaatactcgaatatatatctaccctgatttttctttaattccagggacagttgattttatcatttctatttcctatcatttttaccaacatttttctactctttcgaactttagtgggattctgtctgtattttcaaaatgctagtaaaagtataaaccaagttgatatttttagctaaagttgcaaaagattatttcctattggtcaagactcaagaatatatatcagatagattctttctttatatatagatactgtttgtttccgatttgattgctccactataatcatgttgttgaacatcgtccgtttatgtcccaaattgtttcgtcgaaaacatgaatggtttgttgggggtgcgaaaacacatttacggccatgattgttcctctctctctccaagtgtggcatgtactcgcaatcggtgactgtggatgtcggattcggtccatttcggtccaatccgcattcaatgggcttcaaggtgaattgggcccaattcaccgcccagcgtgagcctgaccgtttaaagaacgatccgacattaatatagaaacggaaggatcacgacttaaaccgcgcattaaagtcccgagttgaagattcgtaacgtacgaccttaataacgcgagatccgcggcgtgaagtcagcaagtaatttaatacgttagatccgatgtattgagtataaatacgagtcgatgacatttgtaaagacgacgattgaataaacacgagtactatacacaaaattcaaaagcattttcttctcttttcgactcgatcgttgttcgtttaacaagaccaaagatccccgtaaaaacaaccacaagcttctaaccgcggattccgacatccacaattaaacgctaaaaggagggggcttttagtctttta

SEQ ID NO: 9374 - DNA, 1011 bp, Arabidopsis thaliana landsberg
ctggacttccaattttccattgcccatattttctcttttcttttgtttttatccaattggtatcgaatcattcatataaaattataaattatgaagtcaaatttttcaatagtaacacttgagtaatagtggtcctaccaactttttaccaagacagatatattttttttaatacactttttaccttttactgtgtttgcctcaaatgagtgtttttaccagtttctgtgtatataaatctgcactccactctcagtttatcttcatccacaagacagttctttaacaaagtcattaaacatttcccttaccttctaaagatcaactctttcaaacacttactctgcatgtaacttcatagattgaacgaagaaccaaaaaaacagagcaaaacaaacaaaagatggttcaaaaccaccaaacagttctcgccgtcgatatgccacaaaccggcggctccaagtacttggacgacgacgggaaaaacaaaagaactggtaacaatgtttctctctttctctttaattcatattgagacttggttctctaattattcaaaaaaatattaatttaactcgaaacctgctctgatttagttatgttgaaaaaacgagaaagttgaaagtttttaaattttgggttttagggagtgtttggacggcgagtgcacacataataacggcagtgataggttcgggagttttgtcactagcgtgggctacggcgcagctaggttggctcgccggaccggtggtgatgttgctcttctctgccgtcacttatttcacttcttctcttcttgctgcttgttaccgctccggcgaccctatctccggcaagaggaactacacttatatggatgctgtccgatcaaatctcggtaaatacaaaacttcaaagtagaaatcggacaatggagatcagatcagaacagagcattaacatttttcattgttctgtataggtggcgtgaaggtgacgctatgtgggattgttcagcatcctaatatc

SEQ ID NO: 9375 - DNA, 1784 bp, Arabidopsis thaliana landsberg
acataacaaaaaccgagcaaagaagcaacgaagatagaattcaagagctggaggtaatgcgtctaacactaaaagaacattcactatttggctcattgttttgatgttgatgccaaattttggtaatccaggaacaaatcaaactaaaggaaaatactttggaagcctcttcaaagatgttcatcgaaaaggaaaaggatttggaaaacagaatcgaagagttgctgactaaactccaaaatagccaagaggtagaagaagtaaccttttatgatttagacatactttcctacaacctcagacattagaacagaactcttattttttgaacagactggtgaaactcatcaaggtccagaagcgattgctatgcaaaacaaggaagtattgccattaaataagaggtatgttcatgaacctacataaacaaagaaaacaccgatgatttctgatcgttttctgcttttacagtgacaatcctcgagatttggtgaatgaagtagcatcgctaagagagcataatggattgatggagatagtactgaagcagatgcaagagagatattcagagataagcctaagatttgcagaagttgaaggagagagacaacaacttgttatgactgtacgttatcttaaaaatgccaagaagaagtgaaaccgatattctccgaagaatcaatggtgcaatattgtacaaatttctcttaatttcatatatagttttttttttttttacatatatatatatagtttctcatttttttatatatgattttcctgagagaataagtgagtttcgagttttggcttctttttttttggtgtatgtactatttgtaatagataccgcggatataattattgatgttagtttgcttattttcatcgtattaaaaaaatattctttctaaattcaccatttcaatatttgtttctaccactccaaaaaccaagagtgtaaccatgaaacaatttttaaatacaatcaaagtatgctcactagtttaactgttacaacagatcaatcaactcataaatgatcaaataaagaatctaatctacaacaaacgtagcagatgaacaagaaagacctaagcagcttttgtgattgagagcttctaaattaaataagtgttacctctctcttcatagcaaagtcggatacttggcgtcaagaaactctctgagacttttagcaactttgtgaccacccatgagttctgctaacgtctccacaggcaaagacgcgagctcagccaaactcttacatttctccataatcgatctgtagttcgcgtctgaaactccaggaagccttctcagaaactctactgcagatgtgttatagttctcggctctgtttcacatcatgagtcaatttcgatatttacaaatgcaaataaaaaaaaaggattttgccagtttaagaatgagagttttttctacctgatgtcattttctatgatcccttcttctgaaggcacaccaactcttattgctcgagtctcgtcgggctcgtcttggttggattttaaggtagtaaagatttctgcggttgcatgtaaacttcgagaccataataaccttaaccgaggagaatgcagaactagcaatgatagttttgatatgatgttatatggagtcacatcatctgatatatcactcgaagactgcaaaagcaaaaaagaaccgatccaaactcaatgaagaacagatcaaaacatgagaagacgaaaattattttgactgtgaagcttggaatgtgagagggcacctaagga

SEQ ID NO: 9376 - DNA, 526 bp, Arabidopsis thaliana landsberg
tgagaatgttaatataattctataaaggtatcatgagtgtgtctctgatatatacacatatatattcatataatatgtgtgtatatagcatcgtattcagccaccaagtaatctgatacagaaactttctatgtagccctggctggcctggaactcactatgtaggccagattggcctcaaactcacagagagccacctgcctctgcctctgcctctctcatgctggaattaaaggtgtgcgccaccatgcccagctatccatagtgtttaaagcaagtgtttgctttcatttttgttttgagggacttcttgaagcggggtgtgttgtgccagggaaataaatgttagtgatccccaaaaacacacacagtagtcattctaatgtaactcacagcagggtctttattcaagctagctcgctgccacacacacagcccccaatgcaccactgtcatgctgggcagtttgagtggtgggggaaccccgaatgtctatcggggcagggctttatagtaagcaacaagc

SEQ ID NO: 9377 - DNA, 2159 bp, Arabidopsis thaliana landsberg
acttatcatatacatagtgccatcaattgattttgaaatctctacatcaatcattcttctcgagtatcaatcattttccgtaagaaaataatgttttcgtatgatggatgtgacaattgacgtacgtgtagattctgatctaatacttggattcttgttcttggaagtactttttttggaagacatctacagattttacgaatgaagtgataactacatttttattatgaaaaacaaaaacgtcaaaatctaacctactacattgttttaataaatttgtctgaatcaaaaatgttacaggggatggtggttctatggctaacggcgatgttgccgcaagtaaaaccatcaccgtgtgtagcaacagccggaaccaactgcagttccgcgacatcttctcaattggctctcttgtataccgcattcgcattaatatcgattggatcaggaggaatcaggccatgttctttagcctttggtgctgatcaattggacaacaaagagaatcctaagaacgagagagttcttgagagtttctttggttggtactacgcttcttcatcagttgctgtcttgatcgctttcaccgtcattgtttacattcaagatcatctaggatggaaaatcgggtttggaatacccgcgattctcatgctgctcgcgggtttcttgtttgttttcgcgtctcctctctacgttaagcgcgatgtgagcaagagtctgttcactggtttagctcaagtggttgctgcagcttacgtgaagagaaacttaactttgccggatcatcatgactccagagattgttattaccgtttgaaagattctgaactcaaagctccaagtgacaaattgaggtaaagtgaaatcagtttcacatatatagttcttggttagtttttttatttattgatactttcttgcaattgcttaggtttttaaacaaagcttgtgccataagtaaccgcgatgaagaccttggttctgatggtttggccttaaaccagtggaggctatgcacaacggaccaagttgagaaactcaaggcgttggtcaaggtgataccggtatggtccacggggataatgatgtcgataaacgttagccagaactcttttcagttgcttcaagctaaatcaatggacagacgtttaagcagcaattcgaccttccaaatcccagctggatcgtttggtatgttcacaatcatagccttaatctcatgggttgttctgtacgaccgcgcaattctccctttagcttcaaagatccgaggcagaccagttagagtcaatgtcaagattcgaatgggattagggctattcatatcattcttagcaatggcggtttccgcaactgttgaacattacagaaggaaaaccgcgataagccaaggactcgcaaacgatgccaactcaacagtgagcatctcagcaatgtggcttgtaccacagtatgtactacacggtttagcagaggccttgaccgggataggacagaccgagtttttctataccgagtttcctaaaagcatgtcgagtatcgcagcttcggtgttcggactaggaatggcagtggctaatatcttggctagtgtgatcctaaatgcggtaaagaatagctcaaagcagggcaatgtgagctggattgaagataacatcaacaagggtcactatgactattactattgggttttagcgatcttgagcttcgttaatgtcatctactacgttgtgtgtagctggtcctatggtcctacggtggatcaggtgaggaatgataaggttaatggtatgagaaaagaagaagaggaagttattaaattaaactaagaccaattggttgatcataattaaatggtgtacgtgtgttataaaattctatatatttgtatgtaattagattattatatcatggatttggattttcttaggatgtagaggttgatgttaattaatgggtcgtgtgtttatttaattattacaaaaaaaaaaaaaaacattgtgtgtatgatatttgattgaagagaatcaaattttcaaaatggtgatttgtgttgtttttgactttgggaaattgaatcatttaaattaagaaaaaatcaaagcttactaagagtagaaacattttgtatggctttgacgctaagtggagccatc

SEQ ID NO: 9378 - DNA, 764 bp, Arabidopsis thaliana landsberg
actttttaaatgattatgaactctttcttgttaggattgtattaaaactataaaaaaaaaaaaaataaacatgactaaaataaaatattgtggaattaatctttagttttagaaaataaagaataaaattgcaaaaaatagagatctggtaccctaatatatagtcaaaggtcctccaatgaaaataaaaagaggtgatcaaaaattattttctgtagttttattaaatatatacaaaaattaaggcataactcaactactaactgtcaaaacatttgtttttcaaaaacattgatgaacatcatttttaatcgtaaactagtcgttaacggttacgttacgactatatttacgactatttgatttcctgactctcaatttacgattacactgtttcatcgtaatgtggtggtaaacaaccatttaacgactacataacgattacttttgtaggcggaaacactgttttcttgtagtgctttttatgtacaagtttgtaaaacaactcacaaaaaggtgatactaagcatgaagaagccgtctcatatgagacacattagcattggcattatcagataaaatgccaatcctcgtcagagtctcaaattttgtgtaacttgtctcttcttcatgtccacttccgcctacagatatgagatatgaatcttataaaagcctcacatgcaaaaagtaacacaaaaaaagggagagataaaacaacattgaatgaatgattgtaacgatagtaccggtaatgaggctct

SEQ ID NO: 9379 - DNA, 1444 bp, Arabidopsis thaliana landsberg
cttcaccatcaaaatatcacttaaaaaaaaagttctatctataaggttaagataattgaaatcataatactaaacaagaacaatctgtctaataaataaatacatgaaatgcaaagaaaattaagaaaatttaaaaaaccattagttcacatcacatataacatttatgtgagtttagaatttttgtttaaaacattaaaaaatcaagtttttttggtattataatgatttttaacatctttgcacttcaaatcgttgtagaaactttagaacttaacatattcataattttctattggtgaatatataaataaaatcgcgagagttgcaacgaagttgcaacatagtcacaaaatgtcactgttttgtgacgctattttattacactgaccatatgaattttaatgtgtaagagttaaaaaaaaaaaattgtacatatgatttcacaaaattagaatcctaaaggagatctcttagtttaatgagtaaaactttatatggttaaaatacttaaagtcacaactacgttgcaaatttgggactacgttgagactaaagattggaactacaaaaagagtatctaattcgtctcagtttatgattattttgcaactacaccaataaagtcaatgaatagtctcataacagtcggaaatattaggcggtttactgactacaatattatgtcgtaaatttgtgataattatctgtgtgtagtcgtttattagccgcaaaataattacaaaaccgttactaatatatgtgaccaaacaagggtcccagaaatgtagtcccaaaatgcaggttttcttgtatggcctccaatgtgtcgatgatgggttgatgaatgacacaaaccactaatcttctaatttaaagagtgtttgacccatttatcataacagttgcagctgctcctacataaagtctagatgttggtttccaatgaaatgttttgatggttgttgtaaactcaactgctcttgctaagagattttgtcttctttgtaaaaaaaacgattgtatcagctaaatctactaacacatatctcgaaaagatggtactattagcggcttgaatgaaaaaattataatttgctagaattagagaaataaataaataataattaagattgttataaaactagttatcaaaaacatttatctacgttttattaagcaaacaaatgagatatacatcaaaatcgttatcacctaccaactaataaaaggagctatttgaggcttctaatgctagccacatctctttcctaaactactatcttaaatttacatatcttcataattatcaatgtgagcatacccagaaaaaactccacatctcagcataattaaaattttatatttaaaatcataattgttacaataaaaacaatgataaatacagttgagttgaacatatattatttgaggtttctaaggc

SEQ ID NO: 9380 - DNA, 575 bp, Arabidopsis thaliana landsberg
acagtcactctttgtgacaatgttgcgacgacgttgcaactctcgcaattttattcatatatttttcaatagaaaattttgaatatgttaagttttaaggtttctataacgatttgaagtacatagatgttaaaaatcattataataccaaaaaatttgatttattttttatgttttaaacaataattctaagcttacgtaatgttatatgtgatgtgaactaatggttttttgaattttcataattttctttgcatttcatgtatttacttattaaattgattgatcttgtttagtattatgatttcattgattttaaccttatagatataacctttttggatcttaaactttaaaattcatatgaatagggttgtgactcataaaaattcatcataaaatattagcattttgcaactattctaaggaaaagttacaaacaagtcattacataccaacatatatttggctgagttgtgacgaacaactgagattgagacgattgtgctaccttttagcaacccttgcagtttttgttaagatattaaccaacagaatattgttaatatgttaag

SEQ ID NO: 9381 - DNA, 1317 bp, Arabidopsis thaliana landsberg
aggatccctacatttcttaaaataatcacaaccacatgtttataacatctaaccctattatgtgttaagtttaagaaactcaagattgcaagaaactgaatcatataacttctggtctccaaagtacttgggcctgggattatataaaaaagatatgtttaagttgggcctgggatcaatattatctagatgtacttgttgatttctacaatttccataacaatttaccaaaatccatttgggccttgaaatatatatctgggcctcttggaagattataaataacagaagttaattctgctgaaccagaccatgttacaaacgtttttagtttcaatttctttagaaactattaaaactgcaaccaaaaaccctcaattgaaacaaaattataaagttcaattattcatctttaaactgaagtatggtttaaatttatttatttagatcttaatgttatttttagcttaaaagttaattctactactttaataatcaagaatttttttaatattaaatttaatatgtattcatatttaaaaaatcgtgttaacgaaattaaaaaaaaaaaggtgaacaagcacagaaaatatagaaaaccagtacattttcaccttatttaagaaattttgcagataaaaacaaaaatctaaattttctcataatcaatttttaccaaatttggatcctaaattcctaaatttagtcattaatacatttactaatcaattaattaaataaggtataagaaaatctaaaacataaatctttacaacaataaaattaagtccgtcactttgccttccactgagtaaaaatcaattctttctctttctctctctccgacggagaagaagtctctccgactgtgtcaaatgatgagccatggtggtggcggcggcggaagtaacggaggaggaggagacgctgaacgaatgctagctcaagcagagaagctactcttaagcggagacttaaacggttcaaaaacctacgcgatccgcgcatgcgaagccgatcactcactcgtagaccacgccgaactaatcctcgccgtcgctgacactctagtcgccggagaatcacgaatcagaggaacaacctccgatcttcccgactggtacgccgtgctccgcctcgttcgtttaactcacaaccccgaactcgtcgcgactcagtacagtagacttgcgctgttgcttaacccgagtcggaatcggtatccgtattctgaacaagcttttaggttaatctctgatgcttggtatgttctctctgatccttctagaaagacattgtatgatagagaattgcatc

SEQ ID NO: 9382 - DNA, 1691 bp, Arabidopsis thaliana landsberg
gcggcaaatctttttcttaatattagcaagtgaaatccctgtaaaatgttctcttctcaccattgtcttcattgtctcgagattgacgtgacctaacctctcatgccatctattggagtcgattggagttgttaaataaaggcacattgtatctttaatccccatactcaccttgtagagccggtttcttgatcttacggtcgtaacaagcagtttttcgtctcgatcatgcatagttagatttgctcctttcatcctcacatcgcaacctgattctatagcttgaccaaccttaataatgttactctttaactcgggaatgaagtaaacatcgatcagctttctaggctctccgtttctgttaatggattctattgttccttttccttagatgtcaatcagtgaatcatccccaaattttactttctctgtaatgttattatccaaacttgtgaagtatcgtcgatctccggtcatgtggttactagctcattttcaaggtacaaaacattgtcttctccggtatttgtttcatatttgcttggtataaccttctcttcatttagatacacgacctcatgtatcattagctcatctgcttctatagtactctttttgtcattctcttgcgcctcttgcaacttaagcagacggtcaggacaatctgaagcatactgacctgttttgtcacatatataacaaacaacctttcaagtatctctcccaccattgtaccgtcctcgacctcttcctatgccataaaaccgtcctcctcgacctctggttttatattctccactatattcacaagcagattgagattccgtgtacattaactttcgttggtcatcttgagcttcctcttcctcggagatccgttcctcatataccttgagtctccttgtaatatcttcaaaacttgtgttattaaggtcaactatttgttcaagtgaagccacgatttgaatgtactttttacgaggaagactcttcaggaatttcataacaagtttggtttcttcaatggtttctcctagtgtggctaatttggatgaaatcttagatagcttgctggcaaattcttcaactgtctcgttttatttcatctttaatcgatcaaattcggccatcaatgtttgtaatcttgcttctttaactctttctgctcctaagtgttttgcttttatggcctcccaaactttcttagcagtgtccgcctttttcccaatttgcaaagtaagtgcttcaggaatggattggaacaatagagccttggccatgtcatcctttgcctcgttgtcggaggactcttctacgatgtcccacactttatgaaccctaagtaggattctcatcctcatagcccacacggtggaattagttgatgtgagaggattattcaagagaaattggaagatctcagatctttcactctgccatgttccattaggcaattgacttacagcaattgtctatgtgatctaggaccctcagtcagcttaatgccactctttgtggcaaggaagcttggattcgttcattacaagccttgtggtacataacattgattcttgctaataggacttcaagaagaccttttagcttattagaggatgtgccgataatgactaatgacgtagaggtgcctactgattttgtcttgcttgagatggataaagaatctaaggatc

SEQ ID NO: 9383 - DNA, 1130 bp, Arabidopsis thaliana landsberg
gtaggcttgggcatgtaaagaatggaatgtaattctaattgatgttgataactagactttaggtgttttaagtctaaactgtgtggctgacacattgaaacaactggtcgtgacagggattcgggttcaggagtttctcttccagctgattttgttaaggttggccgtcgacttcttattagtgctaaatcattcagcctttttatgtgtgtaacgtttcttctaattccatcattgctactatgcagatacaatacgcctatgagctgttaacaaatctagtatggaaaagggactatgacttatacgccattgatgaatcagtagtaagttgttagttctgtatcttcactctttttgttgcagcaaactgaaaaagaaggaagatttactctcttttttccttttcaaatataaccccttgttttaatggttgcagcatattatagaggaacttgaaaaacaatatgctgtggaagattttgcaaaaataaaacttcccctactggaagttgtttcttatggtcagttaaccaacatacctctttgacattttcaattctgtttcttgtattcgtttttatatttcttccgatgccaacttattggtgtataaaacctgtttagagcctgaacgtgaaggttttatgtcaataacatctcaagactttgcgtccaagttccaagattctaagccatggctcattcaggtataaactctgtctagactgtttacacagagatatgtaaatttgtggagacacatttctgcagaactgatactggattatcaagtatagaatatctagtgtacgtttaaaacctctcctacaaaagatacaagcaatctaacatgttgaagatgcgaattgtttcctattaaattaataaatgttggcatgcgtttaaccatatttctcttggaatctctttatgctacaaagtgagggagtgcatgttgtgcttcacgttaacgatagaagattttccttttggactgtactgaaatattaatttattggtataattcaatgctacttcttaattaacgtctaaatacctttaggtgtattggtctggtagcggcagctctgcccagatcgccaccgcttggagaaggtttggtatga

SEQ ID NO: 9384 - DNA, 1813 bp, Arabidopsis thaliana landsberg
tttacagtgtgttatctgttctaagcgtagatcccttgttccaaaaagctatcactgttcgccaaaatgcttcacggatgcgtggcagcatcacaggactttgcacgagcgagcagctgcggaaaacaacgcaaacgaggatgatgacttgaacaggaataacagtgcgggttctgggtctctcgctggttccttatctgggtctatgtcaaatcttagtattgccaacaatggtccagctccgttttatccttctaatattactcagaaaaatggaggagagactttagttgaggttgggggttgcaaaacgtacactccaacagctgatgatattagccacgttttgaagttcgagtgtgttgtggctaatgctgagactaaacagattgtcggacatcctagtaccattttgacttcacgggttattcctgctccttctccaagcccccgtaagctaatccctgttaacggagctgatgggatgggtcacttagatcaagatgctcggattcagtctgcaggatcattcactgttctttcatataacattttgtctgatacttctgcaagtagcgacctctacagttactgtcctccttgggctctttcatggccataccgaagacagaatttgttaagggagattgttggatatagagccgatgtagtttgcctgcaagaagtatgttattcgtatggacttggtaatgatttaaagcattttaattctgaaaaatctacttctaatgtgttcttttttttgttatctggcaggtacaaagtgatcatttccatgaaatttttgctcctgagttggataagcatgggtatcaagctctttacaagaggaagactaatgaggtttggtcaatgattccacacactccttccttcagtgatttatgttttaaaatctattaaccacaaatttcttgttgctaggttctcagcggaagtacaagtgccattgacggctgtgcaacatttttccggcgggataggttttcgcatgtcaagaaatatgatgtttgtattcagttctatatgtttacttgctagatccagtaagatctctatactaattcatggactgtaaatccaggttgaattcaacaaggctgctcagtctttgactgacgctctaatccctcaggctcagaagagaactgctttaaaccgactggttaaggtatttttgacatggtatacaatatttttctgggccacagctgattatcagagagttattgtttacaaaactgaaaccaatgattcttatgttgtaggataacattgcgttgatagttgttcttgaagccaaatttggtaatcaacctactgatccttctgggaagcgccagcttatttgtgtggtactggttctttttttttttccattctcatgagaactgttagtttctgtatatgctcttttagtgaaagccaatgaattttcttattttgttgtggcaacttgtttaggcaaacacacatgtaaatgttcaacaagatctgaaggatgtgaagctctggcaggttggtgtatctctatatccgaaataaatcaaatttcattgaactcgaaagaattagtattcacctcatgttttcttttattcttttgcgtttaggttcataccttattaaagggactagaaaaaataacagcttgtgccgatatttctatgcttgggtgtggagacttcaatacacttcctgggaggtttgttgattcataaattcttttgacatgatccatgaaaatgcccaaattctctttatgagttgcctaaaagtttttttttttttg

SEQ ID NO: 9385 - DNA, 2112 bp, Arabidopsis thaliana landsberg
atccaaatccaaaatccaaatccaacttcttataatgttaatctttgtttttcagcatggaactcagaacccgaagaggatcaagtgtggaccagaaggagggaataagacactgcttggtgagcctaagccaccacaattccgtgatcttgatgcatgctaaagctaagttctgtttgccgcagttttatgtggttcaataacgcaaaggctatagcgatgtatgtttgacgcctgtaccgcatcaaattgagtttgcatactctttgtagtcttcttggttttggaattagacccattttaaacaaattgccaaatcatcttcgtttattattatctcactctaagattcatgtgaaattgtaataaaaacaaaacttttatctgttacttcaaaagacacaagattttccaaactttactcaaaaaataaatttggcagaatgatttaatgaatcacatgaaataatcatatcaataactttaattcttcgatgagtttttttttttggctatatttttccaaaactaacaatattaataaaagttgtattttgtcttcactaatcaatgcaaaatgtaaacatgcaagtttaaattgatacatgttctgtccaaagtgtatatatcttagcatttgagatttggaagttaaaattgtacacgtaccactaaaaaaaatcatggtactttctcctaaaatatttgctttatgtttctagtgttatcaaacaaaggatggttactagatcaaactaataatattatttgataattaattatactactccaaagtcatacaaaataaataataatacaaggggtgacaaattacaaatacttgttttttcttcaatttgaacacaactcaacaaggtcccacaacttcccactactactactactaataaataacacccttcaagctccttcctcaacctcccactaaagtcttgaaaacaaaaagttgctttcatcaaagtccacctaaaataaaggtacaatgattacaataatacttgatcaattgagctttttgacattttttttccctctactgcaaatcctacattgattccatctacaaagcctttttcacttttttacctttcaagtgggtgagagaggagagaagaaaccagagtcattagagcagaagaaaaacccatgttggacagttggattagctgtacaaactctttattgcagaaatcctactgtggaggattgttctcaggcttgaccactgaagatgtatccggaggctgagaatggtaaattgccattgccaatgagattggcatcatacaaagagcctttgattgaagaagctgcatcgcggctccaacgttctcttccatcagtttagccacttgacgttcagtcccatcgttagaccatttctcccacgctggttgcggagtccttccaccctcacccgtttcatcctattgacattttaagcaaaatctgaatcaaaaccccattactaaagtttttactttttgttcttaaaaagtttttacctcaactgatgatgaaagaggcatatcagtaacaagtggagcaaccgcaccggctccaccaagtcggctcatgctcaaaacctaccaaagttgacaaagagaaacagatatcattgaaagtgataagctttaccccatgaaaattatatatataaaaaaagcttttacttttagatgagcatggaagatttcacaagaaacacattttctatttttaaaacaaaagatgtattatcttatcagaaatccatcattgcattctgtttctttagtgtctccattatcttataaagtaaagagacttccttttttcgcttgcgagagctttaagtaaccgactgcattttgatataagaagcatttgatgatctaccagattactatattataatgtgaacatgatgattgtaattattgctgaatatggtattataatcctaaactgtgattaggctccctatgacaaaacaaaaagtgaaaagagactaaatgccaaagaaaacaaaagcattttggacttgtttattctttcccacattaaataactgatctaatcagattgaaatttggttgaagggtaggtaat

SEQ ID NO: 9386 - DNA, 1419 bp, Arabidopsis thaliana landsberg
  unsure (1)..(1419): unsure at all n locations
ccaatcgctaagtctatttcttttttatttcctcccatttcaacaaacaattaaagttgaaaagaaaaacagggaaccaaatgatattttgtctattgactccaacaagataaagtcaagaaacaatcttagtgttcttagatacttttattaaagtctctgcaaaatgctatatggtcttcttctatagagaaatatcttctggttagaaatcattggttttacatggttctatagaaactctctcgaacatatgaatcgattaattctttctgatcaaaccaagtagattgacgagttcacaactttgtcatgaaaatttcttcatctccacaagatctacattattaaatctctatgatcttcgagatagattataaacttggttcaccaccacctcactnnnnnnnnnnnnnnnnnnnnnnnnnnaaagttacaaatcagagtacgttacaaatacaatgactaagaaactcggtttactccaaaccggcaaaactcctctttccttataattcataaaccaaacatcaccatcttgaccatctcttaaaccaaagacttaacaatctcaattcgagttcacacaaattagcattcgattgtgacatttgcaaatgtaatggagataggacatagtattcatcactttaaaacactcttattgataaatccaagagtcacttaactttttctggtaatcactgttaaagactccaactcaaaaacaatcacattattccaagtcttaacattctgatacgattcattacaagaaactgagtttatctaagattttcttctcacttgtgcattaacatatatacacacaacataacacagatatgatacaatttcacttctttgaagaacgcttgggagtaacagcattaaagatagcttcaatctcttctttcagtcgttgaaagaaaccaggtcctttcacataatcaattggagtgctctcatcaatgtcgtcacttgttccatgagtctctttgtcatggtgacgactcttggacttttcatgatgacccattgcctctatttcttctttgactcgttcaaacacatttggcgatttcacagtcttctcctctgtggaaatacccaattaaaacaaagggtttagattcgtgtttcataagagacaaaacagagcaacgaatcaaaaatagacttatcatggcgtgtttctattgtttctttagagaaatttccgatcaaaaccatccattaatagacgtgtaattttgattgtgaaatttgaggaaacgaacataacttgatcaaaaagtcttcctttttaacaatatgcataaacctatgatgagatctgatcgttcattgtgtttacctgatcggntttgatccgccatcgatgggttttgtcttcttgatcttgcagctttctatttt

SEQ ID NO: 9387 - DNA, 1359 bp, Arabidopsis thaliana landsberg
tgggtcatcttatttgaaccatggatatccttgtcaagtaagtcgtaatttctcaggttacctctattgcagaaccaaacacaggaacaattcgatcaaagatacttgttttttctgcttcgaatattttccagcgcataagacatttatatattgtaagagctgcaacaggctttccatgactgaaaccgatgtttttggatacacatttgagaagaacatcaacaaattcctgcagcatagaaatatgacaacaaactaaccggtgaaaagaagtacgaaactataaattagggctaatatattcgttaggcacatacatggggttgtcgttcaattcgagatcgtctaaaagattctgtcccaaaccttcttgacggtataggagcaagtggttcctgtaagaatgcaaaaaaaactgtcaaagaaactctatctagaaagacttgcgatgggcaagatgcaagtctatcactgaacagaatatctacttcattacttacctgatgtccattctccaaaggctgcaagaggtagagggaagaagtcaaacattttcttcaaaatattatacatgtaagtatgagagattgtaaatttaccggagcgcctgtaaatgacacctggggagacattctccgggaagcagaattaaccagcgcttgctgccggcgaatttgttctgctgtttccatgtcagaaaccttttcctcaagcctaaagagaaaaaataatcaagtaattcatatgtactaactaatgtgagtacaaatgtatttcagagaaaagataaaaagattgacactttggagaagaaaaaatgcaaatcgtcaaaacctttgcattgatgtcttcaaatcaattagccctgtctctgcgtctaaagcttgtttcagcctctcttcgcaaagtctacttgcttcctcgtatttcttttcagtttcatctattttcttttccaaggaacttaccaaatcctgttgaaaagttatcaaattaaggtagagatggagacaaaatccaaacaattacagagaaaggctctatatctacggaaaactaacattcaggtctttgttttcatcagcgagttttttgaccctctcattatcaattgaagcatcctctgtcaaactctcttctttcaaaatgtactttccttcctcctgttcatctgtagaattgttcccgctttcattgatttttttctctaacgaacctacgagtgcctaagaagtagtttcattcatcagatcaatgggactaataaactgaaaacactatagttgagcatgtttgatccattcgggtttcttctggcgagctatacatctgtagaaagaataccttgagccgctc

SEQ ID NO: 9388 - DNA, 1523 bp, Arabidopsis thaliana landsberg
tgaatcagctcatgggcaatgagaatgttgtctgtaataaaccgcccgagaatgaatgcggattgattattagagataatagagttcaaccatggcttaagcctttcagataaagcttttgataaaattttataagccacattggctaaactgactggtctataatctttcacatccataggatgatctattttctggatcaagcatatgtaagtatggttcattgcagaatcaatcttgcctgtctcaaaaaaagattgagcaaatttaagcacacctgagcggatagtagaccaatggtcttgataaaagccgggattaagaccgtctggtcctggagctttgtctcttgccatattgaatgtcgcttgatataactcctcttccgtaaaaggacaaattaaagctacattcatttcctaagtaactcgtggctgatgttgttgaccactatatatgtagcctctatcgaatcagatttatacaggtgctcaaagtaatcgacaatcaccttatgtatctcttcttcattacttcttatttgcccagaattgtccatgattgcattgattcggttataactccgtctttgcttggttttggcatggaagaatcttgtgttcttatcaccagcatggagccactgaattctacttttggttttccaatactcctcttccatcctgtaatgaaaagcaagctcagattttaaagattgtatcttaacaaaatcaagaggtttggcttcatacgctttctggatttgatgcttcagactatgaatctttctctccgtgtttgtagaatttctggttttccatttagaacaacaagatctgcatttttacaaggctaaatggaacttatttccaagtaaattctgacattcagagagctaggtgttctgcatatcctttttgagcccatcattaaatctccatcgattgtcatatctgaatgtagagtagcccttccatttgcggtctcttgtgtgcacttagaggggccgatgatctgatccaatccactctaaaagctgtacataagctttggggtatatatctaaccagtccgctgaagccacaacacgatcaatcctagtttggatagcatgtgattatcgttgcccagcccatgtatatttaccccccatcgttttaatatcatgtagtccagaaacagagagcatccttctaaacagattgaacgaagcttcactcctcttaggacctcccatcttttcatcattactcttaacatcattaaagtcaccgagtactaaccttggtttgcttctgtacattcccatatcagcctaaaagatcattttctcccacataacgttgcgatgacgttgatctgggtctccatagatgtaggtgagaaaaaaggatggactaccatgcttggatatgtacatgttcgtgtagtttaaggagggtgtatgcacaaagtcaatatttacagtgttggtccaaaaaatagccagtccttcactaagaccggttgatggaagcacataa

SEQ ID NO: 9389 - DNA, 717 bp, Arabidopsis thaliana landsberg
acacacgccacacgacttttcagacattgattttaaagcatattatataagccttcaacatttgatttaaaagcctatcggttatctagaatattggagttataccactttatgaaaatgaacaaacgtgattcaaataatattcaaaaagtgataacaagttcatatcattatccaacaataatgaatactttcaagtttgtatcaaaatgtatatttgctaaaatctatccttccatgtttgtctcctttctatgtggataactttctcacgtttggtctgctatatcatatacatttgatcaattttctaacaagtataaaaccctttcattattccactagaatttgtctccttctcaccattaacaaaacttgacaatagtacttgcacagtgatgacaaaaatagtttttgaaaaactagattaaaaccaagccttcctaggttaaagactaattcatactgcagtagcagaatatgtattagctcgaacaaactgaaaacggaataaaaccaaactaaaaaagaccacatagaagactgatatgtccacctgacgagttaagcctactaccaattgtagccatcatgaaaagtagctacttaatatgtgagtttaccttcaatcaccttcaaacgcaaagccatctctgtttcatccgtcatccacatagcatcccccaatttattctcaccccgatcgcagacaatgca

SEQ ID NO: 9390 - DNA, 456 bp, Arabidopsis thaliana landsberg
cccgatcaacccacttaattgaaccagatagaaccactaacaaaagaacttattttagttatatccgaactagaaccgagtcggaaaccgagccattactgatttggtgatttcaaaatgtaattagggtttataatttggattactgagactaaataaatagaaagtgtcactgatgtgagaatagtttattcgcatttcgcctctctccaggagaatatacagaaaaaggtttaaaagaaacactgacagttagggctatggtggcggcgaatatacacgacgccgttgtttccgatgacctgaactatgaaatctgggctccaatcgcgaaaactacactaacggagaaaggactttgggatgttgtcgagaacggagtcccaccgtatccatcgaaggttccagagttagcagcgacgattcaagccgaagagttttcgatatggagagatc

SEQ ID NO: 9391 - DNA, 1077 bp, Arabidopsis thaliana landsberg
gtatccatggcagctgcaacgacgggaccagggacggcttcgccttgtggggcttgcaagttcttgagaaggaagtgtgtgagtggatgcattttcgctccacattttgggtcagaccaaggagcggctaggttcgcggcggttcataaggttttcggagccagcaacgtgtcgaaactgttgcatcatattccggtgaaccgtcgtcatgatgcggtggttacgatctcatacgaggctcaagctaggctctctgatcctgtctatggctgcgtctcaaccatccttgctctccaacaacaggtaaaattaatacttgattaactttttctaataagatatactaatgatcaggtgtccaaattttgttatttagtaaagcttgtaacggttaaaatcgaaccgaatatttcgtaagattttttgttaaatgcaaattcatttcctatgctatattaagactaataaataattgatgctcataattaaataaaaaatacttttctaaccataaattaattaggtggcctcgctacaggcggagttatcggtggtgcaatcacaactgataaacagtagagtcgcaatggccaacgttatgcaacaacaaactcatcaccaacaacagcaacaacaattagtcgttatgcaacaacccgaatactccaacaactcctccgcctccaccactctcgccggagccgccatgaacagcttcaccatgacggcagatgcagcagccgtcagctatgacgtcatggctccgactaacttagaacattcgttgcagccaatgccaccgcatcagcaaaggagaggagattatcagcatgaggatgaggaagagagcggtgctgatttttcggtggctgttggatcgacggcggtggcttcgaaggttatatttccggcggaggattttcaccggagatgaatgtattacctagggtttgtctttaatttaaatatatctccgtttttataataatgttgagaaagagaataagtatatccagcagacgtatactatacaatgagagttgtcgtgaaatatttgaatgagatatatgcatgtag

SEQ ID NO: 9392 - DNA, 1316 bp, Arabidopsis thaliana landsberg
tttttttttcccttttttttcccttacaattaaaaaaaaaaactcataaaaagaagtttggtgtattaagcccaaatcccaccatcaattaagccatatatcaaaattttgttaaattaaaattttaatttcattcaaaaaccatgaaaaagatcaagttagggcaccataacgaagcggctaaaccggactgcattaaagccctcattgtggaattcatcacaacctttctctttgtcttcgctggtgttggatctgccatggccactggtaatttctcaggcttctatttctagcaaaccaagtagcttaacttggttcttgacactacgatgcacttcaatttacaacttaattttattttattcattttcttagacagtttagtcggaaacacattggtgggacttttcgcggtcgcggtggctcatgcattcgttgtggcggtaatgatatctgcgggccatatctccggtggccacctcaaccccgccgtcaccctcggtctactcttgggtggccacatcagcgtattccgtgcattcctttattggattgatcaattgttggcctcctccgcagcatgcttcctcctcagttacctcaccggaggaatggtacaaaaatctaatttaatattacaaaaaaacatattattgctaatcaacaacttataacgctactaaaagtaatgccaaggacggaattataaattatgatccaatgacacacattttcacatgattctattggttcaataattaagtcaactatcaattgcttacctacattttttttgtttcgtatataattttttctgattcaataatacacaagttctattatgtactagtacagatttttttatttattgattaatctacaataattttttttctaatcgaattgttaaaacttttaattacatacacttcaaacaatgatttgattccggcctgttcgatataacacgtagtttgacattttacaattatgttttgtgattagggaactccggttcacacattggcaagtggagtgagttacacgcaagggatcatatgggagatcatcttaacattttcacttctcttcactgtctacgccactattgtggatccgaagaaaggatcccttgatgggttcggcccacttctcacaggatttgtcgttggagccaacatccttgcaggaggtgccttttctggcgcctccatgaaccccgcccggtcttttggtcccgctctaactaaagaaactggtctgaccattgggtatattgggttggaccgttgagcggtggtgaacacagccga

SEQ ID NO: 9393 - DNA, 1355 bp, Arabidopsis thaliana landsberg
acacattcgaaattgaagtgataacaaattcatgaagtggtgcagagttatagagtaatcagcaaattgtatacatttcttaccagttgtctcggatgaagagctcgtgctctctctgccgcgagaagttggcatcattgccatcagcatcatctcgctcgccagtgagctcaggatcgaagaggaaatactgataggaatcatccggtgatttaccatcagtagcttcggcgattagaccgaaaggtttaaactttccgaggacggtaagttggcgaacccctggaggcattttttctccgaagccaacaggcaatggagattggtgaagtttaatttacactctcccgctctttccaagttgtcttagcgcttaaaccctagtcttttctattttcaaaattttaattgagattctcatttctctttaaacctgcgggtcgaaatcgttttatgaaaagtaagcgagacagaggaagataacattgaagaagaagaagaagaagaagaagaagaagaagtgagtaggaagaattgtcacttacattagaagccggatagagaggtttcaaacgagttccgatgattgtcgaggctctaaactgaacggaatgaagaaagtgaggttcaaaaaagtatcggaagtcggaagatttcgcttagtgaaagagagatgttctcagaggaatttaatcaaacactttctgtgctagatgcaatgaaatctgggacgaagtctgagcttatgaaagacaaaatttaaacattggaaagaagtaaaacttgaaggcttaaaatgaaataaaactaaaatatttccaactatttgctattgacccaatctgtcacttttagaggtttatttatgtaatctttttagtttgaggtttgttttgggataaatgaaaaattatgaggttttttttaacagtttaatcataagtactaacgagaccaaagagattggttcggtcttcacggataatcgccgttgggaccaaaacgctccaatacggtcagtgacgtcaccgccggtcatcaatgtcaggccacacttatcctcttctctcccattccggtttcctcccaccaaaaaaaaaaaacttctttttatgttttgtttgtttctattccgatcttatcctacgccgtcactctcctcccggtgcgcacattagcaacactactcccgacgaatggagacgacgacgccgcagtcaaaaccaagtgtgtcccaccgaccgccgttgggaagagaagactggtggagtgaggaagcgacgaagacgctggtagaagcctggggcaatcgttacgtcaagctgaaccacggaaatctccggcagaatgactgg

SEQ ID NO: 9394 - DNA, 2134 bp, Arabidopsis thaliana landsberg
atataggcaaccaattgtggctatcaaggggtatccatccctttagtttttatgcaagccattaattcattttaagtgacaaaaggaaaacacggctttatatagctagattgcagaattatttgcgatgaatatatcatgattgatataagaaaaaactaatatacgtacgatttccaagggcattccactgttagaaaaaaaactatcgagaatctaagtgatgatagattaacatgttagaaaaagacaataaaaagaaaaaactatcgagaatttgagggattacaaaaacaaatgaaagagagcaaagatttgccattaaagaggtgacacgtttgaagagtaaagcctcaagaaaataaaagagatgacaacgaaaatggatggagacgtgagagagaaggtggcataataattggggtcaagtgtgagatgtcttctttgattccttcaaggcttaaggaccacccaccaccactttctcacctccccctcttccttttttataattatcctcgtgcttccgtaatcttctatactacatagggattagtcagttgcgaatccgaaatgctatatttcgtgattctcaagcctccattgaaaacacaataccaaagaccaaagttgcatactgtttgatatatgtctcactgattagggatgccatttaggtcaggttcggtctcaatccaaaaaatatatattttgtagccttatttcggtcttgcttcaacaatattgatcagctctatttttcaaataagagttaattttgtggatagatattcatctagtgcacatataacaaaatgaaaagaagacaaattgatgaacaaaacaaaaaactgatggttccacaatgcaacatgataggactcgaccaaaaaacttgggacttacggattttcccaaaaccactaaagattttcttttttatgattcaaaaaataaaaacttctttcaactctttttcttttccctttcatcggaatttttacccttaagaaacatccttacttgtggctaatttgataactagaaaacttcacaaaatccttgaatatatgccatttttgggatccgcttgtaacaacaactatcatatataaataccaaaaatggcccctacgttaaggaggagtggtcattttcttatagcatcggcaaattaagaagtgtcattctcagagctgctgtttaaacacgttgacccgaaagaattgacccatcagagcttgagagcatgatctgatatttgtctctttgtttaccattggaccccaaacgcagccgaccaatccggttacggcttttgccttttgggttttaagtctcaaggtttttcaaccaacaagacaagatatcaacttttctacagtcaaaattgttgactgatcaagttcacaaatccaatggtcacatatcttatatacagctaaatcttatttttcacatgctgatgactttgttgtgccttcacaatccaggattttagtgttcatgagtgatctcgtttactaatttacaaaactaactagagaggaggcttattagaagccactttcatatatatagagaacagttactacatctataggtttctcaaggtaaaacacactttcaatctagaccaatggagaaaaaaaactgttacatttaacaaggaaaatgtcactaggtttgtttctcaaacatcaaaaccaacattacttctactgtctattttgtccaatactgaactggtttgacaatgatcattcaagtactagagcttattccggcaatcgagagactcacagttacaacatagagacttgatcaggccttaatagcgtcagctctaggtttccatagccctaacctgtatttctggccatacttcagtatcagtttcctctgcaaaaccaaaattcagaactgtgagatccataaggtaggagacttgaataactgagccaacagaacatatatagtataaggcggtgttattccataaccccatcaacgtttatgtgacaaaacaatatcaggatatataggataaagttggataatgaaaataagaatacagatatatccatcccttcaaagttgaagagcttaaatcatataaccctcgaacgaattc

SEQ ID NO: 9395 - DNA, 1244 bp, Arabidopsis thaliana landsberg
tttagaaacaaaaatgatggtttccactatttcctttggtgttttattcagtcagaagatgaaagagagatgtgttcaaggaccatctactgcacaaatgttgacaagaatgtaaatactttttctccgttaaagtttagattgcgtttgcatacttgttctcggatttgagagattcctataaattgcaggccactgaagatgatgtcaataccttctttcagtctgcctgcggtgaggtcagtctagaatccgaaaacttgctttttctgctctcataaagataatatgaaatttgtaaaacaacaataacattcaacttttttctatcttctctctctgtacaggttactcgcttaaggcttcttggtgaccaagtgcattctactcgcatagcttttgttgaatttgccatggtaaactcctgttaaaactcagcttctgtgtcctcttttgttagtgttaacaagtaaagctgaacttttcaaggcttagtttttacttaacaactgaatatgcgtttgtttacgggataaaaaggcagagagtgcagttgcagcgctaaactgcagcggaatagtcttaggatctcagccgataaggtacacacattatttctcttttgtgacaaacctttcattgaatataaaaacaatttgaaatgaaatcttttgaattcttcagggtaagcccttcaaagacaccagtgagatcgcgaatcactcgatcaccatcgccaaactaggagaaaacagaggctttgttgatgaaggagagtgatgcaacaatattcagttatttattctttttcagttgtctttctttttctagagcagttgttttccaattatgtagtttctgaaaagacaacaaccatgaacatgcttcttgaattttgagttcttgttctgagttctttgacttattgagtcatatcatctttctttaaaggttttttttgatcatttttgttggttcttaactaaaaaagtttagaatttaggagattttagattttactatttatgttgaagtgttgaacgcttaagttttggcataatcattctcttcataggagtttttgggtcaatggaaaagtatatttcattttccgtcaggtatcaaaatccagggatggaactgcaaaattaaattttggatcattttctttgttatctgcttgaatttggcctaatgtctataactatgggggatttcgacaaatcgaaaagtataaatctctt

SEQ ID NO: 9396 - DNA, 697 bp, Arabidopsis thaliana landsberg
ggaaccagggacagtctcataataattctatagacatacataacttgaatctcaaaactaaataacaataaatattattctttttacgtggcagagcaaatctagacacagtaaaagaaacaagacaaatttatgttttgactttaatgttattcttcttatgtatgttccttaattaaattaatagactgacgagaaatataagaacttaattaaagaaaggtttaacgaggttgaaaaaaactcaccgacaggttgcagattcaaacgttgtcatccctggttgtccaacattcaacgaccctgtaattaccgttttacccattccgtcaccgatgaagacgacattctttttctcaaacggaaccctaacggtttcttcatacacaccttctctaatacgtatcacaaactttacagttccgtttgtatccggcgcggaatcaacggcttcttgcactgttttgtatttacaatctttccctccgtttttacacaccgtcacgtcttccgttaaaccagacggaaaacccaaactagcctctgtacccgtacccgagcccaaactcggcccagctttctcccaaaacccgtctctttccgtcgctggacgaatccacgaaacgacgtcgtctccgaaactgtcgaacgataacatcatgcttaacgcgtttccggtgaggttcacgagaccttt

SEQ ID NO: 9397 - DNA, 1859 bp, Arabidopsis thaliana landsberg
tgaaaaaatatacgtatttatttattcatacggtctcatggatccactttctctcagctatatattttttaatcttataaaaaccatttcctctcttcatatttcttcttcttcctcctcaagtcacaaaaccaattcaacaactcagacaacaacagagctctcatccttaaaacttgacaaaacaaaaaatgggcagagactggtcctggctcggcggagggaagaagaaatcctcaagcaagtcaaaggaagaagacatcaaacccacgcagccagcaccgccgtcactcgccggaaatactgcaacggcggcgggatgcatgagtgctgtcttcaacatttttgattttcaacatttacagtttcctattaaccaacaccatcttcatcttcccaaaggtatcatcttcttccccacttcttcactcttttacattacattatttgattctctgttataaatcaaattcaggcgtagatgcaccaagaaacagcttggaatcaacggaggaggaaacttcattttcaccaaccagaaaagatggaaatttaaatatctctgtaagtgaataaaactaaaactatccactctgtttttttatcttcttgggttcctcaaaagtttcttccttttgaccctaatcatggttttttccagatgggtattaaaatcaagaccaaaccacaagcaagatcatcatcagcatctcttacacccactgaaacttactctccgagcataaagacacctactttggttgctagactcatgggtcttgatcttgttcctgataattacagatcatctcctactccatcttcgtcatcttcttctaccttaattgatctcaagacaccaacaagatcttctcacgcaaagaaacacagacattactctctccaaagaaactctgtcgacggaggcacacgttctcttcccgagacaccgaggatttcacttggaaggagatccgttgatgtcaactgttacgaacaccaacgttcttcacttcatctcagagacaacaacatcaacgtgtttcctgaaagagaatctggtattaacaatgtcaggctcacgagggtcaaagagatacacgaagataaagagaatcggagtccacgagagtatgctagacagatagtgatgcagttgaaggagaacgttagccgaagaagaagaatgggaactgatataaccaacaaagaaacacaaccaagagaggttcatgagtccaagaaagcttcttctaagaccacaatcatcactcatgatgtatcatcatccccgagattgggattaacggaagtccccaaaacaaaaccaacctcactttagacaaataatgtcgcttccaagattctggaaacaacagcaatgaaggttcaagacaagaccaggttaccaacagtgcatgaagagccacaaggaacagagaaagaaaaacagaggaaatctacaaagaaatgcaagaaaccagagaatttcaagtcgagattagtgaagccgccacaatcaatgcaggaagagccgtttgttcgatcaccagcaataaacaacagcaacaacaacaacaatggtcatctacttcttatccaaggagacaaatctttcagcaagaaaactcctttatctattaatcatctcatcaacttcaccagtgttcccaccatcaagaagaaagattcacaacctcatcacaaatcggtacaaaacacctacttactctctttacctcccttatccaaaggttaaatatttaaatgtttcattcatgtttttgcagtcaaacttaaagctcagagaaacacaaacaccaagaaacagagcatcattattcagagctccctagttt

SEQ ID NO: 9398 - DNA, 1382 bp, Arabidopsis thaliana landsberg
caaacaaatccttaggaatgccttctagtggtttctatttcatagaacttacctttcaatgatggggatggtgaagtttcagccaaaaaacaccatactgtctctgactatgtaatggaaaacatttatttgggtggagcatcaccacctcaccaggtaactcactcgtgtattatttatgttacagttttgcgtatttgtacgtacataaagaacaattactaaccaagtgtatggtttttatttcgaaggaggtaggagggaactcggagattcgtgaagattcttccaagatacaccaaaatgtctctgactctgtaatggaagaaaaatttgatagtgtaccatcaccacctcacctggtaacttgtgtgtttatgttatagtatttcataattgtgtacgtactgaagagtttctggtcttctttgtaacaacccgaacaaggcattcctgatagggatataaatgaaaaggccttgcgcaatcaaaaccaataatgtctgatgatgtacctacgtcgactcatcaagtacgtcgtgtactaataatgattgcgatttatttttgtgtgtacgtacatgttctttctaaagtgtatgataggctatcttaaaggacgttgcgaaagatgttgttggtaatacggaagaatcagttgtcgctgctgagttaccaaaaatggaggagaacagtatggaacctccacactcaccgcaaaatgaacccagagttagggatgaaattgatgttgcgcatacagaagataacaagcgcaatgtacgtacaatgtttttcaaattcatatggcacctttgcttgggtagctttgagagatactaatagttggacatctatatccatatattgaggcaggatgaaccaacaagtggggatggggaggaagtattgaaggaggcacaatctccaagctttgtagttgaaggagttgaggtaatgttaaactattatgcatttgtaacgcgtctatgtgaataatggaaataaccaaatctttgcttactgtggatgaaggacactgcggatcaagtacctatagttgttcctgacaggactctagaggctttttgatgatgaagccaatctaagtgacccttcttaaccaacagttgttgttagcaaggtacgttattaatttgctattaataaaataatcgcttaagtaatcatatttatgaacgttaatttgtttttattaggtgcttactgaattgaaaacaaccgtgagacatgctacttctcttgtacctattaattctacaacattacgtacaaaaacaataatttgtgtataaatgcttgtattttcagctcatgtctactttttaaatgggagtagatcccaaaaataagacaatgtt

SEQ ID NO: 9399 - DNA, 992 bp, Arabidopsis thaliana landsberg
ttctctactatataaagcactagattagaacttgtattgccaaagttctgatatctccaaaagaaagaattatagaaaatcaagatccaaggaaacaatgcacaatcatatctcaaagttaaagaataatgattagaagtgtgtacccgatcggattaaagcatatgttaacaaacttagaaatgtgccgagtgacaacatcaacaatcataatgatctgttcagagctgcattttccgataagcagcttaacaacatcattaccaaaaggatcaaccatcaactcacaaataccgacaatgagaccatcgaaaatcacatcaatcgtctctttagtaccgtcaaagatactcttctccaattccttgctccatactcggtctgtagcaatgaaaaagaacgagcccctcccattctccatcgacgaggccgcctgatcttgattatatgtacaaccttcattactcctccaagaattgttaacttcatacccaaagctattagtgtagtaatctgaaacactgtttcttgaagcacaaggaactccattcaagaaaccattgttaagcatcccattaccaccaccattagtatcatacacataagatcgattaacatgatcgttcttatatgacaatctctgttgattctggttaaacctttgtaagtcttttaattgatagtggtgataagaactaggaggaaacaagtacccatcaccaccgttaaatacctgcttgtattgatgggcggggagtatcggattactgttctgacgaatacttgaataatctgcaaaagaaagtccaccaaaagaggattctagggtttgcaaatcaaaagcaccactcgagaaaccattatttatatggatgtggttctccggttgatgaaacttagacgactgcatctgcggcggttgtgactgagacgatgacgccgccgttgtcatattctcctccgccgccgtgaaccagatgttgcgttcgccg

SEQ ID NO: 9400 - DNA, 1408 bp, Arabidopsis thaliana landsberg
atgaccttaggacatttggtggtactgacgtgtgcctctgatgttcgccattcacttttcttgctagttccagtcattctaggaatcataagtaatcgagcaacaaaatttaaaaagtaaagaaacaaaatttaaaaagtaaagaaacaaacctgtatcttgagatgtattaaacgaggatgggcaaaagctggttggttatgtttggggaagcaaatgacaagatctccatcggaaacctgttaaaatagatttcaaacatataaaatactttagtaaaaatgtaaaattttctcctggtgaattacctagcttttttttttgccatccctctacccttatatttcttctatattacaagccactctcttattattttttatttttttttgtctttgtcagcagttatatagtttactttcgaacaagtaaattctttttgcaagagatttttctctacattacttacgttaaaatagtaaaattgttactggattttacaatccaaattaataaaataaaataaaataaaaaccaatacaaaaattagttccggtaaaggccataattagatttggtttttgtggtcggccaaatataaacaaacaaataaacaaacaaaaattatgtaaaacataagtagagtataagcaaaagataagcaaatatacaatttgttaacgttttctagtattttatctacaagatgaatcaaacttgtctcggctatgtacttaaaacaaattgaacttcatcatatttcaaggccgttgagtttttaagatatgtacaaaattttaacatctaagtttggtccatcatgtgaactaactatgaaatctaatttggtccacgatatgagttatatgttcacttgaactaaatagaaaaggtgagtaacaacatgaaattgaaaacataaacttgcttcactatgtaaactaaattgatccatagtgtgggagaaaccaaactatgatcatgcatgcaaccatgactgtaccaggagacagactaattattagctggtttattacatttgacaacaagtctctcacgcgtcagagacaacgtgtcaacgtggcgttaaataatcggatacagtgtgagagaaactaaactatgatactccttctctccccttctcctccgtttattcgtttcaggatcactctatcttttccagtttagagcgtaaaattctctccgtcacaattcatttagggcaaaatagttgtgtgtataagttttaatatagacgaaatattgaacccattacctttttttttttttttcacaattgaacccattacctatgcgaagaaaacatgaaacagtggggataaagaaggagtggttttcgaggacccgagaacttcaatttttttttttttcattacccgtgaat

SEQ ID NO: 9401 - DNA, 942 bp, Arabidopsis thaliana landsberg
aaaaggattatgtgcactagatcgaaaaagactagaaagtaaaaaaaaatgaagatatgttttcttctacactaactcttatgatgcaaatatcattttggccaggtacataaaacaacaaaaatttaacttaatttaaatcaaattaacaccaaaaagaagattagaaaaaacatgtctattgaaaaaagaatatggaagtataaagtaaaacagtactaacacactataaaaaaaatgtattattcttcgtttttcaaccaaacactatgatttgtgcttacgtaacaaggtctgattgatattttttgtttaatcccgtaagactaaatataagattcgctcaatcgtcaagtagtttagttattagctaatcaaaatatgattatcttttttataatttagttaaataattacactaatgtgagctggtttgacttttgattttaaccacaagaaggagacagtaagacagactaatgattagctggtttattacatttgacaacaaatctctcacgcgtcagagatgacgtggcgttaactattcggatatgaaaagccctgcgtgttttaaaaaaatggcatgccccattgggctagttaagtgagagtttgtttttttttctacccctaatattactatattacactcatgccacaaccaaaagctaaattaatattgttgtttttaattgaaggttatttgatatacaatattaatggaaaaaaacaaaataatatttttttttttttacagcaaaataattgagaatcatattaccagaaacttaatacaaaaaataagctaaaaattccttacaaaaatgaagatgatgaaatatagattgaaaatataatttagcagtatattcaatatagcaaatgataaaggtgaataaacaaagttttagcaactaaaattagcaaaaaagcttttaa

SEQ ID NO: 9402 - DNA, 1434 bp, Arabidopsis thaliana landsberg
accatgaaggacctattatagctctattgtgtcaaacggaaactaggcctggattttggagtatcacaaatcctgaaataatctaggtttacaagcttgtctgtgatgtttcgtcatcatttttaatgaattccgcgatacgttatggatcatatctcacattttctcttgatagttaacctccattgtaagagacaactacatgcatgtaagcagctgttggatgtctagcaattataaacctaatagaaaaggcttatacaagatgttgtgccaaaattggtgtaacggattctgtttcttacttttaataccaatgcttaactttcggcctgctgtctgatccgtctagacctacttttaatagttatgagtttcgtctggtgcttatgttttgtgtttcatcatatatgccagatcttcgggatgacaaacagttcttcattgaccaccctggcgctgtaccaattactactgctcaggtaaacagaatttttctttgaaatgtgtcaatttacttagcctgttacttaaacgaacccttttaaccgttcaccactttgggcatcaaagggagaggaactgaagaaactaattggagctcccgcatacatcgagtgcagttcaaaaacacaagaggcaagacacaaaaactttcccttttgttttgagtactactctgcttctttacttagcttttctcaaagcttttttttaatgaaattgcagaacgtgaaaggagtatttgatgcagcgatccgagtggttcttcaacctccaaagcagaagaaaaagaaaagcaaagcacaaaaagcctgctccattttgtaatttctctacgcttctcttacgtatctctctctgtctctctgtctcttccactcttctagtgaaggcttaagaagaaaacacattgggcttaaaaattgttccagagttcgttgtgataagctctcttaatccttaaaaaaacgattatttctgtttattgatgaatagtttccagctttagctgagacctaatattgcacttaccacttctctattcttccttcgatttcaatgactagttgaagaaaacagagatgatggattttccacttcaactttacttaagtctactaatttgaacatattacttgttctcattcttccaattctaatttaacaaatggtgcaatttggtatattttattgtcttgaatacttcatccaaaaaattgtgatgcatataagtctttaaaagttctgaatgtttcagtattgtgatacaaaaatcagaattttgcattcaactatgccagtcattaccttctttaatatattttcttataaataaacctctcaaactccccttctcacccatcacacaatcctcaaaacaagagaaaaaaacccaaaaacagagcaatctcaaaaagatgaaggtgctct

SEQ ID NO: 9403 - DNA, 1853 bp, Arabidopsis thaliana landsberg
acaatgtcagatttttttatgtagattttgttaattaactgtatatagagtaagcttacaaggttgcgcacatttgcatgtgttcttacttcttacatatcataaaggcaactcaacaaaaaattgtacacagagctgactggctaccttctcttcgccctgaatctcgacactggtttagacggttgagacgtagaagactgttgacatataacaagataacaaacaaaaaaaatgtaataagaatcatgtttcctgcatttatgagtgttgtgtagttcgagtgattaaaaagtacctgcgtttggctgtgtgcgctggtctctagaatatgggcatgctctacgattgatccagtaaaagcctgcacgagttggatcagaaatttagtgagcttaaaggaaaatcagatctatctgagcaactatacaacttgctaacgcttggccgaaagagatgtgtatgtaaccttggtagaatcaaactcgggctctggcttctgtggctgcacccaaaaaaagttggcatgattatttgtgagatgcttgtgaatgataagttttgttgcagaaaacatgtccataatgcaaggtagttagcttgatttcgaatatagatctaaataccttaatcttttgtggtcctaaaacattggtttttgcattcgttcgaaagtctttccatgtttcagcgttttgctgaggggttccgccacgtgattgaccttttggtaataaaagaacatagatgttggttagagaattgttttcaggaagatgattcaatgttgaatatattaatttgacacttttctgatgtctgaaatgctttagatcataacgctaacctttggaaagatattgtgccattggtcggatacgctgcaataacaggcaatatctgagaaggagctgtaaaacgctaatgaaatcagagaacatcaaagtgaaggggttttcttacattcagcggatcatctagatctttgtgtggatgtgtctctggtaacacttgaataattttggcttcgacccttggctggattataagtaaataaactttaggaaaacccattaaccataaacatgaacccagatgttaaatttccttggaaaatacctctgagaccctcggtgaagagctatgaccggaagctttgttaggaacagatatggtagtttcttgtttcccgtattcaaccctaccacggtctgtctcacctctacttcctttcaccaaatcatgctggatctgttccacactttctactgaagaatcaggatcttcacctctactatccccatctttaccctccagttcttcctctatttcaagttcattcaacctggccatgattcttgcaaagtcatcgtcttcaagttcaccttcttcagtctctccttcagaaagattacaaggctctttttcacttgaatgtatcacaacaggtgcagaagaatcttcttctacatactcttctcttatctcaacaagtccatcctataaaaaatgataacaccggttaagatacatatgcagaatcaagaaaaaggaacacacgatccactctttcagcaaaacctaccgctacttcagaagcagttgtagtgaagaatgaagcctccgtttgaagatcttcaatctcagctttaagagaatgaatttgagactgtaaagtcttgtctcttctcttcaggaaatcaacagtttgtttcgatgatctatcagtatagtaattctctcccaacaacacctatatgaaatcacaaaacataatcctttaaatttgaaatttacactaacctcaatagcttactcttaaacctcatagcaaaacgatactagaatcaaat

SEQ ID NO: 9404 - DNA, 542 bp, Arabidopsis thaliana landsberg
  unsure (1)..(542): unsure at all n locations
atggcagatcaatagatttaatgatgagaaaattacctggaactaatatttggaacttttaagaactttccaaggagttctaagagcttgtggagggtaaatccctgtgaaatgtcaatctgaagactcctttctagagattcaatgtttcccaccttttgggagatcaatttacagattgttgtcagacaaccccggacagttaagaaaagaagtgcatcttgtgtctcaatcattnnnnnnnnnnnnnnnnnnnnnnnnnnnnnnnnnnnnnnnnnnnnnnnnnnnnnnnnnnnnnnnnnnnnnnnnnnnnnnnnnnnnnnnnnnnnnnnnnnnnnnnnnnnnnnnnnnnnnnnnnnnnnnnnnnnnnnnnnnnnnnnnnnnnnnnnnnnnnnnnnnnnnnaagactagctctgtgacccacgaccctagctcaaatgcctgttaaccacctttagatgtcctgctagaccgttgcttccacctaagtgtttatttaagtgcccagaaatctgatctgtgggtactagacttttggctcg

SEQ ID NO: 9405 - DNA, 2354 bp, Arabidopsis thaliana landsberg
gactttgatccgtcaagactttgtaaccatatttatttcgattcaatcactttaattctaacccatactaatatcatgttcactttaaagcttaagaattccggcgaaaggaccaaaaagagctccgatataaagctgtcctttgtattcgttaacttcactaaccaaagtatccccaaacttgtcttttaggggaatggtctgaagcactttaccggcagaactgactttaaccgccgaagggtttgtcggtccggtggctgagttcacgaccgaagcaacccaaaagtttccagtagaaccgatcctcttgatgttgtcagggttcgagaccgagttggtgaagtcttcagaagtaccagctttggatcctttgatccaatacctcttgatgttactttttgtgaactgaccaaccagcacgaatgaaccatctgagctaacggcacatccggctgagccgctaagaccgtccatcaatacagtcacgaccttttttgatggatcgtatttgaagaacttaccggtcgagtcttttgttgccactgctttcaacacatccctgcatatgcatcataatcaatattagtaattaagtaatatcatttgattaattaaccgattcaaatgaaaatgttaaaaaatggtttatcgtaattcgtaattagaacaaaaagcatcaaaattaatttggctctaactaaagaaatacactataagctttttattgagtgatcacagcaacaaaagaaaactttcgatttgattaaaaaacaaaacttagaaagggaaaaaaatcatttaagatgatttttatattaaaatataaatatttactttgttcataaattatatgataagtgtatttatatatttacgtatagaagggaaaaataaaactgtacctagggccaaatgttgagctgaaggaagtgaaatagacgacgccggtagtgggatctacgtcaagcccgtcaagaaacaaaaagggcttgccgccgacactgtcggcgatcttcttagccaaacccccacggcgagggatgacgtggagacccaatgcagcatctgcgacgtaaagatcacctgttttcgtgttgaaggctattccggctggtcgaccacatttttagacgttagtggttccaagtgctccgtcgcacaacgaagacttcctgaagtaaatcgaatcaaatttgttaatatttgatagacaaacaaaaaaatgaaaaataaaaaattaacacatagttaaatatgattcttatatttgtatagctccacacgtatttgacagcaatgcggatgatattaatgctagcgtgtgtttagcctgttacaatgtttgtttaggacattctattttgttaaattaaagatgattacatttatacatcctatacatacattaatcaacaattagtattttgaatattatacgagtacataataattcttgaaatttaaaaaaaaaaaaaaaaaattaggtcgaatgaaaagagaaataaagggcactcagttgatgaataaattaatttaaagtaggttgcatggaggcagtagcccaccaaaaaaagtaggttgcagttatttctgaatctctagtgcacgaaatctttagatcatcattacatgattgactctgaggtttgtatttgacaacaaagttttcccatttgtggatgtcagatctgatttcgagtttatttttacttcattgtcttatgtgacatgagaagatatataatgttattttttatttttatttataactataagataactagacaagtttatttaccaaaacaagataatgttgttacggatttagtaatataaaaggttcgtatcattatcatgaagtatatggaaagaattctgatttgcgtatcaagctcttgataacattgaattcaaatgcataagaagcatatataagtaaatgaaaaagttaatgatcttggaaacttacgaagagtttgtgatctgggcaaagtcgacataacctttctttggaagatatttgaggattttaccgccggtgactccggtgtagaatccttttccggtggaatcaaaagcgaaagcttcagggcctgttctgtttcctggcaccggaagtttttgaaatgatgactttttggttgagagaacagatcaagaaaatgagagaagaaggagaagagtaatctacgagacaaacgacctcatcatgtttctttggttgtgttctttttatccatctcttatctgtatgtatgtatgtaaattaatagatttatttttggaatgttaccttttttgaaatttcctttaattaaaacatcttttttttctttttcttttttgaaaag

SEQ ID NO: 9406 - DNA, 1604 bp, Arabidopsis thaliana landsberg
ccggtcatgatgcgtcttggcctcagctcgcacattgagacatcgagaggcaataataacaatgagtatgcaacacaggttgtttttttatttactcgaaccattcacaactcaaagtatctcaaagctgctcaagagcttcttgatgaaactgttaatgttaagaaagctctaaagcagtttcagccagagggagataagattaatgaagtgaaagagaagaatcttcagacgaatactgctgaaatccctcaagcagagaggcaagaattgcagagcaagttgtcgaaacttttatcgatattagacgaggtaatccgccttacaacatatcttctacacttgttaatgattctcgtggtaacataaatgttgtttgtttctttgttgtttgaaggtggatagaaattacaagcagtattaccatcagatgcagatagttgtgtcgtctttcgatgtaatagccggatgtggagcagccaaaccatacacagcccttgcgcttcagaccatctcgaggcatttccgttgcttaagggatgcgatatccggacaaatcttggtgataaggaaaagtttaggaggggaacaggatggatcagatgggagaggagtggggataagcaggttaaggaatgttgatcaacaggtaaggcaacaaagagcgttgcagcggttaggtgtgatgcaacctcacacttggcggcctcaacgcggtttaccagattcttctgttttggttctccgtgcttggctatttgagcatttcctccacccgtaagtctctctactactcttgtgaattttttgattgaccacaagagactctgaccatttgtttcaaaaccttgagcttagttatccaaaggattcagacaagatcatgctcgctagacaaacggggttgagccgaggccaggtattgcactgttagcttttgtgccgtttctctcatttaatacttttctttctggtgtgttcatttttcattgtttcgtttgatgattgttgaaaggtatcgaactggttcataaatgcgcgtgtgcgtctctggaaaccgatggtggaggagatgtacaaggaggaattcacagatgcattgcaggagaatgatcccaaccagtcttctgaaaacacaccagaaatcaccgagattcaagagctgcaaactgagtctagttccaacaatgggcatgtacctggtgtggcaagcagtagcatgagacaaaacacagtggcccatggtggtgaccggttcatgatggtgactgacatgacaagaaatggtaatggtgggatgtctttaacgttggggattcagaattccgatgctcgtggcgatgttcctatgtccggtgggatagataactacaagaataccatctcgggaaccgatctacagtacttaaactctcgcaaccaccagcaccagattggctcttcacaattgttgcatgattttgtagcttgaggagaatagaaaggtgtagaaatggattcttttgtgaaagtaaacccaaaaaacgaaattgtagattaatgagaaaacatgaggagacaatctgagattagacacgatctgttcatatttaacataggagacc

SEQ ID NO: 9407 - DNA, 1507 bp, Arabidopsis thaliana landsberg
gcaaatcactacatgaaatagcgtaaattttgtaataatactagaaaaccttttaactaaatgtaaaaaaccttatgggaaaaaatgtggttaagcacctaaaccatagaataacttaaaatttcaatttcccaatcaaggtatgatataaaaaccatggaaaacaaattctcagccatatttctatctgaccgagtctttttcaaaataatatatagacggtagagtcttatatagtaaaaacattttttttaaactaatttatcttctcatatgaaaatgaatgcaaataaaaatgaccatatatgctgtaatgatattcaaggaagagatatcacaacaaggtcgaagaaatatacaatatctgaaagtcgactatatggtccactttccaaattagagatggaaagaagaaacgattatgcagcaaacccattgatcggacgaagaaagaataaatatggaggcccataactatagtatttggccttgaaatattttggtccgagaaataataaataaacagttatggcttttcggatttggttgctttcaattttctcaaatgtttggacaagtgttattacactcacctaaaacaggatcattccaatttcttgggctcagagtctgtactttcttcttctttaaaccaaggtcttataagtattctctaaaccaagtcactaaacaataattggtcttgggtctggttcaaacttggatcaatgttgccacatagccattagccacacaaaacaaaaattgtcttgcctttatatggaatgaagaaaaatcgaattttgtaaccaattttgactttaaagtcacactcgccgtatacggcacaccaaatgaccaaaaacatttgaccaccaactttgctttaatgttaaaactttttttttgcatcccactactctcgtcttcacctcctcaagtcacagtgaccaaaatcacacacttcacaagaaacaacctatggatccaaatgaatctccaccaaaccaatttcgccacgtggtggccatgccttatccaggtcgaggacacatcaaccctatgatgaacctctgcaaacgccttgtccgtcgataccctaaccttcacgtcaccttcgtcgtcacagaagaatggctcgggtttattggacccgacccgaaacccgaccggatccatttctccactctccctaatctcatcccttccgagcttgtcagggccaaagacttcataggcttcattgatgccgtctacacaagattggaagaaccattcgagaagcttcttgacagcctcaattcaccacctccgagtgtaatattcgccgacacttacgtcatttgggctgtgcgagtcggcagaaaaaggaatattccggtggtttctctctggaccatgtcagccacgattctctccttcttcctccactctgatctactcctcagtcatgaccatgctctgttggaacaataaggtaaagcatcagtgaattagctttgattcc

SEQ ID NO: 9408 - DNA, 2134 bp, Arabidopsis thaliana landsberg
  unsure (1)..(2134): unsure at all n locations
tcggcaactcttcagtcaacatatcttgtggctcatgaacctgatgacgataacattctccgaactcggacatatgatctcagcataacgtaagcatcccgggtttcttcatagtgtagtactgcgttttgacttttagatatagctttcttacattgggcccagtagtaagcaaacttataattctcactttggttcaggtatgataagtattaccaaactcctcgtgtttggctgaccggttatgatgaggtttgcatctctttcatacttgtttcgttttgtttttcattaaaattcatgggttttgttttgttgcttgtttatatttcctgttatctacttaaaagctacgatgtattttgtagtcaaggatgctgctgcaacctgaacttgtaatggaggatgttagccaagaccatgctcgtaaaacggtaaaaggaggacaatctcaactgcattaattaccgtttttgttattccaccaaagttttcctgacttatgtcttctgaatctgaccaatgtagagtatttttgtgatcgtctttcaaaaatgcacaggtcacaatcgaagatcatccacacttgcctggtaaacatgcttcagttcatccatgtcggcatggagctgttatgaagaaaatcattgatgtattaatgtcgcgtggagtagaacctgaagtcgacaagtatgtgttttaattgcaaataacgcttatagttcattgggcttgctggttacaccgttgctattttgccaggtacctcttcctgttcttgaagttcatggcatcagttattccaacaatcgagtacgattacacaatggactttgatctcggtagctcaagcacctaatatcaggtgagatccccttctcactgcctattatcttcatatacacaattaattggtaaagcttttatcttaaacttggacacacttttgcttttggtgttttaccagatttaaacaagtatgtgctcgtgaatccgggaaacaagtatggtctcatggatggctggatggctctgcactgtacataaaacagagtcctcactttcatttctctccaagataaactttaaggtgttgtggtttaatcactcgtttatctaaagtttacgctgatgaatagtaatttgtgacaatactctgaaaacgggtatttgatcaaaactgattcggtgtggttcaaaaaacagaatgtgatttagtgtgtttaatacactcttgctttgcagaagttgggcttaatatttaaaatgacaaatcactatattcttattaaacaagagtaagcacaagtattacagttttcctgctgcgattttagccaaaggtcgcagttacaattgtacagcagaccctgaaatgtgagatcatagtttggctgggtgtagtatactatctacctcttgttactcgtgtaactaacacgataagcaggacaacaatggcgagcagaaccgtcatttgaagcttctccatcttaggcgcagcacctgaggctaacacaaccgtctcatctccaggaacaacgttgaaaaggtcagtgacatactttgtgactctctccattgcgtccatgattttgacggcacttctctcaaacaaccttcttaagaaatttgcggctgaaccagagtcttcttctgacctctcagctgcattatacaacaagtaaaactcttacataatcatcgtttagaaccatagcccattgtatcttatattcttaccgttgcttataagctcccggacaacctcattgttcatcaccgcatcccaaacagccttgtctgaagtcaatgacataaccattctctgcaacattagacaccaatgtatgtctcagttatttgtttctcaaaccatggatctcaagactgcgagaaaagagagaacctgaacagatgggtcggtctgaaacacatgaaaggcgtcatagagtctgtccagcataaaaggctgtagaaggctagtattgcaaagctgcaacgaaggctcaatccaatccacaaactctgactctgaaagttggtctcctgattcttcgtcatcatcatcattgaacatcctaaacgataacgataacttctttcaatacananaccttactcaaattctcac

SEQ ID NO: 9409 - DNA, 986 bp, Arabidopsis thaliana landsberg
  unsure (1)..(986): unsure at all n locations
taaagccattgcaattgttgaagagaagattcaataaccggaacttaccggtaaacgatcaaccggtttagctttcaacagccactgtggcaactgtttaggctgagctacttcagatttaacctctggagaagacactgaatcaatctcagcaagttctcgctcgtaactctgtaaacactgtggacaacatttcaatgtcctattcgcaggcacaaagctcttcaatggcgtgaatgattccaaattgttcgcaagcctgaatcaaaacatgaatctaggctaagaaaaaaaatcataaaagctgagatttttctttagcaaaaagaagaaactttaacacaacccacctcnnnnnnnnnnnnnnnnnnnnnnntttagctgccaccgacacagcttgaagatcccaatcagtctccattgatggatgataaacttgacatcttaaataagtctcacacgtcgccgtccctataaaccagagtcttccttcaaacttctccaaaagcctccgtaactccaccaccgccgtcctcccaatctacaccgcaagcgtagccgcaggttgcgttgaactcggttgctccactagccatttcaagtcaccaagatcaagtatcactccgccgccaccaataggatccgaattctttaatcgggtctgaagcaacccatctaattccttaattcttaaagccttatcggaactaatctcctctaaagaaaccacctttgagttcttcaccgctaaattcccaacttcaccgacttcaattttcttaaggatctcacgaataacccgacccggctccgaatcaccaacccaaaaccgggtttttcttcttcgcccgacccaatatatccataacccgctccacatcatcgttcttactcacccctgattgtaccgacgaagcgttctgttgtaaccgtggattaagatacgaattccgggtcatcggacctccaccaccgggtctaaaatt

SEQ ID NO: 9410 - DNA, 1451 bp, Arabidopsis thaliana landsberg
tccgcctttcattattttgtataccaaaccgagggaaatattcacagagatgaaccaaaaataaaaacaaaagtctttttttatttctacaaaaataaaattccccaacttttgaattctttcatttggctttcgaagctgctgcttcaattcttgctgctttgatttgattttttttttcgatgaaatggccgatcagagaagtaaaaccaatagatggaactgggaggtgagtgggttcgaaccgaggaagtcttcttccaatgcatcgtttgcggagagtactggtcaccgtacgactggtcctctgcttcgccggaactcgatttcgactccctcgcttccgcctaagcaagcaattgcatctaaggttaacggattaaaggagaaagttaaggtgataaatttcacttcctttttcacttcacagagtatacttggcttttggttttgagctgaattaattttataaaaggctgcttttagtttcttaagtctagcttgtgggatttgatggaagtttttagtgttgaagccattacttatcaagaaaaaaaattgtgacttggttgaacagcttgcgaaagaagattacttggagttgagacaagaagctactgatcttcaggagtattctaatgctaagcttgacagggttacacgttacttaggtgttttggctgagaaaagtcgtaaattgggtaagttttgtgtttcactagtcgtaaatttgaagtctatgtaagttgtggtgcaagcatcgagaaaaactgagtattcattacatttggtgcatttgtgaccactggagaagttaacaacactagaattggttggcatttttcccaaaattgaaacctttattggaaacttcataaatccatctactgtatctagctctcgtggttgcgtttatttatctgttttgtggtggaaatttggtagtgtgttgtattgatttatctacgtaaaccaccacagatcagtttgtccttgagactgaggctaggatatctccacttatcaatgagaagaaaagactgttcaatgacttgttaacggccaaaggtacacagcttccataaccagtatcatcgatctttctatatcgataatctttctttggtataggttcactgatgtatgatagttctctgctacctgttggttaatgtggatttgtttttcgtacttcagggaacataaaggtattttgccgtgcaaggccattgtttgaggatgaaggtccctctgttatagagttccctggggattgcaccatatgtgtaaacactagtgatgatactctgtccaatcccaagaaggactttgaatttgaccgagtttacggaccttatgttggacaaggtgagtaccctagttcattggaaaatgtagtctttccttatgtcatgaactgtttctggtttaatctacaaaagctgcaacaa

SEQ ID NO: 9411 - DNA, 960 bp, Arabidopsis thaliana landsberg
ctatgcattattagagtgtatgcatctatatctatgtttcttttgtgataggaattttgttacaattcgggaatgtgttttgttcacttatctgcatagcctatcacagatcaatatgcacttgagactgaggctaggatatctccacttatcaatgagaagaagagactgttcaatgacttactgacgaccaaaggtgcacatcttccatttccgacgtcattctctatccttacttctattgatattgatcacaccaggtttagattgttctatatgaccctgaatgtatagtttattgtttaatctttcagggaatgtaaaggtattttgtcgagcaagacccttatttgaagacgagggtccctctatcattgaatttcctgataactgcactatacgcgtaaacactagtgatgatactctgtccaatcccaagaaggaatttgaatttgatagagtttatgggcctcaagttggacaaggtgagttataatactccttaagaactgtttccaatacttttgtaaatatgtaatccggaacttattcagtaaactttcctcagcttcactgttcagtgatgtccaaccttttgtgcaatccgctctggatggatcgaacgtttctatatttgcgtatggccaaactcacgcggggaagacatacaccatggttgcccctcctttccctttcctctctgaaattagatataggtcttgtttggtatccgtattatcgatgttgttatgcttagtatctaacttgagggacatgcatacaaaataattttttcgaagttgctaaaatgacagggggtatgaacagtcttctaatatactcattctttttactgcttatttgcatgtttatggtttcaatactttttggctctaaccaagccgaggatatctatgtgattgaactttgaaatcgcaaaaaagtttcatgttatttgac

SEQ ID NO: 9412 - DNA, 1474 bp, Arabidopsis thaliana landsberg
tttattgtagtaacaacatatgttgccactcttctgtaaaacttagctttgaaagtgtcccatacttggtacttgtattggatcactaccgcaacactctgcaccaaactgatatgccccactccttctttcaactgaaaatgatgcacttcattgagcactgagcttgagagcaactcagggcggattatcgacttgtgtctctcgggttcgcttgtctacaagtgtaacctacggtcacgccttgtgatggaaccgaggtcagaccggatggaccgtagctatgacagtccgttctgatctctccaaccaaatcccaagaagtgtagttcgatacaagcgacttcaaagcgtttttgctcggtaagccttgagagcgatgcgtagggaagtagtagaactcgtcgacatcgaagaatccaacccaattgcattcttctttcgctctaaccgcacaatgcgaaaaaccggcttcttgagtcttgatccaaggccaaacatgtcgactcacattgtaattctccgaactaagcaactcaatctcctcttgtataccatcatcgctgttgttatcatatataaaccaacgttcgacaccgagccacgagtgatacatgatccattcacgcaagaacggagcttggttccataacattgtacaaacacaaagctcatgcttaactccactcttcttctccttcttctcaatcgaatcagaaccgtagattctcgcaaccgaaggcagagcaggggtagttcttcctctaggatcaatgtgaattacactcactcgaaacatcatctctggatttagcttcaaactctcaggcaaaccacacctcacaacttcttgcgcagcagcaatagcttgagtcacctctttctcctccgaattctcaatctcaaattgacacttatagtaagaaggatctgattccttgtgaggtcttcgagtcaatcctttaacaaacacaaccaccgtgtcgccgtcaatcaccgcctcataaccaaccttttcccaattatgaacacgacggctctgtttcttcatcttcttcttcaccaaatctccacggaattgcaaatcaacagatgaagaatagttcaaaggagcattaggacatcgaacaatcgacctaaactcatcgaattcatcactagaaatcgagggcaacaccaaagtctcttcctttactccacgataaacacaaactaggtttttttcacctttcccaattccgtgcgaaagaatcagcaataaatggtcagggaattgaactctgtcttcaacactcaacggagggaatctaccacggtgaaacgaatccatggatgatgataaaacggagagagtaggaacacgaagagacggtctcagagaatcggaacgaacagagagtgtggagattcggtcggaagataagaagaagagcaagacgaagaaacaacaaaagcataagattagataccttta

SEQ ID NO: 9413 - DNA, 1739 bp, Arabidopsis thaliana landsberg
  unsure (1)..(1739): unsure at all n locations
gatcaagttatcaccaaagaaaacatgggagggtttcattggagcttctattaccacagtgatttctgcattcctcgtaagcttgttttatgggctaataagtatatgttttttgacgagtagtaattgattaataatcttgcttgtttttgtagcttgcaaatataatgggtcgtttcctgtggctgacatgtcccagagaggtacttgaaagtttaagtcatgtcctgccttttttcatacaagaacctttacaattatttactaaccattatgttattggggttatgaatacaggatctatcgacaggctggctcctctgtgaccctggtccactgttcaagcaagagacacatgctttaccaggatggatttctgattgggtaaagtctagaattgaattgtacaatactaaacaattactcgagcaactttattgcttcttaacgtgaggcgtttactttacagctcccttggaaggaaatttcgattctaccagtccagtggcatgctctatgtcttggattgttcgcctctataatagctccttttggtggcttctttgccagtggtttcaaaagagcattcaaaatcaaggtgggtttcagatgatattcagtataaaaccacaatatctatgcaacattgattcactgttaaatgttctccaaccttgcaggactttggtgatagtattcccggacatggcggaattacagatagaatggattgtcaggtatataggcgcattgacttcaatacattcttattactttcttaaagactttcaaacatcactatggtttagaactgtattagatctgatatgatatgtcttttgggtttctagatggtgatggctgtttttgcctatatatatcatcaatcgtttgttgtacctgaagtcctctctgtggataagctcttagaccaggtaaaagtttactagtagaagaaccaacacaatgtacattaagtaagatctcttatttgacttgtagtgatttatactcattacagataatcacaagcctgacattggaagaacaacaagcgctactcgtgaagcttggccaaatgttgcaggaaaaggttattggatcttagatcatcacaacccgtcattgtataccatattactctgcttccgtgttacgtctgaaaattattcaaaagaaagagaaaagaaaaaaaaaagtngaattataagtttttttgtttttctcattgtggaattcctctgtatagtactggtacatgctttatgaaagaaaagaagctaactacaattctcttacaatggaccctattctcttaaggtgttatcaaaaccaagatcttgaatcaaaaagttttagacctgattaagctgtaaacagtgttaagagaaatagaagaatggcattaagtattatggtacacgagttatagttgaagaaatgatgtcacacaccaaacacaggaaaaccaaaaggtacaagagcttttttagcaagttaaaaatcaattcttcttaagggcattcccaatagctaatacagagatgagaaaaaaagaaaaaaaaaaaatctagactgtatctagagagtttcactttcaaaaaataaaattaagaaaaaaaccatgtcgagattctgacaaaacgatgaacacccaactatatttaccatcttcttcttcttcataaaggcttttttataacaattttcttctcattgtgttttggctggcgttcccc

SEQ ID NO: 9414 - DNA, 1188 bp, Arabidopsis thaliana landsberg
ggagaatcttttactttaagaaggtttcttgtgggtcaagtattgcatacaatctttttccaatccttcacacatagtaaagcaacgattatttggtagagtactctttctcaatggatgcaaagcaacaccataagcattataagtcttcgagcaatcattcctctaattagcacaaattcgtgaatcctaaactgcaattattgaatctttaaactataaacttggctatatgcatgttcaagtattgaaagccaaaacactaactaatcagttccacaatcttgaaaaactaaccttacgtgaagatcactcatccccgccaactcgatggccaatatgggtaaatttcataaccagtcttccaattatccaagtaaacaactttcctcacagcccaaaacgatatagacagagccaaaagcatagccatcctttgctcatcgagtttcttgactcgtacaactacattagtaacaaacgccaaaagcaatccaacaacagtatacaaaaaccctacaaagaaaccttctgctccaagctgcatctctgattcttctataaagaaaacaaacttacttgaatcttcataatctttgatatacattggcatttctctaatgatgttatgcattgtccccgagacgctgaagaagtagacgaaaaccgcgccaactaaccagattctatggtcatggagaagtgtttctccttttagaatcttcttgatgagaatcggagtcgagattatgattatagcaacgatgattccgatttgtgtctttgatatgagtggtggtcgttggattgaaccaacggtgagttttgtttgacgttcgacgaactctgccattgattcggctaatccagtgaaatctccaccgtccatttgatctgattctgttaaattctctgtcgtggggctaacgagggaaatgtgtggtagtgactcgacggcgaagcggcggaaagaagcctcggagtgagttgattcgatctcgcagaagaagagctttgtgccgttagattcattgttgttgttggtgatgaaagtggcggagacgagtctgaattcgcggcggaactctggaagacgtagctggctattgccgtggagatgaacggcgtcgaagaagatgatgagtgagtaaggtctaggagtggatacggaggttatgaatttggaaa

SEQ ID NO: 9415 - DNA, 1318 bp, Arabidopsis thaliana landsberg
  unsure (1)..(1318): unsure at all n locations
gtacaatgcacaacattatcaggaaaatgccgatgtttcttcaagatcgtaatgatccgaataagtttgtgtttttctaccaaggatctggaatgcagcttggagctgaaggatttgctgttggattcttgtatactgttgttggattgcttttggcgtttgttaccaatgtgcttgttcgagtgaagaatattactgcacaaaggttgattatgcttttggctttgttcatatcgttctgggctgtgaagaaagttgtttacttggataactggaagactggatatggaattcatccgtattggccatcgagttggcgttgatttcatcacacttgaggatatgtgtttcacaaggtaatggctttagttttggaaaaaaacagttatggggaattgagtaatgatgtttttggatgttttgtgtttcgatttgaaatactttgaatcggtgtagtaatactctttcagatggtttaaactccttactgctacattagtcccttgttaagttatttatctgaatgagtaacatatataactaagagttttgggatttttagtcgattaaatataggaaccatatttggaaattcaggtactctgtcttgagatcagtctaggattgttattcggtacattgacacttttagagtttctatgtgtcttcagccttgctgcatctattcagaaaaagggactttgtgattgaggatagtgtgactgtttaagcattacgggaccttatgttttgtctttgactgtgtcctcttctcgttttgctctctgtttgagaatgagtctaagtaaaatttaggttcaagtataaatttgtgatagaggtggagtttcggattaggtttagccattcgacatgacataggcttgcgcaggtgggaaccaagtctcttcttgataggcttttcatttgttattgagtacacattttgtgagatcatttcaacttgaaaattgcaaagcatgcctctctgatacatcagtatgactttgattgtttgtttgtgtttattgtgcaattatttattttttcaaatgaatttacaatcttcagcagttaaaacaaattatagttgttgatggtaaaaaaaaaaaaaaaatctcacactaacacgcaaaattgaaaaagtttcagatttcactcgagaaagtgaagtaacctatgatttgtcttttgtcgaatcaaatggttgatggaaattttctttcgtctttgaatttagttggacaatctcgacttagttagctcattcgatccatttcgagcccacacagaanaaatgagcttaatccatatgagt

SEQ ID NO: 9416 - DNA, 1502 bp, Arabidopsis thaliana landsberg
tggcctttctctttgaaatactctgagaagaatataattcaaaagtttgagactttgaaacgtgttggtctaacgaaagaagaggtctgcttagtggttaagaagtaccctgaatgtgtagggacttcagaggagaagatagtgaagtcagttaaaacttttcttgagctaggatttacgaaagacgaggttttgatgatcattaagcgacatcctcagtgcattggattagctgcggattcggtgaagaagaagaccgagtttcttgtgaagacaatgggttggcctttaaaggttgtagcttcgactcctattgtacttggtttcagcttggagaagttcgttttaccgcggtgtaatgtaatcaaagctcttatgtcgaacgggctgatcggtgaaatgcctgcgatatcgtctgttttgacgagtcctaagctgaagtttttgaagctttttgtggagaagcatcaggatgtgttgcctgagttgaactctatcttcaccggagatagcattctaataaataagatagcattgtgaagaaagattgcttattgtaatttgtatcattaaaagtctaatcagtcaccaaaatgtaaaccttttgttgtaaggaaacatttttttaggcaataaaacaaaaaatgagaacagttcaagctgattcaggcaagaaatcagaaaacttgtaacacttaagataaatttggtaacttttggcaattaagggtgtgtttagtatttgtctctaattagtcttctaatttgttttattaaccatttttgtatggtcacaaaatctaacaaatcatgagatttcaggtaaaacacttgtcatattcgatacatcacaacaactaatcttattttttatttctcatttttgtatataataataattgtaaggtccagaaatagataagaagacagagaaggttaaccactccatatctacactcttttcttaccccaccaaaccaaattgtcatctctcattttcttattcaagcttcgaaacaactcttgaaactccaaaaacttttccaatgtcggaagaaatacgagagaaagatctcaccgactctaaaccatctccaccgcaaccaccaccgaaacgtggtctcatcagccgcaaaagacagcttgtgtttctctctttcatgattttattagccgcaaaaggactcgttgggatcggagaaatagcgtttgtaatcttgtgttatatctacttgtatgagtttctctcaagatttgccttccctcgcaagcaaacagaacagaagaagagactctcaaaccctaaaaacaaactctttcaagcttacttcctcgccactgcaattataggttactaatcttttctcatcaaatacttatgtaaatgtttttgtaaataataaaactctttctcaggcctactcttccctctttgttacatcggagatggaatataccgtggagacattcacggtgctggagccgccgcaccacatctattt

SEQ ID NO: 9417 - DNA, 1115 bp, Arabidopsis thaliana landsberg
gctgtgaaggatcaaatctgagtgcagtttgagtctgagtactaaagtgtagggcctatgtgcagactgttagcactgcattgagaaatatttgataaataccacttagaaggttacagttgttcacgattagactttaataaaactgccacagctaagacttttcatttaccttcttcatcagccgccctttttcttttcctacggatgaataagaggatagcaatcaccaatatacataacatccctgctcctacaatagcccctacaatgataacaatgtttttcttggatttcgagggcaacttattttttacagtaggtatgaaatctgcagagaataaaagccgctagttagaagatacattggactctacgaagatcatgaaagtttctgctgtatgtatacctggagttgcactgatagctgagactaatggcccataagtgccttgagcaggaatacagcaggtcccttttccagcccagaaaagatgaacttcaaggtaattttctgatacatttgctttatagactctttgaataactcggatactagaaccgttagcagctttttgcatgtcaaaatccttctcaacaagttttccctgagaaacaaaaggaactcagaggtcagaaaccatttttgagagtagagaatatcgttcatgaagagttgagccttaaaacgatgcatctaattttcacccccacttgaacgaaatatgtgctacaaccttgtaccagatactctaatagaaaaaggatctcttgtatgccaaagcttatcaaggatcttctctctctagttcaaaatagttactacagagtacggacctagttcacaaaaccaaaataactaattcacagagaagacgaagttaatattggtaagaatagtagagacctggacatatatgtcgaaaattcgccttccaagacttttccaggtattagaaccttgtatttgtatctcagcaaactgaaccgttacactatagcctccattttctagccccagtccgtaataccttaaagaagatgcagagagtctcgctgattggaaaagctctgagtctgacgtgtttgcaaattgcgttgcccaaagagctatg

SEQ ID NO: 9418 - DNA, 1279 bp, Arabidopsis thaliana landsberg
actcatgagaataaataaattttctaaactacaaaaaaaaaaaacgaaagcaaaagaaacacatcacgagacagtactttgtgatgtaagcaagcacatacaccactcccttcttctcctccccattgtttgtccttttctttttctttccccaataattctcttcttattttattggcccttgtatttatttcctctatgattccttcttttgttttaaacttctttttgattctttctatatatacaaatacaaaatctcttcttcttcttgaaaaagctctttacgtttctctctctctctctaattgcctgctatgatgcaagaattaggcttacaacgtttttcaaacgacgtcgttcgcttagacctcactcctccttctcaaacctcatctacttctctttccatcgacgaagaggaatcaacggaagccaagatccgacggctgatatcggagcatcctgtgatcatcttcagtagatcttcatgttgcatgtgccacgtcatgaagagactcttagcaacgatcggcgtaatccccaccgtcatcgagctcgatgatcacgaggtttcctctcttcccacggctctacaagatgaatattccggtggcgtctccgtcgttggtcctccgccggcggttttcattggccgtgagtgcgtcggaggtcttgagtcccttgtcgctcttcacttaagtggtcaacttgttcctaagcttgtccaagttggagctctttgggtatgattgtaattttcatcgtcttcttacttgtgttaaaatcaataggcttttgcagtatcaaaagaaaacaaaaattagggtttcacttcaattggtcatgaaagccaaattctgattatcatcagatgatcataattaaacacccatgtagaaaatgaattatgaataattaaagatgtgtaattagtaaattttatatgatttgcttcttttgataaagtatgaatccatcagcctcattaatgatgaatcggattgattaggactactaaactatgatctagttgtatatctaatgattgaaatttctttattccttttttcacaatatttgactaagagattcgaaccatatacaaaatataagtttattgataaaacgcaagatgtttatacctaacgatctaacaatttagctcagaaaccttttacttgaattggtaattgtttttcttttcttttcttctgatatataggatctggatatatataattcgtctgagtagttgtgattttaatcggacttatga

SEQ ID NO: 9419 - DNA, 1465 bp, Arabidopsis thaliana landsberg
gcatatatcatatactacaatatagttagcggatgttcgttttagtgtttaaagacatgtttagcttttacatcctgacatcaacactgttttaatgttttttgtactaaacatagaactgtttttttttttaataaacgtacactatacacaacataattgaattatatttaacataatgcactattaacatatgttgctcacgaaagtatcaaagtaattaaaatcttaaccataatatatagtaatcatgttggatcgcattatcgcatataaataaattcttagtgattataaagggaaaaaaatagtcattaattgtagaaagaaatttagtttgactaatagtaaagaatctatggcaaagatttttccagtggtaatatttaatatctccaccatttttcccttcttagacctactctactccctacactatacacatcacaatacttcttctcttttctctctctctcctcccccatcacttattgagaaacacacacacacaaatcctttccttttctctcacgccttctctctctctctcactcactctcgagcatttacaccacctcatcttacgtggtctctatataatttccaacttggtttcttggtttttcccgagaaacaatcaaaagaagaccctaaaacaggacacttcttaggtgcatgtgtgtgtgatcgtcagagaaagataaagacactttcctcttccttccttcttcttctttcttactctctctctctctttcgcttttattagtcgacatgggcacttgtagagaatcagaacctactcaaatcttcgttcctggtccgatcatcgtcggagccgggccttccggtctagccgtagcggcttgtttgtcaaaccgaggcgtaccatcggttatcctcgagagaaccgattgtttagcttctttatggcaaaaaagaacctacgaccgtctcaaactccatctccctaaacacttttgcgagcttcctcttatgcctttccctaaaaacttccccaaatacccatccaagcaactattcatctcctacgttgagtcctacgctgcccggtttaatatcaaaccggtatttaaccaaaccgtcgagaaagcagagttcgatgacgcatctggtctatggaatgtgaagacgcaagacggtgtatacacatccacgtggctggtggttgccacaggggaaaacgctgaaccggtgtttccgaacatacccggtttaaagaagtttactggaccggttgttcacaccagtgcgtacaagtccggttcggcattcgcaaaccggaaggttttggtggttggttgtggaaattccggtatggaggtcagcttggatctttgtagatacaatgctctgcctcatatggtcgttagaaactctgtaagtaaaatattaatcatgctcattattaaactctataagcttttgttaatataagtagtaa

SEQ ID NO: 9420 - DNA, 1279 bp, Arabidopsis thaliana landsberg
ttcatgaagtcctctgattctcttcagagataactcctcaagaaccttacaatgctcaagcatcgcgtttattcccttcgcaccgaaagtacaagagccacatgataatttcctcaagctcttacagtttctagcgaacgattccatacctagatctgttatctctcgacaaccacgaagcttgactcgaatcagattcgagcaacgaatcgagactatgaataaagcttcatcgcttaagctaaaagatctccgatcacaacgaagagcgagctttgttacggaatcgaatcgattgaagatacatggtaagaaagggagaatctcagatttagcgtcaagtgataaacggtgacgattctgtccgtcgactaatagccaccgtttggatacaagagagcatcgtttccgatctccggcgctgagaaattgaaagatatgagcgaggcaatcgtctggtagatttgccgtgaaatcgtaatctccgtcttcgaaaccaatcgattcgcaatcgagaaattccggtgaccatagacataaagaagtatcgcgtacgtttggttccgccggagacgacggagcttggcccattgttgtgtggttgagtattgggtaaggttcggttgagtcgcgagtcaccgagtcacacacgactcgtgagtttttttttttttttcagtatctttcgtttttaatgttttttctgcggactgtagtcaacaactctcaccttcgaggccaccattttttctcatacgtttggcccaatgggctttattccactaattcgttgctttccttgagtttgaccttcaacatagccatggtcattttcttccattgtagtgctcagtattaatgtaccggaatattcactaatgggccataaaggcccaataatgatattaatttgataattgactaaaccattggtttttttggcttcttctaagttctatgttctacttctaaacttccaatagttttggtttcggatgcaagtactacattattgagaacactaagagcaacacatgactaatttattatgggataactataaagtgagtttcataaatggggaagcaaagagaaaaatatggagtagtatttgtggtaagaacatttgtgaacacttttgggaaattgggtgggttttgctggaatacactgcactatatggttgaacttgaaagttgaatccatctctccacatctcgcttagattcttgagccatccaaagtaaaactaatactattaatactattaaaaagcata

SEQ ID NO: 9421 - DNA, 681 bp, Arabidopsis thaliana landsberg
aggtcgactctagaggatccccttgataataaaaaaagagttgctatggaattgaagtgttcagatagtgttacctggggagggcgaaaagcgggcaagttcatatcagggccgagtcgagtagtcatttcctgcaaatggatgaaacgttagaatcgcaacactatactttgaattcaatgacacgtgatgagatagacgaattacctgaaaataagaagtcatatactgcgtcagatgtccgacctgctcctgcgctgctcgagcctgctcctgtgctgctcgagcctgctcctgtgctgcccgagtctcctcctccagctgagcctctcgagcagacctggaggagcgagaactccctcccgaagacgatgccttcccttgacctatagtcctgttgtactccacaacgccggtgccaaaggcaaacctgcatgatacacatagttgagcaattaagtggacacattcttgttaatgaaatcgtcgaatcaaacacaaacacctcacctgccatgctttctacccccaccactatggtacaacgccgatgcatctaagtctggatgcatccagtcgaagtcaggcccatggcgttgagtcatttcctccccatatgcattctgcaaagaaagttggagttagacacaaaacatgcaatttaattcgtaaatacaaact

SEQ ID NO: 9422 - DNA, 995 bp, Arabidopsis thaliana landsberg
aactcttctccttccgtcgacaacaatacccattttcgagttcttgttcgaatctagatttcttcctgtgtgtttcgccacaagtttccatagaaacgcgctgaacgactctagtttcgtcctctgaccataaccagtcttgggggagctaccgcttgctagagtttggagatcttccaacgcattttctttgatgtaataaatacggcttgtgaggatattatctaggtcatttgttgtttcttgtggaaggggcaaagacgtgacaggcatatacatcttgtctatagatgagtcgataatcagtggtcgtcgcgggtttagtatagatctccggaacgatgggacagaagagattggtgcattgaatctagagatctcagcccaagaaacaaggaacatgttcatggagaaagcatctgcaattcgatgatcaaatgtgcatcctaccactatgctcccacatttaagttgagttacctaattacacatacaagttagttaagtcgttataagaatatgtttctgaaactgaatcgatgaaagtatgatttcggtgttatattacctgaatagctataactccatgcttcttcttcggaacaagcttggcgatactttcatcaggatcatgcaagttaagctcccggagctccacgtcagcaaccgcctcaaggaagtctacgccgcggttgttgcagagaatctcgggttctccagaggagtttttcacgagttcaccggcaaaggcatagtaggagacgagagcctcagccaaagacgcttttagggtttcagccacggataagaaatgacgtggtttcttgtagcagaagcaaacgctgacgtggacaggagggaggaggaggtcgaggtttgaaagaggaagccaatggtcttggaggggaagagcagccgtgactatctgcttccttatggtgatcacgtggaaaccacgttcttgctccgctgcatcttccatggtaggatgtagc

SEQ ID NO: 9423 - DNA, 788 bp, Arabidopsis thaliana landsberg
catttatattatctaggtttttgtttaattttgtgaacaggtgactcaactgaaatgtgggagcatagttgtaggctgcacatttgatcatcgtgtagcggacgcgtattccatgaacatgttcctcttatcgtgggccgagatctcacgatcagatgtaccaatctcttgtgtaccatcttttcgaagatctttgctaaacccacgacgaccattggtcatggatccatctatagaccagatttatatgcctgtcacgtccttgccccctccacaggaaaccaccaatccagaaaatctccttgctagccgtatctattacatcaaagcaaacgcattacaagagctccaaactctagccagcagttcgaagaacggtaaaaggacaaaacttgaatcattcagcgcgtttctatggaaactcgtggcagaacacgctgcaaaagatccagtcccgatcaagacctcgaaactcgggatcgttgtggatggaaggaggagacttatggagaaagaaaacaatacttacttcggaaacgttctctcagtcccatttggtgggcagagaatcgatgacttgatcagcaagccactatattgggtgaccgaagaggttcacagattcttgaagaaatcagtgaccaaagaacatttcttgaatttgatcgattgggttgagacttgccgaccaacacctgcggtttcaagaatctacagcgtcggatccgacgatggacctgcgtttggggtgccttccggaaggagttttccagtgaacccaagtggat

SEQ ID NO: 9424 - DNA, 1000 bp, Arabidopsis thaliana landsberg
atataaactttaattagctacgaaaatatattataaacttgattataattatgaaatcctattagcaaattcaacttaaaacataatttagttaatatccaacattgggaaaggtagcaactttaaactaagtcgatagtaccaaaactcaaaacataatcatgataatatctagctatccccacgatcttcggcaagtacagcctaactgagttccgtacatcaacatttcttgatacccccactcgtttgatcccaacgataaaccaccgtctgcgacggctcttacgccgtcgtcattagcttgaaacttcccgtagcgatctagtttcgacgacaaagtctccttagtctcttgaaccatattttcagagtatatagtgagagcagagaaataaccagagttgtcatgatggctagtcaccggcggtggtgttggtggagaaggaggaacgccgcgatttttcttcaagaactcttgaacgacctcttgtaatagaccagtatcagaagattcttccgggaaaaacgactcgttgttttcgttttcggaataagaaacgcatgccgttttcgatgctgagtaagaagatgatgagccgttgaaagagttattatacgaagtcgttttacgagaggaacacgaggcgtcgcgtaagaagatagactgtttattatagatcctctgcgctgccggtgcaccgtaaaagttttgggtagaggaatctaacggtagagaaggaagaggacaacgagcagacggcgaagatttcttgttggaaaaagaaaaccttggttcaggcataatgacagctgtcggataagtaaaattagtacgagcctttgctccacgaaaggcacgagccgcagagtcgtaagcacaagcggcttgttccgccgtgtcaaatgttccgagccaacgtctctccttcgacattgggtcacgtatctccgccgcgtatcgtccccacggcctccggcgtacgccgcggtacctggt

SEQ ID NO: 9425 - DNA, 516 bp, Arabidopsis thaliana landsberg
attgtcgtaacaggctttgagcggaacgctcatcacgcattaaagcgagattataccatttcttttttcccctataacttgcctgaaggatcatactttccaactgaaccacctcttctctttatatagtaagctcacaagcctcttactattctacgtaagcgatgtgggacaaaaactacaaataataatctcacctactttgtttatttgcttctttgaaagtctctgcctctttcagaaggtttcaactaccatcaaatgttacggttcatgaagttccaggaaaaagatttgtttggtttaacacaaactgagtttttttacaagagactcgtaaagataaggaaattaatgttgaagagaagctaagactgaagatacaatgtgaagcgaacccgtgactataaccattcctgagtcaccacctggtgtggcatcgctgagtatcttggaggcaagctttaaggaacccaacacagttttgttttctgaagctttcatagaccttgaccc

SEQ ID NO: 9426 - DNA, 591 bp, Arabidopsis thaliana landsberg
tgcaaacctttaactgctattgaagtccttgcatctggggtaccttttcgacttctacatgtctttcagtttttccctttgttaaataattttacaaaactcaactatgagtttttactgtttaccaatttttttattgagtctaatatctgatagctaactggtagttattctcacatgatttttggaggccatacaaaaccgtttagggtgatggctctttgatggcttatataataaatattgcattggtccttttatgtgttttcttttcagcctttcgacaaacaatctctactggattctgggatattatgttgtttaatacacactttcaatgcgtttctgacatacagtgtagccagtgaaggtgaaaaaactgttaattatgaagaaaaggtaaatatgaaagatgtagtactttccaagttagacacttgaggttcagtttcaatggtttaacacattttttctacaatataactgtttcatgctggccaaagtgtacactcggcaatgccttatctgttgagactttaatgtatcttcactcttgcaggttgagggcagtgttgtcaatatcatgaaagc

SEQ ID NO: 9427 - DNA, 1564 bp, Arabidopsis thaliana landsberg
acacgatcgttgcggcggtgcgctttgggctcacggtgaccttccggtaaaccccatggactctgtttcctgggcactggtctcgcatcgctcatctttctcttgctcctggtgaaatctcaaacgcagttgaaaaattgaaatcacaccttaacttaaccacttgattgaaccggcgtattctttccggtttgttatttcggtttgaataaaccaataatttgatcttcttattcttctaggtttgtccagtcaacgactctcagaactcagatttgaagcaaaacatcaatcgtagaaggaaggaagaaagaaaagatgggagctttagggaagctaatcgacgtagctctcttcgtatactttgtttcaatggcgataattgcgccgctcatcgacgggcaaacctcacttccttcaggaatatatccagcgtttctcaccgatctgaaaagcaagtacattgccgattttggagattacttgctcatggagaagccgcatttcctagttggactcgtttggcatgagcttctgttcttatggccgctctccattgctaacgtctacgccattcttgccggaaagtcgtggtttggtaccacctgcttgttgtatggagcttccctcgtcacttccatggtacagtggtttcaattttgtctctacatttactgaattattggtctgaacttgggagactttgtttagtgttgatcttaggagattatctgcaagctgattatgttcaagtttataactttgtcctgcaagcatcattagagctaatgttggttaacggtttgctgaaaataagttaaagttctcaactttgcttagcgttctccttctcaatgtgaattatatatctgtcactgtttcttggcggaatggtgttattttcttatctgcagtgacttattagttaaagttcttaacttttctatatattctcaatgttatttgtagattattagtgtttcttggtggaaatatatatctttccctgcaatgaaaaaccttgaagtgcaatatgctggtctgcgttcttgtggacctatggtttatgcattggctatattctgcttgactatgttgtgcctatttgttttttgcttctcatctttttacctttttcttcctgtaaatgtttaggctgcaatcctaggagatatgataggttcagggaaggcatctgatcgattgctaatgatgtatgtgcctttcatgggttttgggattctggctgttcttcgtggcttagtttatcgatccaccaaaaacactggatcttctggcaagagatccactatcatgcccagaagaaagctggcctgagattcaaaaaaaaaaaaaagcagttgatttttctctctggaagacttactcatcctttttctgtatatgcctagaaagaggtgtttatttttccttgtgaaaactttattgctttctgatttatgtggaattcttgtttgttgactcagcaacaatgaaatgtttacttggttgatataaaattcattaaagacaaaactgcctgtgctcttccagttccgccccc

SEQ ID NO: 9428 - DNA, 2025 bp, Arabidopsis thaliana landsberg
cgtccattcatttcctaaatctaccagagatccatctattttcccctaaattcatcctttttatccagaaatcaacacaatctttaacgatttcttgcatcacaagcaacaaatcgggtattggtaggtaagatttggttaattaatgcatgagaaaaccacataggagaggaggaacaatggcaatggagaagtctagctcaaagtacagaacccagttctggtacgtggcaatggcctcattcctcctttggcttgtcttgctttacctttttagttcttccgctaaaaccgttcataaccacgagagattgttccggcaagaaaatatcatcgatctccctgtcgaaaacgtcccacaaaaccacgaacctgatgaagctcctgtcgttaacgttgtctctgaggacatttccgttgataacagctctcttcctgtttctgtcgattctcctccggatgatcagatgtcagaagacaagaaggttgtgactgatctcgttgaagaacttgagaaagaaagggttgaaaatgagaagaagagagttgattcggttgtaattggacggtcatctaaggcaaggagaggacatcgagagccacgaaaggcgagatcttcgggtagattggaggcagagaagaaaagggttcgtcgtaatgatgctgatgagagcaatgcggagaatagtgatgagaatcatcaagcattagacaaagaaccgaactttttcgaggctaagaaagacgtggaaccaaagaaagcgctagttgatgataatgacgacgatcttgagaccaagagaggcaaggagttgccgaatgattcttccagtaatgttgttgaagatgataatgacgacgatcttgagaccaagaaaggcaaggataacatctctaaatctgaaccaaaaactcagagaaattttgtattgaataagaataatacttccaaggcgaaaaacagagtaatttccaagagaaaccaacctagtagagtcggtaaagttatgttacggccaagagaaacgcgaagtaacgatccatgtaaaggaaaatatgtgtatatgcatgaggtgccagctttgtttaacgaagagcttctcaagaactgttggacattgagcaggtggactgatatgtgcgagttaacgtcgaatttcgggttaggccctcgtctaccaaacatggaaggagtttctggttggtatgccacaaaccagttcacattggaagtgatattccacaacaggatgaagcagtacaagtgcttgaccaaagactcgtctttagcttctgcggtgtatgttccttactatccgggtttagacttgatgcggtttttgtggggaccgttccctttcatgagagatgctgccgcgcttgatctcatgaagtggctgagggagagtcaggagtggaagaggatggacggacgagatcattttatggtggctggtcgaaccacttgggactttatgcgtacaccagagaatgaatccgattggggaaataggtacgccaccatactatttgatgttttaatgaatgtcatactaatatttcatacatcacaaaaaacgagttaaaagatcgatagctttttgcttttactagttatactatattgcatttcaataacgagaaaagatgaaaacttgatgaattatgtgtatggtaaaatagttgcatatacagtactcatattttgaatacgtcaaaatataaaaaaataaactggtaacattttggatagaatggaatcacaaatggttaaggaaagaattcttttattggtttgactttaatcttgcagaatttcatgaatgttttaagttgtttttcattggacaagtcttctcattgttgtttctctatctacctagccaggttaatgatattaccggaagtaagaaacatgacgatgctactaatcgaatcaagcccatggaactaccacgggttcgcggttccttacccgacctatttccacccttcaacatacgcagaaatcatccaatggcagat

SEQ ID NO: 9429 - DNA, 357 bp, Arabidopsis thaliana landsberg
taagatcttaaactaataataccaaatttaacaaaaaaaaataaaatttgaattgaataacatcagattctatataatatttttaaatcactaaaactctatataaatcacaaaccaataacaccccttaattattaaacaaagtactagcattttgacaacagttatacatttcaacatagatttgttttttagttaagtcataggagttattttgttaattgatgatagctcctcctggttgttcccattttcatacatacaaatcctcaacataagcaataaaatcccatatgattttccaatccaataatgattctaacaagtttgttacacttgaattcacttgcgccattc

SEQ ID NO: 9430 - DNA, 1398 bp, Arabidopsis thaliana landsberg
gataaagcaacatcctttctttgaaggagtgatttgggcttaggttcgatgtgccagtccaccggagattcctaaaccggttgatcttgaagctttgaatcctactcctactgtgccagcagccgcatcttcgagtgtaagatctgatcagagtaattatcttgagtttgatttcttctgaagaaactgtttccacagttgatgattctcattattgtttctttgcaaattctgtttagtgttttctacaaatgtgtttctttttttttcttctttttaattttcacgtcttggaaaaagttatgagatttgtaatcattcttcaaagttgtgagacagtctctgtaccatcttcttgagtttaatgttagacacgaaccattgagaatccattaatccaccatatcaaaacctcaaaagttccttgcttttcattgatctgaactctaaaccaaattgactaaacccgtaattacttacaaatggatatataataatcatatgttatcaacaagcagttcttacttaagagttaaaaccctcttctaactctgtacagacgaagaggaaacaactaatctaaagactgagataattaccattgcatagaagctaaatataaaacacatagcttcatttcaattgtttatagcagttataagcaatagccacagatgcagcagcacaagcaacagctaaagcagcatatgtatcttctctctcccaagtctccaaccacattgacatcaccgcacaaaccttgaatccaccagaagatccattctcgctgctaccgatccgaagagatgcattttttacagaggttactctctccgaggtatttttctctgtgtgaatctcctccagacagtaagaggagttcccattttgttggcaaccactaccgttcagctctgggacagctcgagactggcaacagatactattattaactgattcttgagtcacctctctgttgctgatcttttcgctgtttaattgtaacctttgttcttgacttttcttctgatcttcttctggcagacccatttcacccctggaaaacaatcaataagtgttgtttaaaggccgaaattctttttagagactgtctaaatcaagaagctttgatcttctatacctccaaagccggtctacaatttcgcctttgttaatgtgttgctccaacaaaagaggaacatcctctagagtcacacatccatacctaagagacaagaattacttaataagttaaaactcgcatagaactctttatggttgcacactcaaatctttttactccaaagctagccttagtttacttaccagtgtcctgtgaaacaatggttgatatttaatccatagatgataacatctccagtgtgtttgtaccaccaa

SEQ ID NO: 9431 - DNA, 1381 bp, Arabidopsis thaliana landsberg
ttgtgttgcagatattcagccatggcccaagtctaggcccagtttgtttattgttcatttgtttgactatgtagccgatcaatggtttcttgcaagttgcaaccatgtaaagtacttttggggtccttaaaatagagactaatcgaaatgttaacaaatgctttaacaccattcaacaagaaaaaactcaagttgcacccaaaaaataaaaaaaggagacacttaaaagaagataaattaacaagagctctacaacacaaagtacaaactaccataatgacgttcactagaaacttacatgtcgataccaaatttgccaacatgtcgataccaaaatttacctgtaaaaatgcagaaaaaagttgacttacctttagactttaaatttaaactttaaaaagcctttaagcatatcttccctttgcttctttaacaacttttcccaactcaaaaggccaatcaaataacaaaataattactttacatacatactgaaaaaaaaaaaaactaattcatggtcatcaaaaagcttctgtatattatcttttcttcttcacatctttccatcaaatacacacaaaaaatgaccattatttttccttctaattaaaaaaaaacatttttttaataattactgtgaaaaaacaatgttttaaaaaaaaaaaatcgagaaatcaaaaagggaccacttggctgctgcaaccaaagtcatcggagttagcgaaggaattgtagtcaggccacgaatctctcagaagcttcaataacttctgtgctttcttcttcgctctctccgtacactcactctgcaccatcaacaacaactgtaccaccactcccgcccccgccgcttcctccctccacctttcctccgccgtacaaagcgctaacaacgcccccgccgcatactccgtcgcgcgatccgaaactctcaatatcgttttaactaacaacggcaccgttaaagcgtgctcaccgaacgccgcgcatccttccggcgttcggcagagtagctccaccgtcgctaaggctcgctccgtatcgcatctatcgaaatccgccgcgagtctgtctattagaatctccggcgcaccggctgtgatcgcgatgtgtcgcgtcgatttcactgaacagagcgcgaacagagttttgattccgattttgagagctcgtcgtgacgaaatcggatttctcagaagatcgagaactccttcgaatacagattctgaattcgaaatcgaacctttcaggtccgccgatttggttcccgtcgaaacaatctcgatcaacgcggcggcgttaacgcgtgtttcaatcgacgaatcgaataacaaccgggtcaaaaactcgacccgacccggatccgacgatatcgaaacaa

SEQ ID NO: 9432 - DNA, 1530 bp, Arabidopsis thaliana landsberg
cagtgctatacatgatgatcgcttttgctgttttacctaccgttgcattcaagtgagtctatcgaactggaacaatcttatgttatttttgagtgatcaactaagagtcttttcaagttgtgaagttcgtatgtctaagctggtttgcacatggttgtattttgcagtgtaacaaatgtctacaaagtcccaagtcaataaactggagcggggggggagcgttagctatggtaatctcctaactagttattgattcagaaatagttaattatgctgcaaaattaatgttttgttcaaatcgtgttttcagctgtatcccttcgttgtcttacttggaggagttttgatatggtaaagtcttgttttcttctcttttgaaaagaccacgtgatcttattctctccttcattgttgaagtttatttggatcctattttttacagggattacttgtctccaatcaatctcatagcaacatatcctcacttagttgtactcggaactggacttgcatttggatttttagtggtatgtcttgattcgaaatcttaagttagatcaatagtacaattattccgaaaaagttgtgatagaacaaaagttactatgtttttcctttttcagggaagaatgattcttgctcacttgtgtgatgagcctaaaggactaaaaacaaacatgtgcatggtaaatccgataattttttcttgccaatttctccgtcttactggatactggttttgaaaatgtaaccttgtgaaatctttttactcaaaatgcagtcactactctatcttccctttgcacttgcaaatgcgctaaccgcaagattgaatgctgggtatgttttctttctttaaattttccgcacaaacttcatcggttcttttttttctttaacaccctgagaaacttcatatttcagggttcctctagtcgacgaattatgggttcttcttggctactgcatattcacaggtttgctcctaaagagaaaaaaagccttagttagctgttgatttttctttttcactattcagttattttgcccgctctaaaccaatgttgtattgatgcaaaacagtgtcattatacttgcactttgcaacatcagtcatccatgagatcactgaggcccttggaatctactgctttaggtgaaaatttagataaagaagatcgaaattcttgttttgaaagcctaatgaattaatgtacatatctctggtttctaatccacaggatcacgcgtaaagaagcttgaaaagaaacctttgacactgcgaatggtcgatatggaccagttggatcggtgatgtatttcttcttcttattcattgttgtctgtttgatcaggataggtgaagttatgtagaactttgtataatgttcttgtttttggatttatgcattgggcaaatacgaaaactattcttgaaatgctacgaaaatgattttagaaggagcatttttttaaccttatcttgtacctcgaaaattggctggctggatttggtttgcaagcatttca

SEQ ID NO: 9433 - DNA, 1607 bp, Arabidopsis thaliana landsberg
tggtgtaaaccttatttttaaaaaagctgtaaaattatattggtggtttaaaagattaaaagagacggttaggtataaacagaaagggaagggatcgttgacaaatgatttgaatattagttaaaatatatttgagcgaaaaaaaaaatttatacttggaagagattgtttaccggtgaggttacaaggtcgttggctagacggaacactgaagaggagcatcggacgacgttttgttggtgttgggacaaagtctccaagacctgaatagagagctggtcggagaatacgcagtagaagtgaacaaatatcgttggggacgagattgaaatccgagcattttgcatgtactcttccaaatttggtttgtgaccacttttgtaccactttgcttctactaaatacgctttggatacatctgtccactaaatttaagataattgaaaatttagcattaggtaccaacacatgcaagtttccatggtttaagttatgtaaagtatccatagttgaaattatgtaagaatggtttttatgttttaataaatttattaacgagatgtataaattattaaaaataataaaaaaatgtcaagggaattttttttttttacatcaattttttttatcttttttttgtaaataattgtaagaacaatagattcaccaaaagtatttgttgaaaagagtatatatatacacttacagattttttgaggaatgggatcacgttgatatttttagttctgagaatctcacatgcaatgctgttgacttcattgtatataacaagaaaacacaacctcatgtactcggggagttcatcaagacgatttatatcccagctgcaacatatatatagacaattcaatcagtaattttaatttctatgatatattttgacaaaaaataaatcttatttgatatttaattaattatattacgaaataacaagttgaagtagaaaattaagagtgtatgggtctttacttttcaaacgcgacagtgaaaagctgaagttcttcaagagtgccatagatatcgtagatatcatcaattgtagtaagaagtgcatttattttcgtcattgtttgtctaacgtatccgtattgaggctcttggatttgtccaatcgtccagaaataattctccactattctgtctcttgcaaagtagagttgcttacctaaacctgtctccatccaccagcttcacaccacatatatagcaagaggaaaatttaagaaggtaaaatatcttatatatacttattcaagatctcgaaaataaatatttttgtgtgcccaatccatgtaacttaacaatgtgatttgtaagagtgttgcgcgacaaacccatgtttatattcggtagaatgcatgttgttgacaaaaatggatatatgtgtcgtacgtacgagtttcaattaaaattatacagaagttcatgaattatcatctcaaactgactaacaatattgataagttaatatatgacttaagtacttgattatgtcataattataaaaagagtttaaatagatttaagatatcttaaaaagtagtatatgaatttaatttttaaaattacctggaaacgttttgagt

SEQ ID NO: 9434 - DNA, 725 bp, Arabidopsis thaliana landsberg
atcataaagtttttcatttgtaaagaaatatctacatccttagcaaaaacaagattattgtctctgtagtttgtaatataaggaacacttaagatataaaaggtagaatatatcaaaaatctttacattaacaaaccgcaataatacgaaaagcaaaaaattatttgatatatatatatatatatatgtgtgtgtgtgtgatcagttattattttataataatataccaagaaaatgaagaagcttaagtagaagatttctgtaataatggtctagtggtagaccatggtccagctacaaaataaccaattgattgaccaaaaaaaggtagaatatttcttaacttttcaaccatggaagtgaatagttctagttcttcaagagtgccatagatatcgtagatgtcgtcaatggttgtaacaagggcattaactatagtcatgatccgtcggatatatccaaattgtggttcgtatattaatccaacggtccaaaaatagttctcgactattctatctcttacaaagggaagttggttagtcaaacatgtatccttccaccatcttcatatcattaacgaaagaggattagaacgaattatgtatacattaattaacaacgaaagactaggatctatatttctttgatagaattaccttgaaacgtatttgagatctttttgatgagccgcttgtccataatgaaaacatttttgcaactcgatc

SEQ ID NO: 9435 - DNA, 1375 bp, Arabidopsis thaliana landsberg
acatacatctggaggtataaattttccccaatgatacttttcttcatactctctttttcttatttccttcttaggtacactactctttctgttgactgctgcacaggtgttaagaggtggaagacgagtggagatttcgatctatgacatagtggtgggtgatgtcattcctctcaacattggcaatcaggtgagtggtttattctccttttaattttgtttttgtccatattaccttgtctaatcgaagtttaaatttatatctaggttcctgctgatggagtactgatatctggccactctctcgcccttgatgaatctagcatgactggagagagcaaaattgtgtgtttttgtttcctgtcatagtaaaattgttgattttctcgcttcttcttggtataactttctatgtgtcaatttccctttccttgtcaggttaacaaagacgctaacaaggacccattcttaatgtctggctgtaaagtggcagatggaaatggttctatgctggtaggacgacttcctagtttttcttgttcagcagaactgatctcttgggagatagttattaatctcttccatttgtgtgatatgtatgttcttttctttctgcaaggttactggtgttggagtcaacactgaatggggattgctgatggccagtatttctgaagacaatggtgaagaaactcccttgcaggttgatatctttgatcattgttaaggaatctttaaatgtttacaaatcaagctaatctttgacttgcttgaaccaggtgcgcttaaatggggtagctacttttattggttcaattggcttagcggtggctgctgctgtgctagtgattcttctgactcggtatgaatgctatctttgctggttattattttggaactcggccaaatcatgttcatgacagaagaacgattctagttgacattatgcgaattttgtatgttgttctctttttcagatatttcactggtcacactaaagacaataatggaggtcctcaattcgttaaaggcaagacaaaagtcggtcatgttattgatgatgtggtcaaagtccttaccgtagcggtatgtttcctagtgaacaatcttagtctgatagggattcgggacccagcagtaagtatctttaatcttctttagtaatgctaatactcggctattgctgcaggttacaattgtcgtagtggcagtgcctgagggtcttcctttggctgttactttaacgtatgtattcctatctttgctatatcagacctttgtggtagtttcatagtagagtttacttctcgattgctgattttaattccctttcttctaattgttttcagccctgcctattccattaggaacatgt

SEQ ID NO: 9436 - DNA, 574 bp, Arabidopsis thaliana landsberg
  unsure (1)..(574): unsure at all n locations
aaacttccactagtttttagtcatcgttggttttcacaataaagcagctcttatgcatacattctcgtttaagaggagacccaaccattcacatttcccatcaactctcttcttcttctttctctctttaactctgttcatctctggtgtgagttctcgtgtactaagtcctgtccctctagataactcgagcttgatctctgatggtgtccatggcgcctcggattacaagtatctcactctcgaccctccaaagaacgtttccaaagcagcttgcatccatgtctacgggttccttccatgtgcagacaatattggaggttatgtcttccaagttttttcctttggctgtctcttgatcattggtgactatttcttgtctcaaggaagatccaaactctttgtaatcttcgaggtcgggttttatggtggtatcgtcttccctctccttaccatgttcccaagaattgcccttatgatatgtaaggatccttcccactaagatatcaaactttntaagtatattacggattacttcattcattaccaattggttttgagtttgacaaaaaag

SEQ ID NO: 9437 - DNA, 497 bp, Arabidopsis thaliana landsberg
taaacctgtaggcacaggctctccaaaacagctcctcaaaagcaatactgtcgatgacgcagcatttgagttggcagatcttgcaaatttggaacaagaggcgaagaaagaaagccggagacaacaacactaaacaaccaccactaagtgcctaagtgactaacaggttcaccatcgaagagtcatcacacatgaagatgttaaaccgtagatgcttttacgtgcctgtataagcctttagtggatgacgcggctgagttgtgcatccgaaatagtcttcggcatggttataacttttaaggctgaaagcatgtgatagcagcgcatcgagggtggcatccacagtgtcattagcgaaatcataccatgtcagcaagggaagccagacagagatcacgggaaaataagatcgggagtaatcattgtccacagatctgtacgttcagcagaggataatggaatatgcgtacacctggcaatgctgctgacacaagctt

SEQ ID NO: 9438 - DNA, 1939 bp, Arabidopsis thaliana landsberg
tttccagtaaatcagagtcctaagttactgcatcaaacatcaccagaacttcaaattctcaatataaagtacttttcgaaatcatccttataatcaatctatgaaaagattaagcaacagaacggaatcaaataagttcatcgatcaatcgacacaaaacttggaccactgataagaatagcagtaagagaatatttacgtttagaaacagagccgcacgagttgcttgggaggtattcatcgtcgcgagatatgaccggaacagcaaacaaagtgaaaagagggtttagggtttttctctgttactgtcttaacgggaccgaagctccgactccgagagtacggcagtcgacacagagttcttgtcttgtctctcttctcaacgaatcttaggtttgttggtacttttttgtttacatgagaacaaaattctgattgaaaattctaaagttgagcctaggtaagcccaataaaggtctaatgggcctaagggccgatatcacaaatcgagtttcaaatgtttcagtttacaacttcaatcagctcttgttttttgatttctatgtgattttcgattttcagacttcaacaattaacatatgccatggatgattctgagaatttaagtgtttctaagaactaattataaagttgtaatagtgatttgagaaaatatgttaccattcgtctgttttaattcggtataaaaggggaaaaggtactctaatttgggatgaaaaaccggatccatgatcaaagtcaatttagagaatctccaaacacttcaaacaaagaaaggaaatgctttcaatatcaaaatacaaaataacaaactagtgaacaaaaccaaggcggctaaattataagtttaagccatttttgcattgcttcatatgttactcggatacatgaagactctcactctgcttccctgcaagaacataaggaataatatcttgttaaaaacccaagcaaaagatttcacttctaaacagagaagatgattatagaatctgtttaagtaccatggacttgggaggaaggttggatgtgaatttggcacggacaacaccgctgttaccgtgaggcctggtaacctttccccagatacagcggtagtggctaccgttcttctttgtcttagccttgtagatgtaagccatcctctttcccttgtaccagtttacctcctcctgagtgttaactccttcgatctggacgagggacgtgtttggatactggttggacttcgacctgcacaccatagtaaatgtcagaccagaggaagtatcaaacagtaaggtctcggttttcagcatgacaaggttattaaagcagaactcagttaacaacagtgttgattaatagaaatacaaagcagctcaaaaataaaatgccagataagtgtcctaagaaatgtagacaactaactaatcaagagtcaaaatgttcccatttagtgaaagcatcagacacataatctgatcataagtggacgagaagcttggttataggactcgtttctgtcaaattggcttacataaataccaatcaacgttcattacatggaatcttattggcgtccaatcataagctataagcagtgtaaaatggaaaacgaaagcgatgaaagaaatgggtcaccttttgtatccgaggatggttcccctcacatagagtctgcaaaattagataacataaaaagaatcagactttcgcattatcgatgattacaagattactaaaccatgaagaatcagctcaaatctagacaataacaatagtagcaaaacagtttcagaagtgaggaaaacagagcaaatctcaaatgatacaccgatagaaaaccatcttggtgatatagatcaaacttgaagaagaacgaaaagagaaatagaagaagaaagacctgactcgttctccttggcgtcccttgacc

SEQ ID NO: 9439 - DNA, 491 bp, Arabidopsis thaliana landsberg
  unsure (1)..(491): unsure at all n locations
aacgattttaatttaagcctatatattaacaacttcaaataattaagaaaacatgtttttaaatggtgaagccaatgtcagcgacggtgaacacattaggaaatgcattttctcaagttctaattgcatcaactgacgaagcaaaagaggcaatgagacaaggttgctatgattacctctctagtggtggtttttgcacgtcggggatgatggctctactaggtggcatgaatcctcgtccgctctctctcatataccatctatgtgctatcactttacattcaattggccatcttctatctccatttccttccccccttagcatttggcatagcctcaggctttttggtgtaagttattttacctttccttctattaaattattttgatagaatactttattttgacgctcttattgttttactaattacaatttaacattganttttttttttaattgtatgttttatgtgaatcactagttggctttg

SEQ ID NO: 9440 - DNA, 1651 bp, Arabidopsis thaliana landsberg
  unsure (1)..(1651): unsure at all n locations
aaagcaaagtagcaacctataattttgcctttgattataaggagaaccgttgaatatcatcacatgtgtttacaaatactttttcagattcccatctcttccaatatgccctacaagtttaatttctcagtgacaaattcacaaaacatccagatataagcatatgagtatctatcacaaatcacaaggtggagtgaaatgtggaagatttcttccatcttccaagcttctccattccctgaaattgattccaatgtaacattatcttccaattattaaaccgaaactgaaattctccattgagttatatctaaaggcatatttgaaagttcatgttagtgttttaccttacgtggtcctacagcaagttcgttatcaacaatggagattgcctcaaaccccagtggaatcagaaccttctcgtatctacatattgagagattacaaagtgaatattaagcagaatatttcagtaatgttgctcttagtaaaagagataacagtagattcttactcagacacagatacttcataaggaggacctccagaacgttcatcaatctgcagaaggacacattgtttttcagaaactactgaaatgtaaggaaacggatcagagaaaagagagatgttatgattctcacaggaaacatcaatgttataagctctccaccaggtttcagaagtttttccattcgttgtgcccatagaggtcnnnnnnnnnnnnnnnnnnnacagaagaagctgcgagaatagtcaaaatgcagtgatatataagctaaagttacatttgtatgaaccagaaacacacatctagactgtttacatacgtataatcgaaaatgagatcgaatttttcagctggctcccaagtgaaaaagtcttcactcaagaaggagaagtattttgcatttggcaatgtagaaaacttctgcattgagattaaacaaaatgtgttaaaacgtactaagtttgaaataggtatcagaggcaatactccgactcaaaacaagcattgttaaaaaaccaacaatgcaaggctacatatatgaggacatgagcatgtccatctcatttccaaatcagaactattcaaacctttgttgatcgctcaaccgcagttttagatatatccaatccaacaacatgacgatcaggggaggccattgccaccacatcataaccctacaaaaaccataacatcttacacttagtaagacaatcagcaagtcctgcaaaaaccaacgacacaaggcaggtgtatgtacaacagaacagatctaacagtactactactcaatggccacagtactctagcaggaagcaaaaactcaaagaacaaaatggcttcaataacaagaaagctgagtactttaactttatatcaagcaaagaagctgaaggaagttggattttcaagtgttgacttattaaaaagagacaaaagagtattgaagaacatacagttccacaaccaggaactagagctctgccattaggcaaagaaccagtctcgacgagatgcgcaataaccggagttggttttcctaagtcccatggagttgctcctgcttcccaactcttcttccaaccacctaaaccatttcacataatgcttnagagaaagaaaaaaagaagattgatctgagaa

SEQ ID NO: 9441 - DNA, 368 bp, Arabidopsis thaliana landsberg
  unsure (1)..(368): unsure at all n locations
gcaccaaataattcttttagcccaaaattttccaaaggtacaacaacaaatccggcaaaaacacatacagaaaccaatttttggtttaccgacgaaattttcaaatcagaaaaccggatttgatccaagtgggtccctaaaccgacggtttaaaacaattttttcaacgatgagcttttttcaagtcaaactagcgaaacagctatcagacctagacaaaacattagaaacacaatcatgatgatgatcttggtcgtctttagatggactattaggcatagatctaagcattcttggtgaatctaagctttttctcaagatctgtctcatggcagagatcaaatgtcctgtcggattcggtnggtggg

SEQ ID NO: 9442 - DNA, 1803 bp, Arabidopsis thaliana landsberg
  unsure (1)..(1803): unsure at all n locations
taatccgggatttgccggtttgttattggttgagagctaaacccgaaccggattgctaagcttgtctgaaaacactggtttagaactaaactccgaagcttgcttgcattgtcttcttacgcagtcacgatctcgatcaacttcatcgcttcttccgaaagctttcacatttgatatcaaaatcgagaaacaaaaattgaaaacaatctgtttcaccaaaaaagaacaaaatgcatgggttcgatttcaaagagatccaggagaagatctccgatagctttcgtccatggcaacgctcttttcaattctgggttcgagctactaatatctacacaggctacaaggtctctcttttacggtatctctttaatctttcttcattagtctatagtatcgctaaattttttgaattttgggcttctctgttttgtttggattcacgtgtttcaacttcgcagtcgtttagtgaaagatgcaaagaagcaagaggaaatgtgggaaagacaacatgaacaagctgctgataagatttacttcatgtgctctgatcttggtggtttcttccttaaggtacttaaagtgttcggctttattgcattaatggttgttgttgtgttctgttgatgcttgactttttttgtttgaatggttaaatagattgctcaacttttagcaaaacctgacatggcaccagctgcgtgggtgaaaaagctcgtcactttgtgtgatcaagctcctgcgacgccgtttgatgcaattcaacttgttctagagaaggagttaggtaaaagcattggtgaaatctttgaaacgtttgatgaaaagcctcttggttctgcttctattgctcatgtattacagattttggttgaaaccttacaattaagcaagcatgattgagtttgagtattatggaacattaggaaaagaggaacataatctggttatgatggtttcttgaattagctagaaccttgtcctctcttcccatagaattattatctcctgacattgaactgtagcaacattgtcaaactctggttatgtttatactaagaaattatacatttatttgctttcttaggttcatagagcaatagtaaagggtaacaagatgaatgttgttgtaaaggtgagcattatcatgggactactaaaagcctaccagcttttaataagannnnnnnnnnnnnnnnnnnnnnnnnnnnnnnaacttcataccacatgtttaggttcaacatcctggcattgaaagattgatgatgacagacataagaaacttgcaactattcgccttatacatgcagagaacagatatcaaatttgacctgcattccataacaaaggaaatggagaaacaggtacttaattgatcttgttcctttgtgagacttatttttctccaagtcactgaaaactatgcgttttcttttttcaagattggttatgaatttgacttcaaaagggaggccaatgcaatggaaagaattcgatgttttctttatgagaacaacaaaaagtctcctgttttggtaccaagagttctgcgagatatggtgactaagtaagtgttcttacttttgcatatcatatacctgattggttaatgtgataatgtttaaggccttctctagatggagcctctgctgtcatttaatggcatactcacatcttaaactacaatttttttttatcatttttgcttcgggtgatacttaccatatgaacaatcatgatttcctcaggagggttttggtgatggaaatacataatggaatttcaatcctgagcattggtgatgag

SEQ ID NO: 9443 - DNA, 691 bp, Arabidopsis thaliana landsberg
agtatgaaaaagatagaccaatgattaaagtataaccagaacagtggtggatctagaaacatatttagtataggcccaatatatttaacataaacaaattttaatctaaaagttgtattcatttatgaaaagacatctgaatgaagcaaatttatttgatgtgttaatcattcatttatgtgttaatcagccattgatgttagtatagtactctatgctaacataatttttttatactataaattaaaaaaataggtaagaaaagaaaaatagattaatataaaaagcattttattagctgaaataaataaaatgaaagaagataataactaattgactaaaaaattagtagagcatatggggcacaatacactaagtatttcatctttactataaaatgtaacaaatttcaaaattatcaaactgtatatagggcacgtgcctaggtaccaatagacgtacgtccgccctgaaataagttggtgaatatggttttaattcctctaatactcactgtactgccatggtagaggtgaaaaaaacaattttagaaatattataatggattaagctgtccagttgggcgtattttctttacattttattaacttataaacaataataagttcaactatttattgactagtaataatacgtggaaaatgtctattggttaaaatatgggccataa

SEQ ID NO: 9444 - DNA, 1337 bp, Arabidopsis thaliana landsberg
caacgttttgagtttgtaatagagaacgcctcatttttacgtgagagattctgtaatatatatatagataacgtgaattggaccttatttataaatggtatagttaattctttactactccaatccgtaatttgattaatggttggtgttgtaagtctatatatatatttatattcaacttccaccacatttaaaaatggggacaaatgtgaacctacaaaaccactcaaaccctacgcatataaactcaaaaccaatgtttgaatcaactaaaatatagatggaaaatgaacgacgatagtattttgcttttagacgccacattttctttttctatcattgttaatagaagctgatcgtatatatcaacgtcacattaaatgtaattttactttttgtgaggataaatactaatacttttccatgcccacttgtattctagttttgttgccgttgaaccacttacaaacttaacgttataaataccattggaacgaacacatgagagaagaaagtacataagagggaaaaggaaaatgacttatggggaggaggagccggttagcccgatggcgcgtgtattccaatcgccgggcatagacttatgtgccgtgaccatcatgggtttcaaaacaaagattaatcccgacgttgttcttgatgccttgaagcaaaatgtctccaagcatcctcgtttctccagcatactggtacacttaaaacaaacatacacacacattcttacttcttacacatatagtttttgtttttgatactggatttaaattttactttctatagaataaaattttgaatattattaatcatataaatatcagcctttttaaatatatatgttttttatagacataagaactgtacttatgtcttatttgtgatttgacgtagtgtttggtttccatttgtcttgacttcacagtctgataatggtgcaaaatggatcgagaccgaagttagtgtagaagatcatgtaattgtaccatacatagacgcggaagagataggtgaaggtggacaaagcttcatcgatgattatatgtcacgtctcacgatgattcctcttgatagatcaagacccttgtgggacattcacatccttaacgtcaaaacctcagaggctgaagcagtcggttttataagatctcaccattcgttgggagatggaatgtctttgatttccctcatgctcgcatgtacccataaaacatcagacccagacatgttttcaaatgctattccatccatgaaaaggagagccacaatgtcgcacagagttaacacccaagactggctctagaactcgacactcaacattg

SEQ ID NO: 9445 - DNA, 521 bp, Arabidopsis thaliana landsberg
aacaacattttagcaaaaagcaagaacatatctaccaatgtattccaaattagtctcattgttttaaccaatggtgtttattgccgataagagccagccgggtttcttaaggctgtgtgacaccgtgcttcgccgtttcaccgaaggaatagcactagacaacatgtcaggatttgatgttttatgggtacatgcaacaactagggaaatgaaggacattccatcggccaacgcatgggtaaatcttattacacctactgcttcagcatatgaggttttgacattaaggatgtgaatgtcccacaaaggtcttgatctatcaagaggaatcaatgtgagacgtgagataaaatcatcgacgaagctttgtccaccttcacatatatcttctggacctatgtatggcacgaatacatgatcttctacattgacttcggtcgcgatccattttccaccattttcagactattacgattagacagatggagacccagacactattagacactattatgtcaaat

SEQ ID NO: 9446 - DNA, 1732 bp, Arabidopsis thaliana landsberg
  unsure (1)..(1732): unsure at all n locations
gggtttttgggaacgtgcttaatctgtctgtatcttagcttttgagattgggtttttgggtatagagaacctaggatggattcagaattgagtttttcttcgagggatgtggtgaattgctgtgaatatggttgtgattattctcttggggcatgttcttcagatcctttggctaggacggtgaaaagaaagttcaacgaattcaaagaagggaacaacatgatgttgttacgaggttcttctgattcatcatcttcaaacgctaagatactagttgagaatgaatgtgcagctttacttgaggctctttctagccaaaggaaaacagttaaagatcttcatttagagcttgaagaggagagaaacgctgctgcatctgcagctaatgagactatgtcgatgatactgaggttgcagagagaaaaggctgagattcagatggaagctcggcaattcaaaatgtttgctcaagagaaaatgacacatgaccaagaaaagctctcggttttggagaatttgttgtatgagaaagaacaagctatcgaggcattgacttatgaggtcgaagcatacaagcatagattgttgagctatggggtatctgaagctgagatacatgatcagatacttggttttggcagagactctagcacggttggctttgatgtttacccttgcgagtatacttctttggaatgtagtgtggatgagaacccgagtggaccagatggtaactttgagattgaagaaaaggtgatggttggtcagtctccaagatggccatattatgatcccaattcgcctttaggaactgcaaaagatataaagggggcatctttcgcagactctcctatgtctagtagtagcgaccgagtttatactatcgactccattcacgtgggagtttctgaagttaagattgacgatgagcctaataagatgagtaagggaaagttaaatggtgatcactggaactctccaagataccaagaaccgttcacgactcagcagggagttaacgagccagatatagagaagctttacacaaggcttcaagcacttgaggcagacagggaatcactgagacagatcattgtgtcgatgcggacagacaaagctcagttggtgttgctgaaagaaatcgcacagcatttaacaaaggaaaccggcgcaacaagcaggcgaaaccctgttagcaaaatgccatctcttaaagtattctctgtagtaacggtcttcaaggtaaataaatcaaaacaatctctcctatctaactcttacatgttgcatactgaaactccgtgtaagcctgaattttgctttcccttcattcttgtgtttcagtggattgtgtctttcgtttcgtggaaaaggaaagccagacaaaacaagtaagcagatttacgagtcaaaacgctttgctgtttccctcacattgtggctggtattactgctttctgatgaaatcaattatataaattgcattgcaggtatgtttatgagttgtcagcaaataatatggggatgcttatgattctaggcgagggatctggaactaggagatggagatgtttaacgagttcacatgtctagatttccatttttttatcaggctttcttggcgtagttagtgcaaaacaaatgtacattgctctgcactccaatcaaatatgtatgttggatgaatcaggatctggntgaatatgtaaaaagaatctncctttcttttttg

SEQ ID NO: 9447 - DNA, 858 bp, Arabidopsis thaliana landsberg
cctctgcccagtccttttgctccctctgcttttgtcctcatgtcctgtcttcgctctctcaacaactgcagacattaggcctccaaagtacccaacttcggctaaccctctcgactaagatcctctctctaccctactatcatcacaactctgcaaactccctaacttctcttcctctcgtccgactatagtcccatctctctctctaaagcagacaaataggttcacagatttatcggctaagcttaacaatttgaaaaacctgaattgccaatcgtctttaatcaacgttggaccttccaccatccctctcaacggtgccaatttttcctcaaacatgtagctaagctccaccaaaaccctacgctcctccattttgaatatttctttcaccttcaattctaaatccatcaaacatttcaaatctgacatcctcaaacatcaaccttgtcggaaagtatccatcttgaactcccattctcctgagctgtacaaaatccacctccctgcttgcacgaccacagtatcatccgctgcaattggaattaaaataaaagtctgttatttctgtaacaactgctactaatccgcattaaattcctgatcgaaaattataaaaaacgctggttatctaaccttccattaaagagattcttctctgcgtgtggttgaacggttgaaatttttattacacacacccatcctcaacctttagtactcaaatatatcttcaactctcacatcgtgtctctttccaccccaaacaattccctccataaccgaatcactactttggataatttcaaaacatttttaatctaattcaacctcaccctaatcatttatttctaccctaat

SEQ ID NO: 9448 - DNA, 956 bp, Arabidopsis thaliana landsberg
acagaccagtccatcactatcatattcatacctcctgaaggaattcagcaacagatttcctctgtggacatttaaatccacaatcctcaaagaaactacatataaaatcccgtggaccgtgatagattatctttccttctcccataagaatcaaatcgtcgaaaagctcaaacgtttctggtgcaggctgaagcagtgaaaccagtatggttccttcagatagacgtgcaaactgttggagacatgatagaatctggaatgtagttgaactatccaaaccattcgatatttcatccatgaacagagttttgattggacctacaatcatctcacctgcaatagattacagagatatataccaaacatcaaaacaatgtttgcaaggaacctaaagcagtttgtgaaattttacaagtacctgtagttaatcttctcttttggccaccagatattcctggtctcgaagcatctccaacacgtgtatctgcacagatagtgagtcctaggatctgaaacgcagatgcattaatcaacttctgataagagtagaagctaaagatgaaataaaaaaagaacagactctgaatgtatcttacttttaagatatagtcggtttgcagatttgtttttgaaccctcaatagaagctgcctgtcatgataaaaagttgaattccaaagatgttttcttaaatatcaaaacaagttccaagttatatatatttgtcatatgaaataaatatccatagttattttaccttcatgtatgcatcaatatcaggatctggaactattcctttcagtttctcccttctactaatctctttcatcatttctgatgaacaaaacaccgtggtttttcgtgtcaatacagctcaatgcaaaaggaaacataagaatttagtatagcccttacctaaacggcttcccgcgccttaaaacatccagaagatctagt

SEQ ID NO: 9449 - DNA, 770 bp, Arabidopsis thaliana landsberg
atcttctcctaacaaagcagcttccacctcttctacatgtcttactaaatcttcatcatttatttcccaaatatctgaaacagtccttttgctacctctgcctttgtcctcatctactgtcttcgctctctcgacaactgcacacattaggcctccaaagtacccaacctccccaaaccctctcgacgaagatcctctttctaacctactatcatcacaactctgcaaactccctaacatctcttcctcccgtccgacaatagtcccatctgtctctctgaagcagacaaataggttcacagatttgtctcctaagcttagagatttgaaaaacctgaattgccaatcgtctttaatctgggttggaccttcctctatccctctcaacactgccaatttgtcctcaaacatgtagctaagctccacaaaaaccgtacgtttctccattttgaatatttctttcaccttcaatttcagatccaccaaacatttcaaatctgacatcctcaaacatctaccttgccggaaagtatccatcttgaactcccattctccggagctgtacagaatccacctacccgcttgggcgacgacagtatcatccgctgcaattggaattcaaaaatagtctgttatgtctgttattacatctactaattcgcattcaattcctgaacaaaattaatccaaaaaaactagttctctcaccttccattgatgataaacttctctgcgtttattggtgacatttatacacacaccatattcta

SEQ ID NO: 9450 - DNA, 2446 bp, Arabidopsis thaliana landsberg
caatgtgaagaagatcatgaagctaaagagggttgatttaattttaaacttgtcacaaatggactgacctggcttctcttaagttatcaacacgtagaccgaacccacattggacatttccagtcctatgattagttgttgctgcataaaaaatgagtccaaacatgttcaaataccaagaacctatgttcatcttgatttcgctgcattcaggttatttatcaacgcatacctgaaatattgaatgcgaaagacggtttccaccacgacttgaatgctaatgacaatgttgagctatgagctccgactttaccctgcaaaagttgaaaatgttacatactgagcaaaatttgagataaaaggtaaatatttttttataccttcagcaaaaagttcttgttggcctgcctagacgcatccacctgcaataaagaatctggggcattgggtggcgtcttggaatcatcaacccttcaatattaagacgaaatataaagctctgtttctgtatagtacaaacagtagctacaatgtttttttttttttttacttagagatgttcactacctcgattgtagctcaaaaccaaaatcaatgtagtttgtgattccaactacttggttttcttcgaaaggattttgcacctgttccaagtccattaaatcgatttcatattgagccaaagatgtgctaaactttatatatggaagactagtataagatgcagcacagaaaaaggacttgtttgaaagagttgtacccgtctttggaccactacgtgttggtagaacgaagcaataaactgcatttacaagaaagataacataatcagcaagactaaaaatgctacaaaatggatgatatgccattagataaataatatggtcgtttgtcaagttccatgagatactgaaaaattgtttggggttaagacttgtgcatacagacagcaaaacaacatgttttcatctacacggattttaaaagaatcacctgagagcttcttgctagttcaatgccaatgttaaacgaaggagtcaaggggctttgtgaccctactccatagccagcagcacaactccagtttcttgggtctgtgtactttgccaaatctttgcttccatctaaaacaaaatccaataacaattgttgatgctcactttctttcaatcacataatttatagatactagtttccacatgtgatgcgtaaaatctgttcgacagaaataaaacaatgtaaactaactcacgtagcggctcatattgtactcctactgtaagacttcccatcttgcttacaagccatgcatgctttggcaattcgttattcgctgaattgaagaatcaaagggtcagcattgtgtccaaaagaaaacaacgcgaattcacagagcaactttatgcgcttaccactaaaaggagtgacagtagctccgacagacaaattcgttgagccatatctcaaccccatgattctatattcttcagatgattttccactacagagacaacatatattcaccctcacaatattacatctaatctaaatataacaacagggtacacacctagatacgacttacgtaatttttgaaatcaaagggtagaccgcaaatgccccaattccatatttaggatagtaagcagaagacctcattagaagaacccttaatgatgatgacaaacaaaacaaacaatttcaaaacattaaactactgtaatgaacataacctccaagaatatatcaaaagtagcacaaagtttacggattcgaggttgacacagagagatcaacaaaagtatgaggatcatcaacatcactgcatatttatcaaaaacaaactaatcagtattccaattctccaacaactacttgtaatctttcagattaaaaactaaagaatctatacctttgccagcgaaactccgcattcccaacaaaatctccttccactctaccatctacagcacccgaaacctttagactattaaggaaaattctgattttctacatatccctaatacatccatttagagaaacttctcgaatcatcactatatagaaactaaataacacaaaagagatttcaaaattggatacagatgcaaccaaatccacatgaggatcatcagtaggcttcaacaaaaacttgcccgtgaatcgattagcttcttcaaagtaatcctcaaatagacatctcaatgcaagcttcccaaacaacaaattatatgatgattccaacatcctgcatcaacaacaacaacaatttctcacaatcgcacaattacaatttaacctataaatcagaatcgatctatttgattagattaggttatacaaaaactacttcgaaatcacgcgattctaacaaattgaaagtatgaggatcagatcggagaagaagaggagatgatagacctagtgcgggcggagagaggagggt

SEQ ID NO: 9451 - DNA, 945 bp, Arabidopsis thaliana landsberg
taaactccacttcctgaacactttcctctatgaaactctccttcatacatatcattagtgccatacttctgaacccaagatcctgaatttgtcttattattctccgcaactggcttcgacccaatggaccaaacaactcggtcagtgctcggctgagaggaagagaatctggcagggataaatgtcagcaagcgtgcgacaaaaagacgaattgatgttaagtgaggaagagcgaatctgagagagatcgagaggatgaaggataaagcgataatcacaaagactagacgaaggaagatacgaagattgataacaaggaagaagatgtataaaggagggacagcgagaagaagcaagaaacgaagatggaaacaaatcaaacgggctctaagggtatagcgtagaagcttcctcaagaaccgagcaatcacaggacgataggaagaaagagaagacaaaagatttgatgggaaaaatgaagaaatcgatcctgatcgtgcccgtgcgcttcttcgtcggaaatggtcaacaccggttgggatatcaaccgtgtgatgatgattctgaccttggggatgattatacttagtgaagccagagcctttattatcaatggcggttcgatttttattctgggtctgatgatgatgatgaatcggattggggatttggtttggatcggaatcgtctttcccgattaatcgtcgttctgttacagatgatttcttcagatgcatttacataaagagtatggaacttggaaagaggatttggggagaaatggtaggggatttagtgttgttgaaaattagggttttttccaaatcaaagcctctggtttttgttcctaaaacagtttccacgctttcgcgaccaagaagaagaaggaagaaaaagagaagagatcaattttgaacttttgaaactaaggtaagagatccacgt

SEQ ID NO: 9452 - DNA, 1022 bp, Arabidopsis thaliana landsberg
tgagtcgttttttggtgaatcttattgacaagaaatggatttggttcttgttttggtgtgtgctctagttgggacttaactggggagtttttttgggaatgatcaaaatcagggaataatttaacttttgactgtcgagctcaataatatctttgactcattccctcatcttccccttcccaaatgtttttcccctgagatttcatctacttaaaagaaactattcaaaaaggaacacttggatagcaataattagttcttgatgacgtttatacaaaaatgatcagaaattctcaaccacgaaatctgttaaactttccatgaaacagtaattttgaagaattgataacgaaaaggcaattatcatgaaagtctaaatgacattctcatcaaagacaacccaaaaagcttacttgctcccgaacggagggttgagtacagccaaaaaaaaaccaaacataaccgctgatgttgaagctgcaacaaccccttttcggatagacagaactccacctgtagcagcacccgctacgatggagttccatggatcttccttcttcctgatgcgcaccaatgcatagtcaaatgttgagagcaatcctccaaatacagcaaaagtgcctcccaagcgaggagcattcatgctagccgcttgtgttcctccaacatatcgagcacctattggggaattgtatgcccctctcacgaaatgatatacagaacctccaacagctcccgctccaaatgcataaccgatagcattgactatacggtataggccatgttccttagatttcttcttagtgtccatgttcctgacaatgctagtttctacagaggaaggtcagagatctcacaacaaaactgaatgaaccaatcatcttaagaacaaaccgcataaaaagctgcaaattttgaaaagggctaattatcgaagctaagaaatccttcgcttatgaattgagctcagcacaagaatccgaataccagagatatacattacagaaactaatctaggaatg

SEQ ID NO: 9453 - DNA, 1200 bp, Arabidopsis thaliana landsberg
tgcatcaatttagaaagctaatgaaacccaatgcgaaccctaaccctacaaacgaactaattgaaatcaagaaaaactaaaattatgagcagtgagctgaaaaaccttaccacatgcttcctctgtatttgagtgtataagggccaccatcgagtgaccgctcaaaatggctatgaaccttatgtttcccctttccactttggtcaacaagagctagctcgaaaagcgccctaacttcggttccttcactggccaatgcgataaaaacagagacgtacgacgaattatcctccggattcttaccgtccgggtagaagaagatcccccactgataacctccgacggagaaattatcactcgctatgtgcttccctatacccatccctttcgctaagctgtatccttgaatcacgaattgatgcgacccgttcaccgtctgcgtcactgatttcgagctcgtcggagataaaacccgatccggattcgatccctgaatcactgattctgacatctccgtttgaaattcgctgctaatctaaatggtatctaattgataggttatgcagaaaaagaagaagaaagaagtcaaaattggcaaagtgttgttgagttaaaggaaacagggagacacctctatctgagacagaggctttagctagtatcaaataatcttagtactatgtcacaaaccatatattcaagtggagaaaacatcatccttcctcattggatcaaagttagtcatttgcagcgttaagtctgttgtgatggtcttcgtgtctcatatttatttatttccaaatgtggctactcaactgcagatggttcagaaaaacaccatcccgagtgaccaaattcgtgagcgaccatatgttgtcgccggagatagcgtaaacatgatagtaaaaacttcatgtttggctccctattatgttttcaagtcatgttttcatacccttcatggaacagtccatacttgtggagttctagctattgacaagtctatggagaaatatatagctggtaaggctgatgactgtgttagtgatgttgcaatttgtcaagttaaccccattgatgaaaatgagtttgtgggttttatcgagtatagcgaattgctactaggaagtatgttctagctcctgattcttgagaacagagctaggctatatcttctcagacacaccttaagcagctgaa

SEQ ID NO: 9454 - DNA, 843 bp, Arabidopsis thaliana landsberg
tataagaagcaattaatgctgtttgttactaaggggtttaagctactatctagcttagcgatggattgtgaaaagctgctagactcgttagatccttgcttatgtgagtataagaagcagaggttgcggtttgtttataaaagcttggacgggaaaggaatgtgtaacttctcaagtctcagggagttacttgttgaatcaaaaacaagatcatgtgcaaatgcttatttggtaaagaccaatacagatggaagcaacataaatgttagaacaacagagatgaatcaacagttggaattatccacacatggtcctgctactgaaagtgttagaaggcttaaagctccactgttgataattttggttacacgacctcgtgatccaggcagattcaacaagcagagtcagtgtggcgtaaagtctaaacaagactggtggagatttgtgcagaagctaattatacagaaccatgatatagaagatgaggttaggactcgaaaacaagaatatgaagctttagcatttccacacccgattgcacgttgtctgtcaattcaccttgagaacaaggtgtattttttaagggcgagtaatagtaggtatcaaatactaatctgtgataaagaaaagaagaagctaaagaacatgagagtttgtaagtatggctgggaagaaggaaaagtgcaggctgaccctactatgaacaatttaaggtttgattcctcttatgttttcaagtcatgttttcatacccttcacggaacagtccatactcgtggaatgctagctgttgaaaagtctatggaggaatatatggttgaggtctgcttactagattgtgat

SEQ ID NO: 9455 - DNA, 1459 bp, Arabidopsis thaliana landsberg
aagttccatctcaagtttcttcaaagcagatgccaatctcgacgccaccgataccatatctccttttggacatatagaactcaccgttcttgtagatagacattgtctcagtgtgaatgggtcttccccacccgaagtccgtttcgtacatcccaatctggttcgacccgtttacgaccaacaactgtgtaccccatttcattgtctttgttccttcctcatacactttccaagttgactctaccccttgtgaagccaaacgtttgaccgaatcactgagaatctcgacggtgttgacaaatccatcttctcccataaactccttagctttgtatttatagaaatccatggctaagacacaagtcccgaagtatgtcacagggactggtggttctaaccggttcctaaaatcagcagcgtacatgaaacgaaccggtcggtttgggtcaccactacgtgccttcaccatgcatgtccacacatgggcgaacgtgactacgaacgttgacaagtgaagctcagcgcgtgttgactctttcttggctctctccttgagtttctcaatgttttcaggacttatctcgatggtgattcggaggacgttgtctttagcgttaatctctttgactggaggtagctttagggttcttgcgttctctttgtcgtcctccgtaagatacggcagaagttcgagcatcttttgttcaagtccggctggaacattgacgacagaacgatctaaaaccgttggtagaattttcggtatggtgccatgtttacaagtgtgagcccatgctttgttaaatttttcagccgttttgccgtccaagacgacatggtgggctgtggttccaatgcagaagccttgtttcgggaacaaagtgacttgcagagatacaacagcccccgagtcagaataaatcggtagctcgggtattagagagcgtaactctagctctggacgaagccctctgccagagatacgtgagaaatccgcatcagtctcagccactgtgagagagagtgtgtctcctgagagaacaactaaatgcggctttggatcttgtgaatcccacttaaggtgacccgtgaataggcgaaagtgagtgaggatgagtgaaagagatcgctcgagcttggggaggatggaggagtagaaaacgtcgcgagatgatgatgattcggtgagtttgtaaaagaagacttgctcggtagggttgagtttaagccactgtaaatcaaagaacgagagtgggacaatgagcgggtcgacggaggcggttgcagggctgactcgggagatcttgatcacctttaacgccatttctcacttgtactctcgtcttttagataatattcctttgtacgtatgagtttattcagctgagtatcagatggggttactcttatactaacataacaagctacagagtcagccctagtcaaaacggttggttga

SEQ ID NO: 9456 - DNA, 752 bp, Arabidopsis thaliana landsberg
aaccaacctgttgtaagacgcttcttttgtcccccagatatgcctcttttcatcgcattgccaaccaatgtttctgcacaaatgtcaagccccagaatgtggaaatgtagtacaagacgcaagtaagaagctaatcaaagactataaatctgaaatgtaccagagaaagaaactataccttcaaaatgtagtctgtttgcagactccttttaagtcctttgactgatattgcctgcacaatgagattacaaaaggttataactaattgacatagttcaaagatcagttttcaacgtaagcttcaggagtgcataccttcatgtaagcatctatttctgggtcaggaatgattccaccatccttttctcttttactgacctccatcataatatctgtttcagcagagagatatttttgtcacaaaaatagttaaaaaaaatgcttcagatagaccattggtttatgaagacacctacctgttcggctaccgacaccttgacaacgagctgagaagtcaattgtctcccttgtagtcatctctgcaatgtgcagatcatgttgacttatatatcccgatgttttctgaggaacaacctcgttcagtccatgtccattgtaggaagatttcaccataacactgtggaaaataaaagagagagaaaaaaaggagacatgattcacacatctgcagcaaaaagcatccaaaagagaaaatatctaaaaccttaagatggttttgcaaatttccagac

SEQ ID NO: 9457 - DNA, 1573 bp, Arabidopsis thaliana landsberg
  unsure (1)..(1573): unsure at all n locations
tcccaaccaaatttaacataggtgcatgtaccccaagagcaaatcaaaaaagaagaaacaaaccaacaaggaaaaagatttgatttttcttcttgttgttgtaaaactatggtcaaaggatatggatatatttgctgatacctgggaaaaggactgtttttgacagctttttgaccatattttcgccagcgataaccatcttcgagatgatcaacttcactctttgtcatgaatgcgactcttgcctctctctgtctcttctgattattcttctttgctttcaacctgttcattaaaaatgctttctttaggatacttctttttttttttgtctctgagactttttatcgaacagcttctggactcaacaaaaaaaaaagtgagaaattttaagaactcactgtttcttagtatgactcttctcttgttgatcttcacctccttcttcttcattgtcttctgttttcggtttctcttcatttagagcctcgcttgaagcagacgaaatcgatgacgagttaggagtcgccggtgggtttatcaacaaatgatccgaacacaaagactcnnnnnnnnnnnnnnnnnnttgctctgacggtggagcttgaatgatacttgaagacagcttcgccgatggttgcgtttgcgtttgcggttgagacgtttggagaaggaaggaatgaggagaaacagtagcaaagtcttgatgctgctgagaacttaataactccatgaaccctaaagaatgcctctccgccgccgctaaatctccgaaatcccaaacgctttgtgacgacgggtagtaaaaactcgtctttgagaaatctgtaaactccattgttgttcttcttcttctctcgctgagctttaccggaaacaatctatcaaatggctttaaaaacagagaaatcgcatcaaaacagagatcgaacacaaagcaaatgtcaaaatcaaaaatacaaaaagatcaatccttgtaaagaaagagtttttagggttcaaagaggagagatagagagagaagaaagatgaaatgtatggcgtaagagaggaaagagataataatgactcaaggatttgatatttgtcaccgcactgtgttaaatggtggtccttgatttttttttattgaccggcaatagcaggttaaatatacagtacggatggttacagacttccagtaaccggttatatcacacgaagtttttttcaaaatactgtagtcattggtcaacgcgtaagtcagagaagacagcgaacgctttcatacgtccggttcttgactggtttagttaaaccggtttttagagctcgtgtgaaagacgaaggaaaatagatcgttgttggctcacataaagaaattaaaatacaatcaaaaggctcttggtgttggttcgtgtgcatgggaatgctctctttagtttttattaatgtgaacacaaaacttgttcatctttataaaaaagagacttgaagattgtttctatatgtactatctataggcataatagatagactcaaacatgtgtgggcggagagaccgtatgccgtgaatcgcgatcaagaatcatgt

SEQ ID NO: 9458 - DNA, 1516 bp, Arabidopsis thaliana landsberg
gaagtctgcagaaattcgaaatcatatcattgattgattagccatttcgcacgataaatctattcggggaaaaagttcacacctctcggggaagctatagtgatcaggaagaatgaggtttcccctgagattgttactctctcctagtttttgtgtaacaatccattctttaactctactagtctctagcaatccaatgagagttcctatactcctatgcatcgccattacgttttcaaataagatccaatagagtatgaggtaaaatgatttaggtgttgcaatagcgtttaggatagtgatggtagctggaatgtagatagttgtccatttagggacttcgatctccgggaatataacggtagctggcaaaatcacgcagtagaaaacgaatgtgaagatgtgtacaacaatcttcctcaaaaagaagaagttgtatatcaaatacaccttcttccataaagacacattctgtttcaaacatgtcacacaaaaaaagataaaggtcattgaactatatttgtgttccgaaaggaattagatttggggatttatgtaatctatctacctggtttttgatgatctccattgcaattttcttgaaaaggttcgctggaccgcaagaccaacgatgttgctgaaaccggtatgcttgaaatgagctcggaagctcgtttttcaccttaaataaaactcccaaagttttagtcagatcacttcagtacaagttgagtcattgcattcagttgataacaaaccttaacatcgtccacatacacaaacttcgagccgcgtagataagctctaaccgctaaatccatgtcctcgactatcgtgcggtctttccatccttcagcctcattcaaagctttaattctccacacaccagcagtacctaaagtcaacgatgttcttttagtaactcaaattaagatcatataatacaagacacacaaagagcatgtttatggatgtttcaccattgaatccaaagaaaccaagtatggaggatccagacttttgctccactgcaaaatggtagttaagagacatctcttgtattcttgtcatacaacactcatcagcattccctgtcacgcacacacaaacataatcgatttaacaaatcgactacaccgggtctttagctaactcggacgtgaagaagtaagatctaaccatatttccagccggcttgtacaagagctatctcagggttatggacaaggaaaggaacagtacgttcaagaaaatcaggttcaggctgaaaatcagcatcaaatataacaacaaactcgcacttgtattcatccacgtaactatgcttcattcctgcagtgagagctcctgctttgaaaccctctctaaaaccgcctctaacttccgactttatggttataccttcgctctcccatttcttacactccaatctcaccagtttaaattatatttcaaaaaagcatttctttatagatatcgtaataactaaggctgaaacataggatcaaagcacatt

SEQ ID NO: 9459 - DNA, 565 bp, Arabidopsis thaliana landsberg
gccctgctacacctttagaacaattccaccaccatctcctccatcaccaagctgtaaaacagaagaaagattagcttacaagaatctaagaaacagagtggcgattttgacgtgaaaatgtagtagaaagagatatacctgtgattcaacatcctcatcttcgtcttcttcccaatcttctatgacctcaacatcatcagttgctttatctgccaatttgattggaagcaatgttttatgagaccaattagtatcttatgacctttatgaaataccagattctaaggacaagaaaaagcattaaaatcataaggtcaaggaagcgagagagcaagcaacattgagaagatacattttttaggcaggagacattttaacaaacaccttaaagacaagaaaaaggcaaacacacagaaagaccgtaaacaaatcctaaaacccagaaaacagagaggcagtcaaagaaaacaaggtttatttattttatcttacattcaaaagtgtcttcttcgtcgccattactaccggcggtttttggcggtcgagctgaaggagaaggagaaga

SEQ ID NO: 9460 - DNA, 1541 bp, Arabidopsis thaliana landsberg
gatatggcgaggtaaaggacaaggcaaaacgtttcagactgaacttatattcaaaacaatgggagttgaaccagttataatgtctgcaggagaattggaatctgatagagctggtgattttttccaactttgtttactcccatatcgtcgtgactatgtagtaaaccatttcctaggaactggttggtttcactgaccatagtgctattgaaagttctgatctttctaatattccctaacaggtgaaccggggagactcatacgtgaccgctatcgaacagcttcacaagtcattcagaatcaagttagaagcgtttctttaccattcccattccccagtcttacttaacctatttatctatatgggtttggaatgaactttgatgatgattttgataatgcagggaaagatgagtgttctcatgatcaatgatattgatgctggccttggtagatttggtaaataatgtcaaccccagataactttgagctatgttgtgactctgcttttgatccgcaaagattatcataactgaggttttggctcttggtttaggggaaacgcaaatgacagtaaacaaccagatagttgttggtaccctgatgaatcttgcggataatcctacaagggtaagtgtaggacaagaatggagagaagctgacatggtaaacagagttcctctaattgtcacagggaacgatttctctacactgtatgctccactgatccgtgaaggaagaatggagaagttctactggtaatcatgatacatagcttgcaatccattttcctgcaactgtggaatcttttctgacaacaaactgaagtgtttgatgctaaaaaaaaaacaggcagccaactcgtgaagatatcgtaaacattgttagcagaatgtacgagaaagatggtatatcgcggaaagatgttataagcattgtagataagtttccaaatcaaggtaaatagtttactatctagaatgagaaactaaaaaaggtacagttcgttatgatttctatctttgtggcagcacttgacttctatggagctttgaggtcacgcacatatgataggtctatcctcaaggtaacttcagcacgaaccagctgttaatgattaaaactctgcagtgaaatggctaatctttttgttgttacagtgggtagatgaagctggaggaatggagactctagggaaagttcttctcagacgtaaaaagacccaagaggttcctcaattcactgcccctgaggtaaaaatgcttacagacttctcaatgatctctctctctctcaaaacctttaagctttggctccacttaagattgactgatgatatcgtgtgaacagcaaacggtggaagcattgctggaatcagggtacttacttctaaatgaacagaaacttattatggaaacaaagctttccaggagtacatgaagaacatggaccattgataccaaacaaacatcaatttttttcattcttaaagtgactttcgaggaacactcagctgaaatctgataagttgttacaaaagc

SEQ ID NO: 9461 - DNA, 2022 bp, Arabidopsis thaliana landsberg
tcaatattatgatacatttttattaatttcatagaaatattgtctttaagttttttttttaaacatagtaaattttagtagtttgaaataaaataaaattatatggtttagtgttatgtattcgtaatttagttttaaaacatgtaatatacaagttgcatgttgattgttgacaaatgttaatctaggattgcaataattttcaagaaatttttgttcttatgatatttctcagtaatgactgtttaaggggatatatcctttttcttttcgtgtaacatgcacaaagttaaacactttattcgcacatatttcacttttacaaaagtaatataagatcttatttctacattattaaagctagctagaacattataatcaaaatgaataattatggatttttagataatatatcttcatctctaatattataatcaaattacatacaatttaagatcaattctataattcgaaatacaaaatcaaatgcattttcccctttgtcattttgttatttctaaaagtagcagaaaaatacaaaaactatctatttgcctatattatcatcaaacgcatcaagaaaagaagcaatgtattcagtcagaaatgctgcaaatcgctagcgttttgtattgcatcttcttgctcgcatggtccctgcaggaggggtatttaaagagatgctgcactgtgtgtgcaaccaataagagtatctcatcaacgacccaaggttcgagcgagcgtgaaacgttcctctcaaattcaacaacactggaccagttccgagctgcagctgcaagtcctgactctgaatcatctgaatttgtacctgactgctgacgagatggaagcttgtgaacattgacattccctttggtacaatgaatggctcgatgtgttcagtcgctatgagtgtgttgtagaagtagagctcgaacatcacgtagctgaagtccacactgcttttcttgcttggatttgtgaagtttaccacaaccgcgagatctccatttagaacatatcccatgtccagattggcggtgtttagggttgctgctgagatgtccaagtatggtgagcgtggacggttggcgaggtagactaagaggagaatgagacctgataaaattaggacgatcaggagaattgcacagcagattgtggctggcaatgtcatgggtttggtcctctttgggccttgctgataagctggtcgtgttggagctcttctccatggagttggttcagatccatagccacggtgtggaggtcgttgctcctcagggctcaattgcaatggcctggcagagtttggattatggcgtggtggtaatggttcctccggtctcagtggcaagggtcttgaggaaggcgattcatggattgtttcaggtggctcagtctggtggcgtccccgagtctttattttcaccctgggtggagcaactgagtgagcctgtgggatctggtgatggtgcggagagttccatgagctagaaggaccaccttgatgttgatcctgcaaggaaaattgaacgacatgagcgttggtttcatagtggtggtgagacattgaagtacaactaaaggagaaaagagttaagtgaaagcaatgaagagagaaaattttgagtgtttccaaatgagagagatgattacttggtgagaagtttaagtagcattcttgtgttaaaggaaactgacacaaggaagcaagtaatcttttttcatattcaagcaagcaaaactagaaccatcatctcttatttctcatctaaaagttttgaaacagaaaatgtaaatactgggtcctaattctctcatttttttggttaaagtaccaagaaaaagagagagagaaaggtaacaacgtacaggttcttctgattatggttaagattagtagccgctctgttttataatgtttgtgtcttgaaccggcgggcctctatccatcctcccccgcacttataaaggcttagttctgcaaaagaacacatgataaaatatagtaaagggatg

SEQ ID NO: 9462 - DNA, 1799 bp, Arabidopsis thaliana landsberg
ggatgagctgctcgaagcttgcatgaagatgtgacaaaacatgtatgttgctaacttactctattttgacttgatatcaaatatcaaatcctggttgttatgtcaaattgtgtatgaagctgcaaattgttattcagaaaaactgatttgctaactatctccaacttttacgaacgttttttagtggattgcaagagaacttgtagtgttacaaaggcttattaatcaggccaatgaaaagggatggcgaagagaatatcctttaataaagcattatcaatattaatatattgttttactttgaagagtaactagtgaatatgagagactctttctgttatatttttcttgacttcttagctaatacactatcccagtatctggagaagagggagcttcttcagaatccggatgaacagaagaggctagtggatgaagttccagaaattgttgcagaagaacttgaacctgaatgtgaagatgatgatgatgataggacaatagaagatagcctcattgtaccaaaccctgaggctcatcaaagtgacaaagagcaacgacaaagagatttaccagtttcttctagtgtcaagaaaagtcaagaaaattccatgcttcttaagaatccggaagagcagttgaggctgctgtgtgatgttcccgatgttgttgcagaaaaacttgaacctgagtttgtagatgatgatggaaaactagtaaatgacgtcaccgtaccaaaccctgaagccttcactgaggcgcatcaaagtgatgaagaaatacaaccaagtgatttaccagattgtagtatccagaaaactctagaagaccagccaatatggactgcttctgcaggtgcgtcccattctttgtaacttcaattcatcgataggacttaaattggttggattaatgaatcctattcgcccttgcctttgtcaaagtgatgttagatgaatgtgtccttcatagttaactaagtggtgtccaagaagtgagatattgtgaacttgatctggacccatatatttgtttgtgtaaattccaggtaataaagatctccatgaagatgtgtacgagccgccagcaaatggcataacactgaacacggactctatcactgaaggagaaatgaataccaaagtcagtcagcatcagtcaagtactccagtgattgatctctctaacaaaactcaagcacactcaaatccaattgagattattgaattgagcgatgatgatgacgacgacgaaaaggacaaaaacgatcaagcttaccagagttatgatccaaagaaggtgatgtggttctatgaataccctaaaggaaaaacacatagaccattctctctcacagatctcaaaacgtggagtgacgaagagtactttgttggagttccagatttcaaagtatggaagacaggagagagtgcagtgctactaaccaaacttctatctcagatcaaaacctaattgaagaacttgcaaaaagcttagcattaagtctgaaaagtgtgcattttgtttatttctctaaaacggttgttgctgaatttagtgcacataatgcaaagattctgacttttgttgtaaaaaagtctcctcttaaaatccatggaacataattattaacatgaagattccttaaaattatttgaaaatcctaattcttttgcataaataataagtgcagtatttatttaaattgaagaaagtgaaacatgtataaaacccagaagtcagcacaacacttaccagtccagaattaaaaaactgattgagacagagagattaaagat

SEQ ID NO: 9463 - DNA, 1370 bp, Arabidopsis thaliana landsberg
cagattcttgtgatacaagcaaccaaatacgtaccagtaaggttatattgtttccaagagtgatgggcgtgaagtattctctgtccatggtcgtagccgcgacagttatgagccacggagcaacattagagatggtttctttttcaggaccatcgttccctccagcacataccacgggaattcccttcataacagcgtggaaagcagcaatagcgaaatcatctctatcaacctcaaaatcaacaggtacttcagatccgagcgagagcgatagtacatcgacaccatcacggatggcatggtcaatggcttttacaatatccggtgtgaaacactcctcgttgttccaacacactttgtaagaggctatatgggcccgcggggcacttcctctcgcggttccttgagctagaccgaggacgtttgcgtctgggacaaaagaacccacggctgtcgatgcacagtgggttccgtgtccaattttgtctagaggggacataacctcacctttctctgccgcattaaacgatccgttgtacttactctcaagaccctttgagtagtacatagctccaatcaactttctgttacagctcgatgcgttgaacgcttctgctgaaacacattttcctttccaacgtgccgggattggtccaagaccgttgtcgttgaatgacttggaatctggccatattcctgagtccaggattccaacaattgcttcacttcccatatcggtttcatggaggagaccggttggagcagctgaagtgagtcccaagtaatcactaacccttgttgttttcagtttcatattcttacttctcgttacgcgaacaacatccggatgccctattacaaatccaaaaatagaagttgactattaattagtgtttttgttctctgagtttgacctaattcttgttcaacaagtcttgtcaacaaatgtttcaaatttacctgaaagttcccttgcttgagatgatgtgagtttcgctgcaaagcctgagaaaccatgtctgtaactataaatcatagactcatgggaagcttttttgctgcattatcagtcaaaacatacaaatttgtaaaccaactttttcccgcaacatcgattatcttaggaaagcatttaccaatgctcatcattcattaccttccaagaagtggtccgagaatatcatgatgtgattcagttacaacattaggatcatcatgttgcctctcacccaaatgcaccgtgtaaatctaaatataacatcatcaagaaattaaaattgcgaaatttttcgcaactccgaaaaaaaaaaatatcaaaatttgaccatttataacgaacctggcttttctcattggcagcagtaattaag

SEQ ID NO: 9464 - DNA, 639 bp, Arabidopsis thaliana landsberg
aaagctctgtagttcaaaccatgtactctggattctttgtgcattccccaagaactgcccatctctcacagctctcgttcatatccgtgcagtttccgcttggtgtcacgatcctatcaaatgagtctacgtggatccacttggttgccgaccatttctctccttctatcacaggacatccaccgtgaaggctcaatgggtccgggattgcgtctgggtggaggttgaagaacaacaaagcatcccctttccttggtttcactgatacccatacagccacagaagatattgagtttcaataataataatccatacattattgttatcggttttgtttctcaccagcaattcctctcttggcacaatcagaaaggtcttctttattttcagatagtactcggcgagaaggtatctgtaaaatcagatctttataagagaaaatgacccaagagtgatcttgtggggaaatgctaagcaaaaactcattgatagcactaacctctgcatcagggaatacagtttctccacctttcgtcacattggatagatacataagaattgttgccatgcgatgtccaccacggacaatgttgactttgtcatgaaagtaatcaaagtgagcatcgtatttttggccgt

SEQ ID NO: 9465 - DNA, 1578 bp, Arabidopsis thaliana landsberg
aaccttacgaaaaagtgatagataaaaattgtacaaaaataatttttttttaaaaaaattgtaacgtttttaatattattttgtgattaataactgttaaaactgtaaatatgtagtagtacgtgattaccatttagattgttattcaaaaattattttttattataaaaatatttttgattgatatataatttgagattcttaattaaattgtttttaacatatctaatatcactacactaataaacaaaaattactagacggtcttccgttcaaatcctgactagttcaaaattttgtgctattatatatatattgataaattcctctataaataacaattgataaaatatctttgttctgatcattattaatttatagaagttttagtgtattatttttggagaaagatgactatattttgtgaaaaattgaaagtataaatattatatagtgaaatattactatattaatcatcattaatatgtagttttgatattatatatataaagtcggaaggtgaaaggagctttcttaacaaaaacgctgttaactggcaaagaggggttaccatgcgaagcattttgtgtttaaaatgactacctcaaacccctaatgtccacccacatagaaccaaaaaaaaaaaaaaaaattgtttacaaaaattgaagtcctttcattcaccatgaatgatgcagtggagtttccaagtcaccgacaccctttaaacctggtagaagaagaaggtgaagatgaagaagaagaagaaaatgacgatgaagaagaaagtcgagtatgtggtttatgcggggaaaggtaaaggggtcccgttatgaatgttcagaatgtaatttcactgtgcatcttggttgtgcgaagaatccaccatcgccggtaatcgagaagagcaagatccacgagcatacactcaccctcttaccgacacatgtctccttcacttgtaatgcttgtggactctctggagacaaatctccgtatgtatgtcttaagtgttctttcatggtacacggagactgcataggctttccacgcgttataaagatcaatcgtcacgaacacagtctttatcatacttgctttcttggtaccggtgaatggatgtgtggagtttgtcgaaagagcatcaatgggaaatacggtgcttatcgttgctgcttctgcaaagattatgctgtacattctagatgtgcaacgagaaaagacgtgtgggacggactggatctcgagggggtgtccgaagaagaggacattgagactgaggattttgtccgcatagacgatagcttaattcttcatttcagtcataaacatcgtctaagaatggaagagaaaaaggaagatggagattttgtttgctctggatgtgctcatcccatcatatctgagaccttttacaggtgtgatagtctatgcgatttcattcttcatgaacgatgcgctaatcttccgaggacgagagctacggttctacatgtacacctccctactctttgcaccgacgacaggtcacataacaacgacctttctcgctgtcatgccggtgacttatagttcaat

SEQ ID NO: 9466 - DNA, 711 bp, Arabidopsis thaliana landsberg
aggaaatatcccgcctgaattcgggaacctcacacgtcttacagagatgtacgaaccattttccataaaaggatctttgtctcttgatattttgtcaatggattttaccaaaatgtgaggcttggaacttaagcaatctttgtttgtggttttttcttacagagatcttgtgctgaactttctcagtggaacaatacctacaacattgtctcaaattccgcttgaaatcttgtaaccattctctctaatacatgtatggttcattgtttctggtgatgataataaagttatactgattcttggttttgttttggtttctacaactacagggctgtaaccggaaaccgactctctggaccatttcctcctcagctcggacagattactacacttactgatgtgtaatgttacatatctaatcttattttcttcaaaccagaattgacgatattctaatatggaatttcttttttgcaggattatggaaagtaatttattcacaggacaacttcctccaaacctagggaacttaagaagcttgaaaagattgtaaaatcctttactatatattttggtttttatcatatacattgttattgtagtttttcttagtgcatcatatggtgtatttatgattacaggctaatctcttcaaataacatcacgggtcggatcctgagtcctgagcatctcaagaatttgactaatgtg

SEQ ID NO: 9467 - DNA, 1504 bp, Arabidopsis thaliana landsberg
agctgaggatgaagataaagcaccatcggaggcacaagtggcatagctcaagaaagacttgcgatgatgacagtaccgaagatgtgagaagaaaacatttaaagcatcacaggcgcagtgaggtggtcacttcaagtgatagtgaggaagagagtggaagaagaaggcgaggcaaatatcacaggcacaacagaggttcagcctcctcgagtggctcggaagaagatagtgggaaaagtatgaagagaaggcaacataaaaggcatcgtttggctgagtcttcaagtgaggaagatggggcaatgagaaggacaaggcatcataaacatggcagagattcagcatcagagtctgatggaagaatgtaatcagatgagaaaagagagcactacttcgacaaatgaaaatggaaattgtctttgtctgtttcacatcataagaactgaatcttgtggtaaacatgattactacccagatgttgggacccaaatacgatgaatattgtgttgaattactatggtggcactctgttcttagattttcacttttacatttgtagcaagaatggtacacaaccaattgaactctgaaatgcatgtgcagaagatggtttttattttgattatacctcgcagttaagaggagtatgttacaaaatatcgtgatcaaatcatcttggtttttacactctgaaatgtagcaaactatctttgatcaacaacccttccctctgcagcgtcttaatcatatcttcagcttgtagttaccaggattgtggtctcttgctcttgatactctcagctatgcctatgtgttgcacacgaagacgtatatatatggtaattggctggtccaatttgaattttcttcattcttctgaatatggaatcacttgtatgtttcatggaatgcagcccacaaagccattgcagcatctaaagattagccattcatctcctaaatctgaattatcatgtatcatataatagaaaataaatgcccctccccttaaaccttgttgctgtttttggttgctaaatttgtacatatgaagaagatgaagattcagataaacactttgggtaccaaactgtggtggaaagtgtgatatactctacaagatacatgatttaattttggtctctgaacaaccaagtttctcaccgacccgtgagcttgaccatccatgcaccacccaagtagagccccagaagcggtgttgctaggagcatttgagtgacagggtctgtcgagggtgtgacaacagctgctgcaaccaccgcacctaccaccacatatctccaaattgatagcatttgatctcccgacacaacccctacttgtcccaggagtaactgaatgactggaacctggaaaccaacaagaagcagccaaaattccaggtgaagatggctaaagcaacgtttaggaacatgtataatatcatattgccacatacctggaaagaaaggcctgtgctgaacataagcactagtacaaactc

SEQ ID NO: 9468 - DNA, 940 bp, Arabidopsis thaliana landsberg
tgatgaaatcagcatcgagtactctggtactcgtgcacttaaaggagatttcgttaggtactttgcccatatgtttaatcttgggtctgaataagtcctggctatacagcaatataagggagtgttttgtagattactctacattgcaatctaatgcgtctctaaccggctcaattgtaggtatgggcatcggactgcccatggtgtccttaaagatggttggagctccctcagacgctattacctgaataactttgctgatggaactaagcaggtcagtgaattttcattctcagtaactctagttgtatcatctaataatgttcagttgcaactgtgtgcgactacttttggtgtcacttacccctgtaactggaatgtgtcctgacgcaagttaatatggctatgtgcaataggatgcaattgatctcttgcaagggcactacatagttgctgtgagccgagacatggctcctgtacctcaaaagggaggccttgaggctgtagccgtaagcatttatcaattaagattagaactaatttccactatattagcatacaaagaattctagtcttataacaatgtaaatttcatgtctcagaacttcccagtggcattgttcgtggttctgatgagtttctggtttgcaacaatgtctctaaaacaaagtaagtatggtatttcttttgctggatagttaagattttctttcaaacttaatctgaaactgtgtaaaatttgctgagcagctgggagtgattataagcataagcacttgttcttctcattgttgtggacgggaatttgcgtgggcatggctgcactggtgagggccaatggcaggatcttctgtaaccgacctcgtctgcacaagcccagaggctgattcatttcgtgagatcaattaattaaagacatggaactcaagtcggagacaaa

SEQ ID NO: 9469 - DNA, 1341 bp, Arabidopsis thaliana landsberg
cctcttcttttttcagtttgtggttgttttattttttggcgggtggttctatagtaataaaacaccgcgctcgagggtaaaaaagtaattgagaaagagaaatctagggtttattagtccccgcctcctcctttattataaaaaccctctccgtttgttttatccgttattcttctgcggcgtctctctctcttccttatcatcatcatcttcactctaaacttcacagagagccattcaaacagaagaagagctctttgatccttctctgccatttccgttactctcctttcttctgtttcagagttttctattcttctcaatcttatctcgcttcgaagtggatcaatgtgagtttccatgatcgtttttgatccttctcttacttgtagttgatgatcacgtttaataattgtctttttcttttgtagatgtcaatgacggaagaaaccaagacgacgaagctcgaatcggcgggagattcgtccgatgtagacaacgggaactgtagtagcagtggaagtggaggtgatacgaagaagacatgcgttgattgcggaacaagcaggactcctctttggcgtggtggacctgctggccctaaagtaaggatcatgatctctctctaccattttcttttaaacccttaaaaatccaagctttaaggtctcatgtgttagatctagtcaaataggtacttgaatccacttaaaatgtaggttgatcttgtgtgcttagctctgttgcttgtgggttttgtctcattgatgtgatcatgtgtatacatagtctaggtatgcgaggtttgtgtcaatctgtggttgatatttaaatttgttatgtgatctctatgttttgttttgattctgtgtttgaagccttattactaattgatcaggttaagattattgttacactgtttttatgatgccttttttactaagagatggttatgtctctttaattttagatctgtttgatgattgttcactatttgttctctggtctgatcatggattgactttgtttgcagtcattgtgcaatgcgtgtggtatcaagagcagaaagaagagacaagcagctcttggaattagacaagatgatattaaaatcaagagcaaaagtaataacaatcttggtcttgagagccgaaatgtcaagaccggaaaaggcgaaccagttaatgttaagattgccaaatgtgaaccgggaaatgtcaagattgccaaaggtgaaccaggaaatgtcaagaacaaaatcaagagagatcctgagaattccagtagcagcaataataacaagaagaacgtgaaaagggttggtagatttttgatttgggt

SEQ ID NO: 9470 - DNA, 1293 bp, Arabidopsis thaliana landsberg
aaatagtcctaaagttctaaacaagattcatagatacaaaaaagttagtgcttctagaacccgaaatttgtctgaagcttcttttaagtatggccacggctgactagagttttcaaacctccatgtgtcaccataatccttctggtatacatctaatacctgtcaaaaacagaatgtcaacgaaagaaaaaatattttccttcaaacaagaccgtaccagaagttagattttgttttgtacctgattgagaagagaaaaggcacttcgaacgggataatggtcgtccatgaatcctacggcgcagaggccatttatgttgtaagcgtgcactttatactctacatatcaacacagcgatgtcaattacaaaattataaacaggacacatatatatgacagatccaagagccaaaaaaaaagaagaagaaccttcgtgtttgacggattggcgctgacctggaggggttcttctggcaacagtacgggcaatgaatacaatgaactcttcgaagttagagcgataaaaagagaattttccgaattgtgagaggtcggaaacgttggccaggataacgggttcgggtgtttcgggatcgcacttgagaacgagcaaggcagtgatcttcatgacaagggttctgaatcatgaaacacaaccaatgaagtttcagtgagtttattttactatgagctaaaaacgtaaaaaaaacaaagtcacagttggtgagagactaattttgttactatacaatcataagacagaaactcgaaaaaaaacatagcttttgaaacaacaaggagagagtagacgagataaagagtgttcgagcagatatgttataagagacagagaagaagctaaagagagaagaagcaagatagagaggtgttaccggggcagagagtagacaagacagatgagacgagagcgacaatacgatgtatagatgcagagaggagagttgaatcgttgttgaattccagagacctttttagttaagggacctttcagggttaggccatatagaaaaaaaaaaattaaaattttatttattaatataacgaaattatttttaatatttgttcgtgttactaatttatatacgtaagtgaaaaatggaggatatattttagtatatatttttttgatacgtcaaggtcttaatgaaccgacagaaaacgcggttaagagaaaaaaggtagagataaaaaatagggtgtgggattgaagttgttttgtatccaataaaaaggggggaatgggcccaaaagatatctttttctttacctat

SEQ ID NO: 9471 - DNA, 1637 bp, Arabidopsis thaliana landsberg
tttttgttcattcacctaattttatcgttacaagtagcaacaactttgatgataataataatagttacaaagggttaagaatagggctttttcttttcttgttgagctcccacttcgattgaactccacaagcttttccccaacccatcaatctttttttgtttgtctcctctcgtctgaccgtaataacaaaaacaaaaaaaaaaaacaaagaagaatggcaatccccacccgttggctctttgaaccagaccaggtaaggtaacatcttctgtctaacttatcttacatcaaactttcactcgtattcgctctgttgcttatgtttagaccctgaagccgcttcaaactttgcatcagctgtgtaaacgatggccgtaaatgcggttccctgcataacaatcacaagcttaacctcacctaaaaatgtatgatgaccgattacctatttcaatactgatggtttacactacaaagctaatcataaggatacatgtatcatacagctctaataaggagtagtgaattactttttgctaaattttaaggatttgagttatgaaaatgaacttacgtttgccaacattcacggattatctgtgccacagttagatcgatatcatctgggatttcaaggcgtcgattctggaatcccacagctccaacgacttgcatcgggttcaaacctttccaggggacgcgtgaagtagctaattcccacaatatgacaccaaagctgtacacgtcacatctgagcaagcacaccagtcaatatttctgtactaacatttaaaaagattctctgaagtgttaaatttcactcacttctcattagccggttcattcctcaacacttctggagccatccactcaggctgcagactcattaacaggacattgtatcaagtaagttgttcagtttatctttgcaattcatgattgagagataaggaatcgttccatctaagataaaaactaaccgttcctgcagttgatttcgaggacaaatatgtgtggtgtttcatgcgggacaatccaaaatcacaaaccttcacaacccaatttttatcaacaagaaggtttggagattttaaatccctatgtacaacagtcgggtggctggtgtgtaagtagttcattccctttgcctgcaataccatcagaaacaaagcaagtctcagataatttttagcgatatagcagtaacttttagagccttcttttcaaccaacgcaactcatttataccacatcaagagccatccgcattctcctcttctcatcaagctgatggttcggccgatggagtaatctatacaaacttcccctgcatcatatcataaaagtttaacccattaaactcaagaagaatgattaaagaaaattagaaacaaaaaacacgcatatcatggttagaaaaggattacttcatgtataaaggatgactataaattaaactagtagacgaagtggtgcattcacgaataaaaaaaagaagaatatgggacgatcatcaaacctgggtaggaactctgtcaggatggagaaatttggggggcgagtaactgctcccatgaatagaacaacgtttggatgccgtaacctcaacattatttcaatctatcagaatagataaaa

SEQ ID NO: 9472 - DNA, 542 bp, Arabidopsis thaliana landsberg
cccagacgcttccgttcttcatgtactcatatatcaacagattcaatccttttgacttgctgctgcagtaacccattagcttaaccagatgcctatgcctgattcttccaagcgtcttaacttctctgctgaagctcttgtttgacatgagatcatccttccagagaatctttttcactgcaacagtctcaccattttcaagctccgccttgtaaaccttcccagagcctcctgatccaatcatgaactcctcgcttagattatgtgtagcttccatgatgtcctcccacctgatatcggactttgaagctccgtttcgaaagagaggcttgtgtgtagcttgtgaagaagagcttgacgatgtgtacgcagtgcttccatgacccactttcttgaagaaatcatgcctttgtttgaagaagagagcgattacaagtatcatcaagccaatcgccgtcaatgctgagattgcaaatattatcacaactgatctggcactaagaccttgttgcttgttatacgactatctctgtacagcgact

SEQ ID NO: 9473 - DNA, 3099 bp, Arabidopsis thaliana landsberg
tggcgcaatctttgccccttagagcattaaagtctttcgaattggagtatcacttcgaaagacttggggggctaattgttggtgtcggatcccgcaccatgggctcgggaccggtcaaagattgccacgtaagaaggagaggcccaaaaagaggaaacgcccacgggcttccttgagcaagaatataagtgaggtggttaactcgtgaggtgaatgtgacatcgaagtcaaagccacccggattggagagtcaagtaggccgaaaggtgaagcctaggaagtccggagtcaattcaaattcaaacgtttgaatagttaattcgaaaattgaaacggatacatttaagatagaataattgtgtgtaaatgagaaataaatgtattctttgagtataaattatgggtcaaggaccatgtaaagacacacgcatttttgtgcaaactaactatacacattttcttacgaaactcatagttttctcgatagtcatcaatctattttctagtatatttgtcctcaagaataatccttctcactaaataaataaatacttgagtgtgtgaatccgacatccatattttggcgccgtctgtggggacggaggattcttgagtcgtcagattttttctatatattacatttccgaagtgagccgtaatgtctggagaagatgctaccaaggcttcattagccgaaaccctcaagaccatgcaacaaactatggccgatatggcgcagaagttttcgaatgtgaaaaaaaccgttgaaacactgcaaacaacccatgtatcactcagccaaaatgttagtaccattcagtctcgtgtccgttctttaaatgtagaaaatcctagagttcgaagaactatcttcggatccccacattcccttccgcgaaatgcaacatgtgatcaaacgaccccggatggtacaaacgcgtagaatcaaccagaagatggagaaaggcatcccgaggacgatgaccagttcggtgatcaacacgagcaggaaaacttcgaccagctcgaaaccatgaaagaagtaagccgagagttgaaagaaatgaggtcgaaattccaccaagctacaagctcggagccggatatcaaccgggttatcgaggaggctaggcgaacaccgttcaccctgcgaattgcgagtttgagaatcagaggttctcgaaaactcaacttagaaccatataatggtttggaagatccgaaaggctatctcgcagcttttctaatagccgctggtcgagttgatctaaacgaagccgatgaggacggggtatattgcaaacttttctctgaaaatctgtgtgggcaagccctgatgtggttcactcagttggaaccaggatcggtcaataatttcaaagaactatcggcagtatgtttaaaacaatactcaattctaatggataagagcatttcggacaccaatctctggaatctgtctcaagggccgaatgagacacttctggctttcatcaccaaatttaaaaacgtgctatcaaagctcccaaggatctcacaacagtcggctctgtcggctttgcggaagggattatggcatgattcaaggtttaaggaagatctaatacttcacaaacctgatactattcaagacacactatttcgagcgaataattggatggaagtcaaggatgaaaaagaaagttttgcaaaaaggaatgagcaagtaaaaccagcggtcacttttccgcccaagaaattcgagcccagggaaaaccaagggccaaggaagtttggattgcaaccattcaataacaacgtcggaaagcagtttcaggggaaaggaaggtcaaataccctggtccgagatgaaagctcgtattacgatatacacagagtcactatacatctgagtaaagattgtagtgtccttaagaggcatctcgcggaattatgggccagtggagacctttcaaaattcaacatggagaacttcatcaagaaatatcatgaatcaagggataatctagaggctcaaaactctaaaagaccaagaccggctggcgaagaggaaccaagagcttcaaagggtaaaatcaatgtaatccttggaggctccaaattatgccgtgattctattagtgcaatcaaaaagcatagacgaaatgttttacttaagtcgagcttgagcgaagaaattgactaccaaggcgcttcaatatcatttgatgagaaagacctcatgatgacgctctagacattacgctggacgttgctaacttcgaagtgtaaagaattcttgtcgatactggcagttcggttgatttaatctttctaggaactttggaaagaatgagaattagtcgggcagacatagtggggcctccatctcctttggtggcattcacaagcgagtcggctatgtctcttggaacaatcaagctaccggttctagccggaaagatgtcaaaaatcgtggactttgtcgtttttgataaaccggcagcctacaacatcatcctcgggattgcctggatttatcaaatgaaggcagtcccctctacttatcatcaatgcatcaaatttccaattccaagcggagtagaaacaattcggggagatcaagaagcttcgcggacatgttatctagctagccatcgtttgaagatccaatagcaattaacgaagcctgcgaagaaagaaacaatcccaagattttctagtgggtagaaagtggatgatctcgtgatcgaagtaatgttagaggaggagaaacaagatcggaatcttcgaattggagctactctaaccagggaaataaaagaggccataatagagctttttaagaaaaacaaagcgtcgctctcgtggtcagcaacggatatgcttggcatagatcctagcataatctgccacgagctaaacgtgaatccaagcttcaaaccagtaaaacaaaaaagaagaaaactcagagtggaacgagcaaaggcggtaaatgacaaagtggacaagcttttaaagataggatctataagggaggcccaatccccgaattgggtggcaaacacggtaatggtaaaaaaaaagaatagaaaggacagggtatgcatcaacttcgcg

SEQ ID NO: 9474 - DNA, 466 bp, Arabidopsis thaliana landsberg
gtcttttagactgggaagcacgattgagaatagcagtaggattggctcaaggagtagagtaccttcatcatgactgtgttcctcctatcgttcaccgtgatatcaaatccagtaatgtgctcctcgattcaaacatggaagcgcatttaggagatttcggtcttgccaaggtcttaactgagaactgtgataccaacacagattcaaatacctggtttgcatgctcttatggctacattgctccaggtactcatcttctctttcttagctttcttgcatattcactgttttaatatctaaagatttgaaattgtgtgtctagagtatgcttactcgttgaaggcgactgataagagcgacgtttacagtatggggatcgtgttgatggagattgtgactgggaaaatgccaaccgactcagtgtttggtgcagagatggacatggtgagatgggttgaaacacatc

SEQ ID NO: 9475 - DNA, 1804 bp, Arabidopsis thaliana landsberg
aacctatcctgtaggtattaacttgtaggtggataggtataaagtttgcattttggttaaattggactcaaaacctctattttctgtcttgaaacgcaaccacattcaagaaacttacttgagagtctactagtttcctaggctcacatttttgtagcgtcctttcatgttgttggattgattgattttttcaacttagtcttgtactgttaattgatgagaaattcattgtcctttttttgacaggttggagctcctgctcgtgtaggtttagtcgctccaattgatgtggtcgtgcaaccaggcaacactggtcttgacccttcacagacctccttcttccaggtgcttaacattccaaccaaaatcaacaaaggtacggttgagatcataacccctgtggagctcatcaagaaaggcgacaaagtcggttcatccgaggctgcgcttcttgccaagcttggaatcaggcccttttcgtatggtctcgttgttgagtcagtctacgataatgggtcagtgtttaaccctgaagtgcttaacctcactgaagacgaccttgttgagaagtttgcagctggtgtctcgatgatcactgcgctttctcttgcaatctcttacccaaccgtagcagctgcgcctcacatgttcctcaatgcttacaagaacgttcttgctgttgccttagctactgagtactctttccctcaggctgagaatgtgaaggagttcctaaaggtttgtcctctttcattttgcgtttcagatattgggattagtagtcatgaaattgtttgttaactgtacatttatggatcaggatccaaccaagtttgcagttgcagtggctgcaccggtttcaggagagtctggtggagcagtggtggcagtagctgttgaggaagaagctgcagaagagtctgatggggacatgggatttgatctgttcggttaaaatacaccgtcttatcttttgccagcctttcctatttattttatggacctttaaaactttcacgttcagaatttctttgttacgtttatggatattttgtttcttcatcaaaactacctttctggttttaatttctctccgttgaggaattttctgaacccaattatattggttaacaatgtcattgtctgattctgtcagtaactacgcaaatgagtatatttcatcttcttcagtaaaggtttcaatagctcaaacagacaatactccagcaactatgacaggaacatatccaacatataacaagtttggttagtttcagctatataaccaaaagcacagtctactttacataatatttcagattttacttcatagaatatatgtttcattccttcacttatcttctttctttcgtcgcgcatagcaactatgttggttggtgtgtagatctatctttaaaaggttgcagccttgcttagtccaaatgatggtttgattttgaagtgccaaacctcacctataacaaactttctgaattatattattttattatctatttatatcatattatatactatctgaattatactacaaactttccttagatacatatcacaaaatatcatcaaattattaaaaactcttttagaaaattgcatagcctatcctcataataaaatcagattataatttaaatcaagtgttacgttaatttataaactgtttaaagaagaaataaaggggttaagcatgccttgttctctggtagaagcacaaacatgcttttgttgataattgtcagaaaaaaacaagtaaagtctataagaaaatggatcagactcattc

SEQ ID NO: 9476 - DNA, 1258 bp, Arabidopsis thaliana landsberg
aggcacaatataccctgaccaggattgtttttcaaatatcgaaccacccgcaaggctgctccctaatgatcttctctcggcctttgcataaacagggcaagaaagtgaaaaaagaacgctaaatcgggtcgagtcacagccaagtatatcaatctacccaccaatcatctctaaggttcagggtcgtttaaaaacgcggacttcgacaatgacaagtcattgtttgtttccaaaggaaacgctacaggtttcgcaccaagtagtccaacatctgagataatgtccaatgcgtactttctttaacaaagatacataccggtagagtttcttgctacttcaattcccaggaagtattttaattggcctaagtccttcatgtgaaagcacgacaacaagtaatctttaaaatcattcatgaccttaagtgagatcgtcgacatacactaaaacgtgaagtgactctccatttgcatccttggtgaacaatgaataatctgagagattttgctcaaattcaaattttttaacgccgtagacaatttggcaaaccaggacctcggactctgcttcaatccataaatagactttcgaagtctgcataccttgttcggatcggttgctttaaaccctgatggtagcttcatataaatttcttcttcaaggtcgccgtgaagaaacacattgtagacgtccttctggtgaacatcccacttgttcttaactgccgtatctaagaacaatctcacggttcccattttagctaccggcgcaaaagtttatccatagtctactccttcaacttgtttgtttccaagagcaactagtttggctttatgtctctccaaggtgccatcagatttgtatttgagcttgtgaacccatttacatcctattgcctttttccctttaggcaaatcctctatggtccacgaatgatttctttcctgagaatcaatttatgaacccattgcccctttcaatctatcgtcttccattgcctttttaaacgattttgcctctacgccttgagtaattgcagccatgtatgctttatgtaagtcagagaaacgctcacagtcaacgtaattggcaatcagatactcagatgtggacttgttcttctttgtttttggatttccagtctcaatcacgaattccttcaattttactgaatgtgttctaaccctcaatcctcgacccaattgttcagtaggaaacgatttctttgtttggacttgcggtgatgtaaatggtgcag

SEQ ID NO: 9477 - DNA, 908 bp, Arabidopsis thaliana landsberg
taggtcgaacctggagttagcggaacaggaagagaattgcacaatgaccattactgctggatgcgttcttaggatattcattataaaaggactgtatctcaatgttacagtagctgctctgatcttgctgcagagatggcagctgctctggcttctgcatccattgtattcaaggacaacagattatattcgaaaaatcttgttcatggtgctaagacgctttataggtttgcaactacttctaggaatagatacagtcaaaatggtaaagagtctagcaaattttataactctagcatgtttgaggatgagctattatggggtggtgcttggctgtattatgctactggaaatgtaacttatctagaacgagttaccagtcaccacatggctgagaaagctggtgccttcgggaatagtccttattatggcgtatttagctgggacaacaagcttccaggggctcaggttagttactctatgagacattctttgttctgtttttggaatttgtagtcaatgcttagtttctggatttatgtggtcttttgaagttgctgttaacacggatgaggctgtttctgagccctggatatccatatgaagacatgttaagcgaatttcataaccaaacaggcagagttatgtgctcttacttgccttattacaagaaatttaacagaaccaatggtgagttgtctatgaatttgaggatttgcacacgttttgaaaacgtgatcaagaaaataatctcggtatcatctctgcaggaggtttgattcagttgaaccatggagctccacagcctcttcaatatgttgcaaatgcggctttcttagcggcactattcagtgattatctagaggctgctgatactcccggatggtactgtggtcctaacttctata

SEQ ID NO: 9478 - DNA, 679 bp, Arabidopsis thaliana landsberg
tccgagctgccggcccacacctccaggcccacggataacaactgggatagtgaattgaccaccggatgtatagtgaagcataccacagttgttggagatttggttgaaggctaagagtagaaaccccatgttcataccttcgatgacgggtcttagtcctgtcatgcagctccaatgcccataccggtgaaggcgttttcacagattggagtgtccagaaccctgagatcgccaaacttatcagctaggcctttagttactttgtatgagcctccgtaatggcctacatcttcacccatgacacatacatgtggatctctgtccatctcttcttctagaccttcttgaagagcctcgaaaagtaatagctcatgtctgcacaagttaaatttagttatgcttatgctgtggcaaaaggcataaaccttacatggaagtaggttttatatctcacagaacatacagagataagagcaagaaatgtgctacttggaacaatggatgcataagtgaaaatgcatacgcttgaatttgtaggctttgaggatgtagatacaaattatacgtaacctcacatgaactactactaataaaacacaagattcaatcaagcagaagcagtatcatagatctaatgcactatagatgagcaatgccaatcacagttaactaccaaact

SEQ ID NO: 9479 - DNA, 1194 bp, Arabidopsis thaliana landsberg
tggatttgtgagatcttaaagcagtttcgttgtttgattttgatgcagtgaggagccagagatatatagtggctggatctgatgcgagtaagaagagctttggttctggacttagagttcgtcactctcagaaattgattccaaatgctgttgcggtaatgtctttgtctccgattttgtgatttttatggtttctccttctaatctctaatgatgtacgtttttgttttgtagacgaaggaggcggatacgtctgcgagcactgggtttgttttgcacctttttagctttgcaaattcgattttgattttactcttttgtgctcattgaagtatttagacactgcttgaacaaatctctaattggatctttcatgttctcttctaaatgattagattgtttcagtagttttattacattttagtggggattcaaagttggataacgatgaggaagtttttaactatgtgctattgggtgtggtgatgtaggatcctagccagttctagagtagtcaaaacactaatctatagttgatagtgatggcaaaagcttaatgtgttgcatgtctgcttccagtaatcattctagtgatgcctttggttgtgcttatgatgccaaatgtttaggttaaaccgttaaaccatttagttcattcccatgaacatagtttaactctcaagaacatttctggacatcatacggcaattggttaggcttctgttacatattatgcgactttccatttagtgaatgtttctgttaggggtttgtgtgttgtcttcattttcacataagcaatccatgatgatgtcaccatggcattttctttcatgtattagtcgtcacaaatagcacattttctttatctacctttaaacttccatgctcatattcaataagtgtcatgatgatgccttttttttgtcaaaaatacaaagtgtgaccaatcttctcgtatgaatttacagacatgaactattgcttttcgaggctcttcaggaaggtctggaagaagagatggacagagatccacatgtatgtgttatgggtgaagatgttggccattacggaggttcctacaaggtaaccaaaggccttgctgataaatttggtgacctcagggttctcgacactcctatttgtgaaaatgcattcaccggtatgggcattggagctgacatgactggtcta

SEQ ID NO: 9480 - DNA, 1149 bp, Arabidopsis thaliana landsberg
  unsure (1)..(1149): unsure at all n locations
acatgggagctcatcacataggtttcatattcctgcaatatacttgtctagactctatgcacttgctagaaagggagcggggtgaatacaagatagtctcggtaaccaaaaacattgtgtctggtctgtccttgttgctgaaatcctgtggaagtgatgtatcgaggtaatcaaaagaaatgtttcttcttcttgtacatatgttgttcctataggttctggtgaatcttattatttgcttgtcttatctttggctcaggttaacttactggttgtccaacactgtcatgttgcgagagatcatttcactggattttggtagctcaaagctaaatggattaaattctcttaaagaagattggggtgatgtgagaactctgatagcggcattaagaagagttgaatcatgttttttcacccaagcagttgaatctatctggtcacaggtaactatgttcaatgcaagctgaaataacatgttctgcagatgttaaatggctttagatttccactccttctgttaggtaatgatggttcatatgatacctcaaggagtagactcgacgatgggtgaaatgatcggtaatttttcagaaccagcaacatgtgaccggttacaagagagcttttctgttaacctatggaaagaagcttttgaggaggctcttcaacggctatgtcctgttcaggcaacaaggcgtcaatgtggttgtttgcatgtgttgaccagaatggtacacgttttttcctttccttcttctggtggaatgttggtttctcttctggactgaaaatgacatgttctgtctaattaggttatggagcaatgcattgtaagacttgatgtggctatgttcaatgctattctccgtgagtcggctcatcacataccgactgactctgcctctgatcccattgctgacnnnnnnnnnnnnnnnnnnnnnnnnggggttttgagctttgaatctggagtaaaactgaaaaacacggatttcacgttaaccatttgatgtcctgttttctagctagatatgagtcacaagtcatgaagctaatataaacgttcatacaggttagtactggtcgagattgcttacagacatctttgggattgatggtgagcaaaaaatgcagagaggagatgagaca

SEQ ID NO: 9481 - DNA, 488 bp, Arabidopsis thaliana landsberg
gttgatgcccttttttctagctagatatgagtcacaagtcatgaagctaatataaacgttcatacaggttagttactggtcgagattgcttacagacatctttgggattgatgttgagcaaaaaatgcagagaggagatgagacatttaaacctttccacttgctcaatgaactgagtgatctccttatgcttccaaaagaaatgcttgtggacagtttcaccagagatgaggtatgtatgcttcatgatttagaactgcttatcaaccctacaaagctgtgatctcttatattgcttggtttcttcatctagcttcttgtttacttttttgggtttccacaggtctgcccatcaattggtctgagtttgataaaaaggatagtatgcaatttcacccccgatgaattctgcccgtattctgttccaggaactgtgcttgaggaactcaacgctaaggttgttctacttacgttttgtgctttattga

SEQ ID NO: 9482 - DNA, 886 bp, Arabidopsis thaliana landsberg
  unsure (1)..(886): unsure at all n locations
actcatatcatctgggactatcagactttcaaatatattttatctattcgtagcagtatcattaccaaactattcccagttcattagtaaatttatatggtaaagtagttttatgaattgttggattgtgcccaaatgatttatattacacaaatattagtcttaaaatgttatgagaatcaatgtaagaaacatactcaaaaacttcatattacagattgcttatgtatagttagttctagcttgaccttttggatattgatcatacaaatacgataaataatttgataggttacatatccaaacatgatggagttcttcgagaatcttggagtaaagatggaggtttcagacatgtctttcgcagtgagccttgacaatgggaaaggttgtgaatggggaagccgcaacggtgtctcgggcttatttgctcagaagaagaacgttttaaatccgtatttctggcaaatgatcagagaaattgttagatttaaagaagacgtcttaaagtacattgaggagcttgagggtaaccccgatattgatcgaaaggaaacattaggagaatttctcaattcacgtggatactctgagttgtttcagcaagcttacttggtgaggctgttttctttaattgatcctacaaaatgttattcaaagttttcttggacgagaagtaacctcgatatatatgtctgtggaataggtaccgatatgcggttcgatatggtcatgcccatcagacggtgtcttaagcttctctgcatactctgttctttcgttttgctgcaaccaccatctttcttcaggttaatttatgctctctcatttttctcncttttaaatattcttagaattcctaagctaaatttggtcggtctttttt

SEQ ID NO: 9483 - DNA, 669 bp, Arabidopsis thaliana landsberg
aaaacttcatattaaagattgcttatgtatagttctagcttgaccttttggatattgatcatacaataaatatgttgataggttacatatccaaacatgatggagttcttcgagaatcttggagtagacatggaggtttcagatatgtcttttgcagtgagccttgacaatggcaaaggttgtgaatggggaagccgcaacggtgtttcgggcttatttgctcaaaagaagaactttttaaatccgtatttctggcaaatgatcagagaaattgttagatttaaagaagatgtgttaaagtacattgagaagcttgagggtaaccccgatattgatcgaaaggaaaccttaggagaatttctcaatacacgtggatactctgagttgtttcagcaagcttacttagtgagactgttttctttaattgatcctacaaaatgtttattcgaagttttcttggacaagaagtaacctcgatacatatgtctgtgaaataggtaccgatatgcggttcgatatggtcatgcccatcagatggtgtcttaagcttctctgcttactctgttctttcgttttgttgcaaccaccaccttcttcaggttcattaatcctctcttatctttctcctttctatcggtgtttctaagcttatttttgtcctcttttttc

SEQ ID NO: 9484 - DNA, 1175 bp, Arabidopsis thaliana landsberg
attacagttgtcgcatgtcaattgctcatcaagtttctccacacgggtaaaggattctagtgcacttccaagggtatccacatcctcaatttccaaactcaacccaactgacttttcatatgtctcggagacggagtcacagttgcagcaacgtagctgaaaacagaaatgcgtacatgtttacaaaaaaaacaactgaaactcataccgaaatagctttgacacttgaccaagtgtataaaagtttaaactacttaccccactgatgagacgaccagaaaagacatcttgagaagtgatatcgccacgaaaacttgttcgatccgaaccacatatctccaacttctccaaaaatgcttgcagaaactcatgagcgtcttcttgttgataacgctggaagtcaggtgaaaaatctgtgacagcttaaggataaatcaaaatgcatctcataaaaaaaatcagagaatcccaaaatcaaatatattcagaaaatttatgaaataaaaatcgatgaaggatacagttaagattgtcaaaaaaaaaatacggagcaattggacatctctcaggcctcaatgcagcctcaatgtgatagcgaatagcccttataacacagaagaactcattcccacctacaaagccaaacataatatataagataagatcattacaacgtaacataagaacaaaaagctacactacattaaaagtcttacagtgacatggaacttcatatctgaaagaaagaaggctctcgataagtggcacagtatgagtgaagcattgaaacaccgaattaaggaaacaactgttgcctaaattccaaagcccagctccctacaaaaattatcaaattcgtaatcagagatcaaaacccaaaattaaaaaaccaaaacttggaaacgaaatcagaacataccacaccagtaacaggctcaggttcttgccggaaaccatagaacaaggatttgcgaggttcatttttagagttgtcatcatcattgtcatcatcatcatcgcttccaaaaccaggcgaaacattaggagtccaaggtctgcgagtctctgggagatcatcatcgccccagatatcatcgtcgatatcgtctagagcttgcgaagtattcctgattggaatctgacactcatcatcatcgtgatccaaaatgatcgga

SEQ ID NO: 9485 - DNA, 1102 bp, Arabidopsis thaliana landsberg
tggataattagaaataggaccattgccttttcagatagatcttttactcaccaattagccaaagagatgcgaacttagaaatatgtattatcatgcttagattggtgattgagatttgttttgtgatcgtatattgattttatggtttatattttgcagttcatcgatgatgtctgagataagctcaacgagaagttgtatatcgtcgatgaattcggaaaaagaacaaccgtcaaaagagagaaaaggatggtcaataacggtccatgatctctccggttcacccgtggctatggcctctatggtaacacctttcgtaccatctcctggttcgaaccgggtgactcgatcaagtcccggagcgtggcttattcttcgacctgacggttgcacatggaagccatggggaagactagaagcatggcgtgaggctggttactctgacactctaggttatcgtttcgagcttttccaagacggtatagccaccgcagtttctgcatcgtcgtcgatcagtttgaaaaatggcgggagttttgttattgatgttaccggcggtacaagcacaacggcgtctacgccgacaacgagtcctcaaggaagctgggatctcggatccggttcaagcgccggttcaagacccgcgtcgagaccaggatcaggatccgggtcggatttcggatatctactaccgcaacatccgtctgcggccgcgcaaaacagagggttcgttatgtcggctacggttgaaggagttgggaaacgaagcaaaccagaagtagaagtcggtgtgacgcacgtgacatgtacggaggatgcagcagcgcacgtggcattagctgcggcggtggatctgagtttggatgcttgcaggcttttctcacacaagctaaggaaagagctgagacagcaaagccagcttggtgtcgtttgacttgtttcgctttgtcgttttaccaattcatgagttgtcttccactcacatttttttggtttgaattttctatttttttctttttaagatagcgttaggaattagccagccatttttttgagaggtggatgtcatcattattaaaaattgttaatatcttttctcagt

SEQ ID NO: 9486 - DNA, 1533 bp, Arabidopsis thaliana landsberg
atgtgccttattaaaatgatgaaccaagctaaatacacaattactccaaaatcaactatcaaaaccctaaataagaaaaacctagactacctttgagattcaatacaacaatcaaatcaaattgattactaattccttattcacatgattactctgcttccaaattagtcaccgaatgatgaaccaaactaaataaagaacaaagatttatcttttcacagttacacagaaacaagggttctgtctcaatacagatttttactaaattcagaaaaaaaaacaagaaccattagcttcattttcttactacaattactaaaataagaaccctaagccacaagattcagtaaattgacgtgtaagcaaaagatacctgtaattgacatgtctcatggaagaagaagaagaagaagagaaagatggcgaatagaattggttgccacctaaacggccgtcgttaacacccaccgacgctgatctctccatcgtcgcggagatcactcaacaacgccgcaaatggtaataataatttatcgatgttgggatcgaagagaggataaaagattcgattaggttgatgaagaagaacgtgtcccaatcgatgcgggtgactttgactacttcttccccaacgaggccacgaccaatgtcgtggtcgcagtttctagtaacgatcgaattcgaagcagtaagaggagatctctttttttttttttgggttagattcaaatgcatttatgacctaaatgtattttagtttttgacctttgactgctgacgtggatttttttagaataaaacatttcaacagttttcccgtaaacaataaaatgtataaaaatattaattgttggtaagatttttttaatattaggtatagtggaggagaattttcaaaaaaaaaaaaatatatatgtatattataaaagagaattaaaaaaaaaagtaatgatgaatgatgtaagttatcatgattactttagagctattttaatttttatgctcagtcgaatcgaaaataaaggaagtatgcatgataagttagaaattagcttctctcttctgtcacatatttttgtaccaaaaatatccctataacccggagtaaacgataactaattgtagcgtagctgtttaagcatttaacgccgtagagattaacgaatattcactcgccgactttggaaacataaaatatattggagaaagatattgtgatcattacaaatatattttgggttgcgggaatatcagaaatatacagtgggttatcatatttataatggctgtactaatttctatgcaagcaacaaaaaagtagcagactaacaagttaaatttatgataattttaatgcaagcaaaagataggaacacagaaaattaaaagcagagacgtaaaagtaaaagatgcaagtattttgtaagtgatagttaaatgtttggaagcttttttttaccatagggtttgcaagatgataatagagggcgataattaaaaagttaaccctgaacctatttcaggtacatgtgt

SEQ ID NO: 9487 - DNA, 2192 bp, Arabidopsis thaliana landsberg
gcagccataagaactaatcactaaactttgcggcgtaatttaaaataaagcgaaataaagaaagataggagaacgaaggttagttgcatcaccataagcatatttaagagaacttcagctcaaatacatttttttataaattgttttaagttattaagctatgattataaactataataatctcttgaaactatatttcttgttcggtaggaagtttaatcattgtatgattgtatcaagcttaatactaaattaataaatttagatcaaatgggctattgtaaaaatagttttagtaatattgattttgcaaaagtatagggtggggggaaacacaatttcaatgttgggtatcaatatgggcctttaaaccagtctttataatttagtagggttcacttcacatgctagactttgaataatggaagcttcagatttgaaaattttaaaacaccctcctaatgagaggtatgtgattgacggaaaaaacaaaaatgagaggtatgtgatcaacaaaacttttctttttcttttgtttaaatatattaaagaatgtttatacatgcttcgtatccgactacgaaagactatactcgtggtttgagtattaacatgcacaaaatagaaaagtcagtatacgtacggtaataatttgtagaggtcataatacagccaatagaaatgatgttgacttaatgacgtaaagttgtgtatttttgacgttaatagaaatgatatagtatttataatgttatatatatatatatatttgtatttatttatttatttaaaatacttaattaacgcacacacgacctattggaaacgagtggccatagcccatacaaaatcgtcaacgatgaaaatgagtgaaaagctaacaaccatttcgtgtcaagaatcgcgtatgttaacttcatctctctgaatcttctacaatcgtcaacgtactaatacatgcatgttcttttcttctatatattcgaacttacgtaatgaatttcgtatttcatgtacattgctggctaattaagtttatacggaggaacgagcttttttaatacacaagttaaagctggcttgtcgaataattttgcctatattagaaatagagatcaatgtttcttggttctcgcaaacaatataatcaaatttaagaaaaataaagagatcgattaaagaaatggatcgacgcctttgcttcttcgttcaactcgcctgaattgcctcaggtcgtcccatggggctatggattcattcatgtctatgtaaatcatctcttgcggttcgtttgcgtttatatttgttagtgtatgtatctttattttgaaaggcgtaatgcacgcaacatatatagcaacgtacatgcatatagctctattcctattgtttcctttctacttcaaatttctatcgtcaagaaaacttattatagtcagaaataattaaaaaaagccaaacggaaaagataatctaatcacttttttcatcgcatttcctgcgtcaactctactcgaggacaactataaacactaagtccaccctcacctacttcctcaccaatcacaatcctttctatctttaagtatttctaaagagaaaaaaaggaagaagaacaatctctctctctctctcgaaccctaaagctcaaaaagaaaatggccttcgtgaagctactcgtgtccattgcaataacaaccgcaatcacaatcgcagtcatcacaaccataaccaacaatacaaccaccattagagagtacacaagctttgatgcaccgagtacgccgactataaggccgaaccggttattgctcaaaaggaagtaggcgagcgaaaccctaacgctgcagaccattgcaacaggaaccctgagatatgtaccccctacggagggggaggaagcaactcgacgatgacatgctgcaacaataagtgcatagacgtgtccagtgacgacaataactgtggcgcgtgtaagaacaaatgcaagttctcacagacgtgttgtcgcggccaatgtgtttacgtggcttacgataaacgccattgtggacagtgtaaccatccgtgtgagctgggcgagttctgcgtctacggtctatgtaactatgcgtgaataatcgatccatcatcacaagagaggggtgtatatatattacacaacaaattaaactaaagctaattaaaagtct

SEQ ID NO: 9488 - DNA, 1879 bp, Arabidopsis thaliana landsberg
gcaacagatccaagataaagcccctgaaaaagtcaaattccacgaaaggtttgatctttgataatgaatcattggtcatttggttggtagaaaaagcctatgagtattagtagtagtagtaacctgttcaataagggaagggacattgtcgtctctataggtacgagcaactttaataacacgaacaagagcttgtatctgattcttcaccttttcattatacttttctattcctggtaccgaagaagatgacgaagaagaagaaggtgatcctctgtctctagaactcctgatttcatcgaatcagaaaaaagaagaagagagtttacatatcaagatcgtgatcatagcagcaagaatcaaaatcaaaatcaaaatccaggtcaccgaaataatggaatccgattctgatgaatgatcttataaccgaacaacggtgaagcgagaattacgattacaacgacggagtagtgattggtttaagatcaaaagaagaattcgattatcaaggaagaagaacttacattggaaaagaaggaatacgaattcgccaaaggagaaagagatttacaaaaaaaaaaaaaacgaatctttgaaatgggttaaagaggaaattgcaactgcatggttctccaggttttttgggggaaggaggaggaggagagggaaggatgtgttcaaagagggccaaatagtaaaatttcctttctatcagaaaaatcagaaatgttttaacttattagctcagtccttatattatactcaaaaatttgtgtttgggatttgtgctttgtaggcttggtttcctgctattaggccccctggattagtaagaagtagtgtacttggctgaaactgaggcaacggtgttgtgaatatgtcagcaaaactgtacagaggcagagatgtatcgagtgatgatgatgttgttgttaaagactgtttgttattatgacgtagtagtaatctactttaatgtttttttcgagggcagtagagcacaaatctacttcaatatagtccatcgaagttcgatattttacttcgatagactatctaatcaaagccggtctcgacgagtttctcggtttccattttggtacggtctttcccattcctagaaattgtgcatgaacatgaagtacttccttgctcacttgatgctgtcttaggcttgtttagaaataggaccctaattgctttaagaaatctgactaaaaagtaatggacaatgtacaaatgtaccctcagcacaccctctaagcccggtcctggcacatatcgacgagtttgtcggtttcattttggtatggtttggtttacccactccttgctcacttgtcttaggcttgtttagaatttgggcttatgggcttggtttgctacatcaccgtatacgtaacttcgtcacctcaaaaactatgcgagaaagagtgacttaagaagcaacaaaaagataaaccaaaaactatacgttcttcttgtatgatgatgacgacattgactttgaaacagtgttatctaaaaacgatttgatcggaaatatctaacaacgattcaagaaaaccaaatgaaatttgcaatttccaagtacaaattcgagaaattgagtaaacataaacttggtagaagaaagaaattatttttctaattacagatcgaaagaagattcttcagagccaagtaacagaaaccaaggaattagcaagcccaaattgttcaaaagtagtattagatccaaaataaagattcttataatccccaggaaacccttgaataaatttaaaacgccgctttctcttaaaagattcattaccaatctgcgaataacaaaacgaccaaagaagctgaacagattcactctttaagaaacttctct

SEQ ID NO: 9489 - DNA, 1026 bp, Arabidopsis thaliana landsberg
atcaaactcgggttagattagaattgttgttacaaacagtcaaacactgtacaagctaagtctaaagctagaacaaaaagaatcgagcattagaacgggacagtataaggtaaagaataaatcccaacttcagacaaaaattgagctctaggccaagatgaatctcccggtctcatcatcgtgtcatcatcaaccttgactgctgctttgggcttaagcacctcttgcgtcttgttcccaaatagccaataatcaccattgtcatttgaagatgcatcagcaatacacatggaaggaggagtccaaccatcaaacaatgcattgtattgatcttctttgctagatctgtgtttctttctcttctttgtttcatctattgccgctattgatgttgacggcagattcttttcaagctcggatgtttttgaacttgagatagaacttgttatgacatcttggtgactgagcgactttgcaactgtagtggagcaaacaacagcctctctaggcagagtaggaacttcctcctttggttttttgaagaccattctaatccgtagaggtttacctgctacaggtgcagctgcaaatacatgtgaaaataaacatgtaaataacctaaaagcagatatcaacatgatcttcttcttgaatgtctactaagaaatagatacaaacctttgatgagactttcaacagccggaggagaatcatctctaatcctcttcttactattctgacttccatcagacaaatatccaaggtgtttttgaggttcctcaagctcatctgtcaaaccactcttctctagtgagtcagactcatctgacactttcttggaaggaagaaatattagcttgtgatgattatcagttgctttaatcgaatgtttatgcgatttctcacgcttagtttctttcttttcttttctcctctccttcttttccttcttctctaaacggtgcgccttttttgaatcaagtgtgattcttttaagctttaatccattagagtaaggggatttga

SEQ ID NO: 9490 - DNA, 505 bp, Arabidopsis thaliana landsberg
aaagagtagggaagtctattattttcgtgcgccctggaaaaaaaaaaagaaactgctgacacacgggggagaagaagaagatgagaacgctcgccggagtagaagacgaggataagtggctggcggaaggaatcgccggaatccagcacaacgctttcttcatgcatcgcgctttggtccgtttcctcttattttcctccgttgaattagctcatttttgatctgatgaaattttctttctattcgtctctcaggacgcgaataatctcagagaagttctcaagtactctgctctgatgttatcggagcttcgaacctccaagctctctcctcagaaatattacgatctctgtagattccatcgccaaagaactttgaatctctcgattcatgcttgtgttgaccagtttctaattatttttccttctaatttagatatgagagctttcgatcaattgaggcagctggagattttctttaaggatgagagtaggcatggattacc

SEQ ID NO: 9491 - DNA, 1566 bp, Arabidopsis thaliana landsberg
tgagtttctatttttcttctcaaaagtgtatttcctaaatattgcattgtacttgtatttctcattcactgtaaacaataatttaaattgaaaaagttggttatatgaagctaacagtagaaattttgtgaattaaatacagagggtgataataaataccaagttgaaaagattcaatatatgtcaactaacaaaccatctcagataatacttttatctaccgctactttgatataaatagtttaattctcaaatgttcacctaaagtataaaaaatggtcacctaaactatataagttaattagcaaaatataaacaaaaaaccatttatcgtccaatcacaattggcgtgttcgtacaaaatatctagaagatccgatcaaaaaaaagagagcaataaacattatatggtactatcaggtttaatcaagtatattaaactctggtctgaatccaataattaaataaacttcagaggtttggaggctaaatgtttttaaaagaagagattatttaaaaataaaactaaggaaaaagggggccaaaattggaagagtcgaaaggttcagccatcgaaatgccattttcgtcgctgtggtaataaaagctataacaattattaatataccaaggcgaactaggtggatacgccgagtcaacgtacacaaactcgctcaatgactcatcgtaactcgtctctagactcggtaactccactatctcgcttagttcttccgccgtcgacgcagcttcttcgcttgacggtgacaacgacgatgacgtacacgttgaatagctcgaggaagacaactgcgtctcagctggggcgatgacggtggttggatcggagactacgagagaggaggaggagggggagaagtccatggcggccgctacggcggctgcggcttgaacgtcgcgtggagaggaggaagctggacggggaaggtaagtggcgagctccgggaagttgaggacggcggaagttcctttaatggtgagagcagctgcgtcatgtgcacgcgccgccatttccggtgtggagaaagtgcctagccagattcggctcttcttgcgaggctctcggatctcggagacccatttgccccacgttcgcatccggacgcctcggtaacccgggtcggatcttacacgtttcttggtgttggttcggtgggagtcttgttggtgatgatgatgatcctcctcctccggcaccggagacgattgtttgacggagataatggatgactcggtcattgacacgtgagtttgactcagtgagtgtgaagagagtacgtacgtagggtttatataaagactagagagagatagaaagagagttgaagtattgaagtgaaatgttgaagttagttagaaaaggacagtcgatcgtttacttatgatgacaggtgtgtacacattataaattcacacatcaatattatttgagaatgaccgattttttgttttcttttatttaatgttgatattttgcattcggcaagtaaatgtttatttatctcttcgtgataacctatgcatggtccatgtatgaacttgatc

SEQ ID NO: 9492 - DNA, 1559 bp, Arabidopsis thaliana landsberg
tgtgctttcatcttgggaatctgtcattgaatttcagccaagagtggataatatcatgaaatgccccggcaaaatgatgattgttaccgctgctgctcctcaaggatctccgtttgatttctgcagtcgactctttgctcctaaactagggctcaatgaggttaacaaactaacctgcaacttcgtgcatgggagcaactctctgctttttacttgtcgtagccgcaaacaaaaaataccaaaagtgtttacctttaccttatttgcttggtgcttttgttccttcaggactctgtatgtggaagtgcacattgttcattagcacattactggagcctcaagatgaacaagtgtgatttcgtcgcttatgcggtgattcatctttctctgtaactaacattttgaagcaagaaagaatcacattttaccgaatcaacaaatttgttttgcaggcttcgcaaaggagtggaacactcaaggttcattatgataaggagaagcagagagtcttgcttaccgggaaagctgtgactgtcatgaaaggctctatcttggtttaatctttcgacgctttgccaaattcttggaaaataaggtcaagattttgatttctcgaactccccacgtttgatcagattctatgtagtaaagtgatgaagtcaataataaaacatattgagtgatgtatgtttggcaataacgtttcaaatctcaaattcatgaaaacttaaagagataacaagaatttgtcttagtgacaccaaatctcactacaagatagatcttttacaatcctgctgttacaaaccaaaaaggaccagacttttgattactgcaaaatgcttaacgaccaccacggccacgtccacgacctcttccacgaccacgtccccgacctgctggaatcttacctgataccaaagagaacaatagaaagatgagtctaagcaaaaacaaaaacaaaaacaaaaacaaaggcatagttcagaaaaagaaatgttttgttacctgcagttggctttttgggtttgattcttggagtgtcttcaaccagcaaagtctcgagattcaaactgtccggaagaatataatagcgaatgttgtttcccctgacacttaagtggtctaatgtaactggattcttccctttcaaagtgagtttcacagcttttaaatgagtgttcatgctaacatctacacctgcattaagtcatcacaagtagatagtaccagtcagtgagttgattgataattgcattctaaacaagatgatggcagaaaaaggaaaccaaaccaaacattaacagcagagaccacttgtattagatcaatcagactaaaagagaagttgaaacaagaagccacacggtaactgttctgtgaaaaatcagagattttctttacaaggaaagagataagagtgactttcatgtgctaaatctaatcatctgcatctgactcgacaagtatcactcagttcttgctaacaagagggttaccaacaaagcatttcgaggtaaaaaaataattaagactcagctaaactctaacttcttcag

SEQ ID NO: 9493 - DNA, 1257 bp, Arabidopsis thaliana landsberg
atgaggtagcgaagtttatatattagggttttacgaaccctgaattatacgattttaacagatttgtcacgaacctgggctctactttaatgggctttactgggccattccttcaatatctgggtccttttaaaaaacgctgtcgtttgtttaatctttcccaattttcatctttaatgtttaaacacttcacagaatccacaatttatgttgtcctttaagtcttttaacacattgtgaaattttattaataggccaaatacgtagacctttgataatgtctttaagatatgatgaaaaaggacatatatcaaactttttttttcataaattaagtgagatgctatgtttaaacaagtaagagagcacaataccaaaccaaaatcagagtttagttcttgtgatcatacacttctaaaaacaacctatgatgtaataatctaaaataaataacataacctgtttaaaactttaaagcttttatcaatgaacaatctgaccattctcaacacctaaaccatacaaaacaccagaatacttctccattgaaccaatgaagaaattctcctgcagcttcctgaatgtacacgacgttaacaagctatccgatccggcctggtgacaaatcccaactctctcaacatcaagcagctccgccaatttattcagacctccatgaagactattacagaacttcatcaagtgtttgatatcataaaccctcgggaaatacacactgatcatctcgaagaaccctgtttgcgtctcgggaagattctgacaagtcaatagcttcaacaagtaaccgaaatcgtatccgctgtggaatgtaacccaatgaacgttttcattcaacacaatccctgaagacatcaaaagctcagcgaaccgcttcgaatcgataccgaattcgttgtttttcgcgaaatcgatgcctgattgacgaagaagctcgatcgaatcggtagcgtagatatcggattcgaggtcgaattcgcggaaattgaactgccagatgcaatacttgttgtctgttccgcaagttgggaggttacctttctcatcagagaaagtgagtccaagctgaatcatcttgagtatgttgacgtttgttttgagagtttcgtagtggtactctgtgttggttttgaatgttcccactggtctacacacgattcctgggaactctgtgtccatcgctacgaatgggaaatcgtctacgacttctcgaatcagagccatctctgattcgagatt

SEQ ID NO: 9494 - DNA, 1685 bp, Arabidopsis thaliana landsberg
tctactgggaactacgaaactatgccttcgtgcgatggcgattcctgcacaccgtcagagcatcttcgtcaccagaagtccatgatgaaatcccagcgaaacgcgcttctcattgcggctgcacttgtgttctactggatcctttactcagtcaccaatttggttgtcaagatcgagcatcttaaccagaggatcgagaggctcaggaacaaggattgatcgtctcgtctcaggttcaattagtgtaatgccttttttggttatctttcccatttggctaggttttctctttttcaacgtttctgatatgtgtcttttatcttgtggagattgaaggattttatcctacttttctatgtttggattcttatttgtaaccagattgtgattgtttcttgttgaattttgattgactctataatcttctcttcaggataggcattatgcattaatgacacacacatgattgatggttttattgaattgattctgtgccacacccactgtgatttctcttatgcattctatgaattagagcttgtggatacagatttggtaatcagggaacccttttgtttagttgtgttcaatgtctggttattgatttccgggtgaaatccaaattgtctcataggtgcatttccctttttatacaaatatactgatgcatctgaaatctgaactagtagtatgtgcttttgatatgctttgttagacacaagaaccgatcatgaaccatagattgacccataccaagcaatcggcatttgtttactaaatgatcgattagcgtagaatagagtaatcaatcgtccttgaggttctagataattgagtttaagcgtggggtacatcctaagttgctttagatagattagggaaagaatactgatgatcatgtatttgcttctccatgaaccttgttgtgaaacacttcttttcttttcttttctttggctttcacatattctgagttctcgtagttggcttttaaaatgtttgaacttcggccactcttactttcgaaatgtatggacttgaagtagagattgagattgatgtccagtatcttagtgggaggagatacatagccatacttagctgagcagtgatcaaaggtgattttgatttacaaattataatatctggttgtttttggaacatgaacaatatgttagcatctatgtattaagttaacgaaataggaatattcctagcccacaaatctggctttgcaatctacccttagggtatatgattgggtggccctgattagaggaatattattagagtaaagaacaggttattctaactctgtgtcttaccagttgaagcagtagaaaattagttcatttaatttacgcaggaataaggaaagagaagaagcaaagtagaggaaaacattctacttgctctttggtgaagaaaacgtatagattcctccgtatttccatttttctccccaattagttacacatcttgatatgttttttcaaagcgatcatgtgctaaggggccttagaaacggtccataaatatttaaaataaagttcattttatcaatcatggcccaaaagtctttgaatctgctcaacgtagttcgacacgtatcgttagattcgtaacacaaagattctcgatggcctcgttgttcgtgccatctgtttccacccgccacggtaacc

SEQ ID NO: 9495 - DNA, 1896 bp, Arabidopsis thaliana landsberg
tttttttatgcatcaagctaattgttctcatcacccacaacattagtgttgttgcgtctcgaagacttaatgttccaacgagaccaaaagagatagctaagaaagttcaaaagattaagaaccgctaaaagccagtaaaatagatcgagcctgtccttatttaggtcgttctccccgagccaccctttagagtcgactgacgtggaagtgatcttgtttacgaccgaaacgagcaccgagctgaagtaaaacccaaaggagtaggaacaataagtcaatgccatcaagaatgattccatgccctttgcagattgcttgtaaaaaaactcgattaatccaacagctgtaaacatctcggagataccaaagatcaagaactgtggcgtgatccagaagatactcaagattctaccgtcaagaaccgaagagtctctacgtttcttctcgagcatggcagctgaaaccatggagaaagtggagaggaagagtccaattcctatccgagtcaatggaggaatacctgagttatgtcctgtgagcttacgtgcaaaagggactaagaaagagtcgtagagagggacaaggaatatgagcattatgtaagggatggcctggagtgaagccggagggatgtggaaggaatttgagagacgagtgttcatggaacttccttgttggactgaaaacgtttggagctgtgccaagatggtgttgaagactatggtgcttgcaaagatagggacaagtgagattagggtttttacttgctctacttgtgttactgtgcatagcctccatggactctcctttgtgtttgtgtcttggattttgatgcatgccttgtccaagaacctgcccaaattttcaaatacaatccttagattttattattcttgtcggatttcatgcgtatatctgattacatgagacatttttttatataaaaactacattgtaacatttttaaaaagtcttaatatttcctttaacttacgcctttacgatttagaaatgatattttgattacaacctttaaagtttttgttaaattaaaaaaaaaaaaaaaaaggagacattacacgtggacggaaatgtaaacaaaataccaatgtttggaatctttcgattgaagtttttgttcagtctaataagaaaatatatataactatctataaatgatcaaatcaaaaaatgaccaaaaagtgaaacatgaatgatagaaaaagtgagataatgagttcaatgtatgactatgacctgaaacgaggagtgtgtggtaaagtggaggagggtacgacgtcgtttgcgacatggtggtctccatggagcattcttgggtcagagggagacgcaagctttctttttaatatggcagccacaataacctgaaatacaagagatcactacatattgttattgtgtatagatatattatttttgtgaatatatgtatatatttatgatacattaatgactatatattttttttttgaaaacgcacaattataatgttttgcttgaccatcagcttctctcttttcatatgagtcagcatggaccaaactgttttagcattgtcttgtccaaacacgtgaccacaatcctcactttgcatacatatatatggcatgttaataatttttctctaaaaataaagccaagtgggtcgaaatttccttggcatatatcatttggaacacttgaaatttcatttcttagaaaaagtaagtcaaattttctaaatctgtaaaaagtcagaaaattatatgagtattatagatttatgattgtataagatgagtgattatacgcacttgatttgtctgcatacatgtttaagtaaatttctgaaatttaagtttaaaaaataggataaatgtaatatgtgctaaacta

SEQ ID NO: 9496 - DNA, 507 bp, Arabidopsis thaliana landsberg
  unsure (1)..(507): unsure at all n locations
nnnnnnnnnnnnnnnnnnnnnnnnnnnnnnnnnnnnnnnnnnnnnnnnnnnnnnnnnnnnnnnnnnnngttatatgcagagagaaaaaagtggaggattgttgaagagagagtctcgtgatttgagaaggccacaaatctccgaaataaaagcttcaaatttcggtcacaatttaaagaaaaaggggatttatttaaaaacttttttaaataaaagaacagaacttggggtgtggcaaagcagacaaagaagaagaagaagaagaatcatttgggtgtgtttttgaagtgaaaggtgatgtcgtgttcttcttcatctgggtctgaagaggaggatgaggggttcgactcttaccggaaaggagggtaccacgccgtcagagtcgccgatcagttcgccggcggcaggtacatagcgcagaggaagctcggttggggtcagttttcaacagtttggcttgcctatgatactactacatctgcatattgtgttctcaagaccaaaaaa

SEQ ID NO: 9497 - DNA, 1207 bp, Arabidopsis thaliana landsberg
aacacactattaacgaccaatcctcaaacctaagcttttcgtaaagacagaatggttataacaacgattgcgtgattaggatttgctccgattgtaacacaaccaagactcctctttggagaagtggtccgagaggtcccaaggtattaatcacacgtctgttaattacacatatatgcgtaagctttgttttggttttaatgttaaaagtagatgcctaagtaatgtcatatatactcatattgattattagaagctcacgaagaatatgtctttttatagtactaattaatagcaaatgaaaagtaaatctacaaatctctaactggtaaaaacaatttcatgtagcattataagttggtttaaacagattaatctttgagatcttctaaaattcatgttacaagataattaactaaattatcatgttttttcttgttttgttattacagtctctttgtaacgcttgtggaataaggcaaaggaaggccaggcgggccgctatggccacggcaaccgcaaccgcagtctctggcgtatccccaccggtcatgaagaagaagatgcaaaacaagaacaagatatcaaatggagtttataaaatctcatctcctttgcccctaaaggtaaacacgtgtaagagaatgatcacactagaggagaccgcattagccgaggatttggagacccagagcaactccacgatgttatcatcttcagacaatatctatttcgatgatctagcattactgttgagcaaaagttcagcttatcagcaagttttccctcaagatgagaaggaggctgccattttactaatggctctatcgcacggaatggttcacgggtgattattttaagtattttaattataactcgcatgcttaagaaataaaatataaaccataccataagccctcatagctagtaatatctagattatttgatacatgaaattttgttgcggtgatatattaatttcactcagtccaactttattataagagagtgttggggtttagtagattttgtatgaaaggcttgtattttattttttatggaacttgatatcccacaatgtggttgttcttgttcattgcatgttttttgggtttctaagtttggaaaagtgatataagaattacctttaattttggcaaaaatcttcgtcaaagtgaattataacttggatgaaaaaatctttttt

SEQ ID NO: 9498 - DNA, 1512 bp, Arabidopsis thaliana landsberg
tggcaatacatagttggggttgtaaagctactaaaattttgatgaatatgttataacttagatgtatgattattattgattgaattagttctaactattttaggatgatttgttttttttttacaacttatatcatggaacaaattgcagattaatttcacaagtcacaatctacagttcttagctaaatattatagtgatcagatgtctcttagtaaaaaacgttttagctttgccaaaatatataaaatataaattagaatcaatacatatacttggaatcatatgacttttttttgggggcttggagaagagcattgtagttgtaaatattatcaaattcccatgcggtcatgtcatgtgccttacatgcaattgagctacaccaagttgagaatcagcaataaaaaaccttttttgatcactgtgaagtgtgaacctttttgcatgattaaagagaaagaaaacaagttgagaataatgtttcttgtcttaatactgcagtattttctgatgactcaaaaactagagtgagcttcaaaacttttgaaccttaaattttcgtcatgaattgatgatacatatatatatatatataaacaagtaatgaacctttttttcttttctaaatcatatattcccgatcatgaactttttagattcagggaaatgtcaataagttttttgctgttttcgttttccctttaataatatgcaccaccaatatatgcatactttcactttcactttttgaaaacaaatcatctcaggagaacttttgaaaaccgaaacgcatgagaacctaaaagtatactattggaagtagaactagtagatgggataggcaaatctattcatctctattaaaaaaatatgtataagaaaagcataacattccgattttagatcaaaatcatcattgttggttgcatcctaaatgtctttggagcagtttctcctactaatctcaaattatacaaaagagaaatattacagtaagatcaaatgtttgttgcatgttcctaacttcagtcttcagattcaaatcacagttacaaaactgcttcagccgcctaacaatttggttctgaaacatatgaattcctagaagaaaccacgaacaactgaccagctctcttgaaatccattactgctcaaacggaactcgtatgaacaaccgtccatgcatgctcatgaccgcggatgtgtgaagcggatcaattcttgctgataagtcaacaatctggtgaaaacatatcaaaatgacaggaaggttctcagtctctgtatcagttcagttaatggacatatctggaatatagaagaaagttttacctttttgaagggtgtaatcccccaaggattgtcaagctgctctggctggcctgttataaccacctttcccgcaggatctgattgaattcgaccctgagaaaagacaacgtatgttcagtaattggaactatgtactgattttaccagaaaatacttattgcctcgaacagtgtgtct

SEQ ID NO: 9499 - DNA, 1919 bp, Arabidopsis thaliana landsberg
  unsure (1)..(1919): unsure at all n locations
taaaacgttcttcagaatcaagggaaaataaaggcaatgtataaaagaatagttcatgctactaaatccatgcatctaagagatgataatgatgataatgaaaaaatgnnnnnnnnnnnnnnnnnnnngcttaactacctccactaatggccgtaaatgtccgtcaccaggtgatggtatgaacaccagctccagtttcatttttcaaaatatttatatttttgtagcaattgagaattggtttctcctattgaaggttgaagatgtttcggtgaagagataagattcgtctttagcatacatgacatgtggtacttggacatctactgatgttagtttaacttttgtcacaggccatacaatcttgatcttcagacttcaacgttagtacgttacgttagtatttttttcttttaattgtcagctatatactgcactatcatacaattaaaggtaaccgacgtttaattcattgagattttgttggcatgtattattgtttctcgagatatcaagcatgtggtgggatgcataatagacaagagtcacaagacacgacgcagaacaaacagactctctttttggtccacatatataatgacctatccaagaaacgtactccactcttccaccttctcggttactgatgcgaaagtagcaaacaaatatttcacatttttccaaaaagtgtttttaaaaagtcacctaatatgataactcataaaattttcgttttggtccgtgattgaaccaagctataagtctattataacattctcaaaatgtaaattagtatttctaagaaaccatgatgtagttgttttttctttttgtggggtgatgtcagcattggacttaaggtgagttcaagatttagtatgcaactaaagcactttcaagtcgtgaacagaatccttcacttccctaaatttttagatattggaacaacttatagattcataagactaaatcttgtgttgaaatattgaagttctatctcaataagtcactgttagatcataattagtttgataaatccagataattcgtgcacatagtgtgattattctttgcagataacaaaatataaatagattgtttagacataaactgcatttcttttcttacaatcttaccgaaacgtaaattgcattattttgcttaatagacaaaagtacacgtaactattattatactttcagactggttgttttcaatcatgtcatcatagtccttttaaaagattcccattattctatcacaaaacacccaaccatgttcctatggtacattatcgagcacgttcctatggattatggaacattatcgaccacgtcttgaacaaacttctttagagcacagttcgaagatccaccgtccaccaacgccacgtggagcttatccttcatctccatcaccctcttcctcatcttgctatcctgctccatcgcacacttgatccctctctctatctcatcagccgtcacaatctccggctcctccaccagaaaatctgtacggtactccttctttacctccgccgctaaaccaagctcatccaccatatgaaacgcgttaaactgttgctcagcgtagataggccacgccgccatcggaacaccgaaccaaagactctcgagaattgagttccatccacaatgtgtcacgaacgctcctatagcaggactattcaacacatctacttgtggtgcccagcttatgatcttccctatctccaccgtccgatctaaaaacccttttggaagaatctcctctaagttcgtgaattctccgggaggaggattagacttgtttccaacaggagaagcgcggcgaatcgaccagagaaacctgtgtccgcttcgctcgagcgccacagctatttctcttgcttgttcctcactgaaacctcccatgct

SEQ ID NO: 9500 - DNA, 150 bp, Arabidopsis thaliana landsberg
cagagtgtggtttcacagcctgaggttggggagcccgggattggggacggtcttggtgccgatctatcatttgcatccggagtgggggcagcaggagctggggtcggtgccggagcgcatgccaacaacactcaggacccaaaagtgatg

SEQ ID NO: 9501 - DNA, 1482 bp, Arabidopsis thaliana landsberg
aaatattatgtctattaagatgttatgaaggcagtaccatttgaaattgtataaatcaaatgcattaatttcctctttgtccgtaactttctaactttcctcttttgtggcaatttacagtcagtgtgttattgcctcaagatctcaagttgaaaatagtaaggctattataccatatttgaagggcggatgtttggagcaggcatatttccacttgaaaaatttgaaacaggaccctcgaagtttgaaaatcttcctctcctctccctatttatgacgagtgactggaatcttcctgatatgataagacacatgaatgagattcgcttcatttgcaaaagaaaagatgaaagctgggctgaagaatcacctcctttctgacttccagtggggcttgggtctctatttgatctgtggcttaccaagtcatctgaaacaatgactaaagcttagaactgagaatatcatctatcaaactcaacacaggtacgtcatagcaaccaataatcttaaacacatgattctttccactatttgcatgtttcactggagcaacttcataatattaaccctacaggccacattttaggggccaaggtagtgtaagactaccagctgacattcatatcagcactgaaacaggcaaatattcaaaaggacaaaaacatacagttttcatcgtggtttcgtggaggtgaccccatccgtgaccttgaattactcctgccatatctcttgtatctaaaatcattaatgcttcgctcagttgcaccccgcatgccaacctttccaccaggaagtgtacccccatctggtatattatttggttcaactggctgagactcagacatttcaagaaccgaagcgtctggcagatcagggttatttctgctgctaggtgaccttcgggaatcagccgcctgcaatgaatacggcatggttcttgcaattatgtcaagttctgctctggattcagtagcctgctctattctagggtctgctctggggacaatcaccggagcaaaatctgctgccttattgacaggattcgcctttgggttagcttttgtaaaattcctccttgacgttgcagcattagagacggctgttgaaacacccgaagtggcttttgatacattggtcgaactgaccctatgaggagtgccgtggaaacttcctgtggcttcaaacagcagacaaaaccagaaatggcatatcatttaatcagggctaagattaggtaagaagaaaagagaaaaatattagaggcaggcatacatgaaaacgtccttgactctttaaaaacgtctgaattttgagaaactgacaacctcccgagaggctttgattccttcatcgaggactctgaattttgtgatgttgatgaccttccaatggactatgtttcctttgtcgaaggatcagagttctgagaaacgaataataatcctagagactttgtttccttcaataaaggatcgt

SEQ ID NO: 9502 - DNA, 1161 bp, Arabidopsis thaliana landsberg
gagagttctgcacacgtttcataatcgcgggtctagacattacatcagtggccctcgtgtggttcttctggctagttcagaaacatcctgaagtcgagaagagaatcctaagagaaatcagagagattaaaaggaaacttacaacacaagaaactgaagatcagtttgaggctgaagatttcagggaaatggtgtatctgcaagctgctttaacagagtcactgaggctatacccttccgtgccaatggagatgaaacaagctttagaagacgatgtgttacccgatgggacaagggtgaagaaaggcgctaggattcactactcagtctactctatggggagaatagaatcaatttggggaaaagactgggaagagttcaaaccagagagatggatcaaagaaggaagaattgtgagcgaagatcagttcaagtatgtagtgttcaacggaggtccaaggctgtgtgttgggaagaagtttgcgtatacacaaatgaaaatggtggctgcagcgatcttgatgaggtattcagtaaaagtcgtccaaggacaagagattgttcccaaactcaccaccacattgtacatgaagaacggtatgaatgttatgctccagcctcgtgactggtaaggtagttcggtttaaaaacaatatagtactaataaataattgatgttgaacgatattctaatcgttttagtatctaaatttgtttgtggaatatggttaactaaaaagactattttaactaattcggtttggattttatgtgcaccaaccctagtttacttcaagcaatggacatatgagagtcacgaattgtatgtacatgaaatgtctatttaaaaagctctaaatcttataataatgaaagctgatcacatgaacatgatactgccctccactttcttccacaatcgtcatggccctttcgataatgggtgcaaaagaagtcggccctgtgacagaagtaaccaaagatcaggtgacagaacaaacaaacacagacacagcagaaaaagaaaacagagattcttaatctcaacctacaagacgcagctgaggaacaatctctctgtaccgtgaaacgacatctttcaacccacttaatctcaatcaaacagagattgtttacagaatatatcatccgggtaaaaac

SEQ ID NO: 9503 - DNA, 611 bp, Arabidopsis thaliana landsberg
  unsure (1)..(611): unsure at all n locations
taagctaatctaaaacactatccctgaaagcagctctttccctgtcaatgctctgaaaccgttggcggtaaggacagtagtttcggttatgggtgaacctaaaataactactacaaatgcgcctgagtctctcatattgatgtataaatatgtaaattagtaaatttgtttgatgtataaataatcttctaataatgcacacatattaaaaatcatttaaaaaataattttcacacacagattaagaaatcatttaatttttttttatttgtaaagtaaaacatcatttattatctattcaaatatgattcaaccaataaaaaataatctgccgaatataaatcgccaaaactaataaaaaaactaattaatccctaatttatattaaaaattaaaaatatcatctaattttgaacaaatttcctcttaaaacatgaaatggaaggttaacgtcatttatactaaaggtttatgactaacgttagtatagagagccaggtttgtcaaatgacgtcttataagctgacttaatatcagaacttatgaaagtaacgtcggtttagaagcaacacanaatttttatagaccattttctactaaattttatataa

SEQ ID NO: 9504 - DNA, 375 bp, Arabidopsis thaliana landsberg
tatattattatgcttgtttaaaaaggttagtctcatgaggcagccacaccataacctaagagattacatggaaaaaaatgcaacctcgtgcttaaactccttttgcaaggctttgttttgtctcatatgttaataaacaaactaaaagttggttacaatgcctaaaagcccacactgaatttggaaaaagaaagaaagtgaagtctagcaagagtccaccacaaattacatcgaaaaactgagatttagcatttggattctatcaaaacacgtgtcaatttgagagtacaaccaaaacatgtgttgatgagttaacataagtcgactgacatctactttcgtcgccgacgagcatcgaatccggtgacgaaagca

SEQ ID NO: 9505 - DNA, 542 bp, Arabidopsis thaliana landsberg
  unsure (1)..(542): unsure at all n locations
tatatcatttggttaatatttttaaatttttgtttatttatgattgaaaataataaaaactaatatacattttttattttctattgaaaacaacacaaagttttttgacaatttatagataaaaacatttttttggttttaattatttgataacagtttaatacgaattaaagagagaaaagtaaaataatctgtaaaaaaaaacttaatcgaatatattgtttcctttattatatataaaattgtcgtacatggataacacaatacttttgaccccaaaacaaaaagctcgtgcattacattctattcttcttattttgattacatacattgtattctttttctcaagaacgtacaatgttcaaggacaactaacacatacatgtatacaatctatgaaaaaggcaatatatatctttcatcaaaaaatgtcataaccgtacaagatatataaatactataaacaatatgtcatagtagcatcacaactcacaagataaaatacangttatacaaacatttaacaatgggtgagaacatac

SEQ ID NO: 9506 - DNA, 1037 bp, Arabidopsis thaliana landsberg
ccatgatcatgggattagtcatttctccctagttcttttgataataggtttttgcgtttgatatttggtggtggtgatgctttgatcaggaggtgtttactacttatttaaactacgaaacttgagatttgattggttcacgagtcagtatctcattaatgagggtttatgaggtggttgctagattgtaacctcttttttgccattcatagtgcaagtttcatttaatccaacacaattaatttaagctgctaatcttattttgctcctcttgggtaaattatacgtgctcattaattttgacatctgccacataagagacttgtagctgcgtcttaaggttttgtctaacctacattccagcaaagttccagcaaagtggatatgggctttgattttctaaggttcacagatttcgcggataaacccatattggtggcccagtgggtttggcttgtagagatagtcttttcaaatatataatttcgatggttaaaaatcataaatttataaatttgaaggtgcaacacaaaaaagttttgctaactcaaatgaatatgccatgaagtcaaattcttaatcatcatactttttgataagcaagacttcataaaatcatgaaacattccacaacacaaaccttaaattgtagattattgatgaacaacatttttgaactgtcactaaggcactaattatcagtaacttaatccacaatagcatcaatatattattgccttgtttcattcctcgtcggttgctgaggtggcggacctctgtatccatatcccggtagcggtggaggcggaggcggcatgtaaccataaggtccatatccatgttgacttggtagaggccaagttggcgcatggtggtaaccttaactgaatataacacatgtcccatcgaaccggtacgaaaaagttaaatgaccatttataaatattaatattagaatttaggaaatttaacattatttcgaaatatattatttacatttctgtttatcctaatttctatataagagaatgtaagtt

SEQ ID NO: 9507 - DNA, 450 bp, Arabidopsis thaliana landsberg
agatcaagatatgacaagaagatattattctagaaaataagtgttaatattagagtttaaaaagtttaactttatatcttaatatattatttatatttatatttatcctaatatctatataagagaatgtaagttgtaatattattcttataagagtatattataaatttgtaagttgtaatattatttttataagagtatattataaatttataatgttgcttaaacacttatgtgttctttacgctcatcgaattttatcatggtatcagagccaccgatctttgaaagcccatgttaaacccaaaatctatcatggtatgagagcccaaatttatcatcatgttaaagaaaaaatctcagacccacactgtcacacatatacaaccttgttgcagcaacgtaacggtcgttattaatggttaccataaaatgtcaacaaactcaatt

SEQ ID NO: 9508 - DNA, 1235 bp, Arabidopsis thaliana landsberg
ctacatggtctgtttatgtaaagtaaataaatttacaaatttatcataatttagggttctaattttatggtctacctctaaataagatattgtatatgcacatataaatcgtgcatttcattaaagacaacactatctgattaggtggtaggaaataaaaacagtgcatgggatgcaataaaatcacaagaaagtgacatctaatatattcctaaactgagaatttattctcatatatgcttcacaagacacggttcgattatttgattcttgttcatgtccttctgaaaacatctaagataatattggataaatgcataaaacattagcacgtccgatccccttcgcagagactgcgcatgcactcacaaatattcgtgttcataaattctaactcgccttttaattatgtatacaacggtaaatatgttaaaaactagcttccgaaataaaatatgaaaagtacctctaatatttatgaaattaaataaacacatctagtacgtacgatattgaattgagatctaaataaatattggtagtccttcaaataatatttatgactttcaggtacatcttaaaagaaaattaaaattaaaatgctgttagtccaaattgaatttagcatataataattacaaaaagtgtgtcaagttcatagaacgcaatagacagaaaaattgaacaactcgaacaaaaaataaccataatcatgaatatagaacgaaaaagcaccaagtactgtaagttatgttattccaatgatattgtctttaaataagccgagacaaaagattgtgatgtagtcccatattcagaccattgtgagcaagaggtgcatacatccatagatcttctgaactcaagagctacattgcaaaatttccaaaaacgacaaaagtgtttggttaggaaaaatggtaaaacagagtttaggaaagagttttacatggtttcttgcagtacaagaaacgatcaagactccaacaagaaaaaaagtcgttaccttgatttgaagctgtaggaacttcacgtaatggacggcatcttccagcattgtgcttatatcgacctttgtcccattaggaactaggctctgcaatgtctttagcctatcgtttatcctttctcttcgtttctgcaacattcatcaacattattattccacaaaacctaaaaactcaaatcaacaatgaaaatatttgtttaggttatcttgaattaccctagcgtat

SEQ ID NO: 9509 - DNA, 1090 bp, Arabidopsis thaliana landsberg
  unsure (1)..(1090): unsure at all n locations
ttgagtaacgcactgagcttctcttatttataaggagaagaaaagccgcgtttgagcttatctctctctctctcttgttgacgatgattcttcttttacttgactcattgtttgcttttatccaacccgtccccacccgacccgatcttaaccatggacttacgtactcgtgtagctttataattctctttggctccaaattgcttttgtttaagttctttatacatatttatacaaacaatggttttgatactatttacaaacattcaaatatttcaaggcattcttacacgattttccgatgttgataaaagaaattataaatcagttccaagtactatcaattctgtgaatcatttgttgatgaggaagtggttgccatatatagttacaataataatcacctgatctaaagagtcatagtggaaaaaatcgagattttgagtgtaatgtgacttgcagttattaccaatttaccaccagtttcatatctgtgaccgagacttgcatgaagaagtaaattaaaccataaccaaaccacagtagtacagtacaaagtacaaagcatagagaagataaggagagagatgtttccgcaaatctttatttctgaaacagaagcaacaaacagctcccacaagcatgagccagtttaaatacaaaatgaagagcaaggagaacaagacagtgaaaggcaaatcacatttcatatctcaggagcctagttacttaccactaactaccaagaaggccttttcatcatttcaacgactttaaaatctagttcttagtgaacagcaagtgataatttaacttacttcaaatgtatcggcatcagcaaaaaagaaagaagcatattttatctgtaagcaactagctcagccttcgtctgttctgtaacagcttctttcgaaggcttatggacgatcttcggntgtggnttttcaattccttgtatatnnnnnnnnnnnnnnnnnnnnnattgctggacacaagtgttgaatggtcaacaacaacaatcataacacagtggatagaactagaagaaggcaagatgaatanacacactgctatctaaacagagagtata

SEQ ID NO: 9510 - DNA, 583 bp, Arabidopsis thaliana landsberg
cgcccccaagagaatcagagccccggatatggatatttcagatctgatagaagaaaatcacgtctctctcatgggaagactgacaaatcctgctgctcaaagactatggtctctaatatcaggctctcgaaccgttggaatcttaatgggaaagctataggctcagatctaggcaatggttgcttctagttcatctttgagattgaagaaaaccttgaaaaagtactggctaacagaccatatcacttcgaccaatggatggtcattctccaaagatgggagtcaatcatctcttctactttcccgtctttgattcccttctaggttgagctccaaggtctcccaaagcactactgaaacaacaactgatatacaagataggagaggaaattggagaggtgctggaccatgagattaccccttcagctgcaaagataagacttcagatcaatggccttgaaccactaacacaagaaacagtagtggagttcactgatggtcaagaagctttagtaaccttggattacaaaaacttaaagaagcattgcacacactgtcataggctctcacatggcatggataa

SEQ ID NO: 9511 - DNA, 1857 bp, Arabidopsis thaliana landsberg
ctttactacaatatgagaattgagaaaggtatacctatggctctggacgtggctagaattccttcaactctagctccatccactactaaaactcgaccaccagctgcttcaatcctcgcacgctcgtctggtctatccggctgcaaaaaactcaacaacttcaaaatagaaactccaatattctcaaacctttacaagaacaccaccttgtgatcgttactcagaggaatagccattccatttcgacacaacaccgcacgtgagtcaccagtattggctacaataatatgatcgtgcgtcaaaaccgcagtgaccgccgttgaacccgaaatcgcagcctccctcggatcacagttacacaacggcacactagtcccacacacgcatgtactcgttgccatctcatccatcctcttgaaactccgtttcatcacgccccgccatttcctctccacgacatcgttttcgcttccttcttcctcctcttcgaggttttgctctagctcctccttgacaaacgtgtgcatagtcgtgctgcacaatgttgacacctgtccacgcatcacatcagcctctttatattaaatgaccaaaccacccctggttaattttcttacctgagaaccgccgtggccatcgtataccgcaaagaaatgaaccggtctttgccggttaacttccggtttgcacaaattcggtttaacagtaaccgaatcctccatcttacgagatcttcccataaccgaaactataccgtacaacggctcatcctccgtttcttctcccttccacaccggcgcttccgatttttggcaagaagatgccgccggaggtgccaaaaaaaccccgatatccgccggaagaccaccgatctctgacctccgagcttgtttcctcaatggaacgtcaaaacttgagtaaacttccatgtccgtccgatcacgattcctagacgaactaggttcgccgaaaaccgccgcttgtctccgcatctcaattctccgacgacgacgttcacggcatttagtcggagaaacgtcgtctccacgtccggttgaaattgttctgtagatttcagtcatcttttcaaaattcgtttcggtggatcaagagagcaccgctttatatacatggggccgagagaaagagagaacactttgaacataaagaagcttacgaggaagacagaacacgtgtcggtgtttcgatgtattcgcgtgttaggctcaggtgttaagttgttgtccacgtggagacgccttcggtttttgttaaaccgcatccggttttgggttcatgacgatagtcgtttagctaggctcttgtgtcttaactcctttcttcttctccttgcttgaatttgaacccatgagccggagctgatctctcaaaccatgtgaactacaaggatcaggctggttctggactaattcatcaaatattatagaaaatgaaaaactcatgatatacgaaatattgcatcttgtttccttttgctttcaatatgaaaacattaatgtcaaaacaatgactataaatgtaacaatattgaaaaggtttatatcaattttcttatttttaaaaagaattaaattttgaaaaccatctttttgaaaagtgaaaacaaacaatttctactatattaaatctggaataacatttactgatcgttccaaatctcgagtagtattttctataaaacctgaacggtaagtatacttaaaccaaatcatgggattaaccataacgttggagatatcttcggagaaaaaggttgacgaatcgtcaatcgtcacaaatcactctttttcggtgcaacacatgtcacatagtgatcatctacaacttgtcgattcc

SEQ ID NO: 9512 - DNA, 1778 bp, Arabidopsis thaliana landsberg
aacccaatcccagagaaatatggtttgattaatacctaaccaaatcaatatcttctccaaaatacaattacacagaaatttcacaacccaatgaaattacccagattaagctgaaatctagggtttcaagccccaaatcatcaaaagctcacatactaatttgccgattaaagggatagatcctaaatgtgaaagaaaaactcagagatcctagggttccaatcgatcctaaagagaaagagaagagtaaatagtttacctgattcgagtgaaggaatcgttaggaagaagcgacggagagagatggatgaagaaaaggttcaaactttgttcttcgccaatggcctctgaggcaaaaaggaaagattggaaagtctcgagggtatattataaagattgggaaatagttggaaccgccctttagcttttgttattttacatttatatcctccaaattttgtgtatttcatcatttttagttttgtcacataattcggctgggcctggctgcgttgagagggatttgggctgggcctggctgagtagttaatatgtgtttttcttttttactgctgtaatcatccatcatcaaatagtaactgaaacaaaaaaaactccagataaaaaacaaacaaaactgcgcattagcttaatttaaatttagttagttttgtgttatcttcatgacaaataataaaatgaaataaaaactcataacttgttatgattaacctccaattaacaattttaattagctcgaatattctcctcttaatccttcccgccacattcctctccgcataactataactaaattgcagttaattcagtttttcaccagttcatcacacactaatcgtaattaacactataacaaaaaaaaaaataatccatatttaagaacatcactatgcatccccacaattcaataaactcaaatcaatttcacaaaattttccaataagccaatttaatttcttaaaataaaaaaatggcatcaagttgttgtggggattacgtggcggcggcgtcaccggagatgtcgacagtgatgggatcagaatcaatcgtgttgagacttctttgcgtcgtctttattatcctcttctacggttctattattctcctctgtttcgtaatgtacccgaagctaccaaaggaagaaatcggcgatgaggaagccggagagccattacctcccgccgtgagactcacgaaatgcggcggtggagacggcggagacggtgacggagttaaagctgacgtgtgtgtgatttgtttggaggattttaaagtaaacgacgtcgttagagttcttgtgagatgcaagcacgtgtttcacgtggattgtatagattcgtggtgtttttataagctgacgtgtccgatttgtagagctccgtttcaatggtttggtggtgattggtagagggagaagagagcacgtttagggtttaatgttcggtacgatccggtttaatcccactttcgatatttttactgtctttgggattcagaaatttaagaggcgatcttaaagatttctctccgggtattcaaaactgcgatgtatgtgtacatatttataggaatggacactaccgattactggtttttttgtaacactataccgatcatggtttggttttcaaaatttgcggatatctaaatttatgttatcaatctttataagatcaaattattgaatcacactttagggcatgttaataatttattaattttttagccctttgatattattgcaaactttgaggata

SEQ ID NO: 9513 - DNA, 1086 bp, Arabidopsis thaliana landsberg
tggtttgttttttgccaaatctatctttactgagttattattccaattatcaggtcggtttggactctcaatggagagtgtgaaagcttccaagcaaatatggtggtatctggtgtcaaatagtgtttctttattatcttctgcccatagatcttaaacgtaaaagcatccaaagatgcattaattaacgataacatggggatgaggtccatgtgcctctgcaacacctcttatgcaatcacattctcttgcttccctaagttactgctgccaacattgaaagaaacacaaagtgcagtgattttaataatcaaatattatgttaagacgtaagagcaagctgattgatggctataaatagaaatgtccgcatagtgtttgtttggtgtgatcagagtgagaatgggtcgtctttcatcaactctctgcctcacgtttctgattttggccacagttgcatttggtgtacctcctaaaaagtccattaatgttccatttgggaggaactacttccccacttgggcttttgatcacattaagtatctcaatggtggttctgaagtgcatcttgtcctcgacaagtacactggtgagtttctctgccttgtatatttctctgacacagttttattatctaagcccttcttctgactgttcttgttcaatgagcaaaggcactggctttcagtccaaaggttcctacttgtttggccacttcagtatgcacataaagatggttgctggtgactctgctggaactgtgaccgccttctatgtaagcgaaagtcgttactcaatcattcggaacatcttcttaagtgctaactgaaagttgtatcttgctttttcgtgcagttgtcgtcccagaactcagaacatgatgagatagactttgagtttctagggaacagaactggccagccttacattttgcagactaacgtgtttacaggaggcgccggaaaccgtgagcaacgaatcaacctctggtttgatccttccaaggacaaacattccaaatcagttctttggaacatgtatcagattgtgtaagttcgcattcctcaagtataatcctttactcaa

SEQ ID NO: 9514 - DNA, 894 bp, Arabidopsis thaliana landsberg
ctcctcctgacttgaccatcgagcgcagtcatcgtcaccgccatcttctcttcgtctatctctgttctctccttaaactcttcctccttcccatcttcatatataatgaatgatcaccaaacacattcatttcttactatactaaataaaccctactttttccatattaaaacaaatcatttgtaatgtggataccatgaatgcagcgcactgactagtgattgatatgtggatactcatgaatgcagcacatgtactctcttcctaacggattgatattatttaggactttttacacaaaaagaaaaagaaacactgattagtgtttacttattttaaatacattatttactctcaataaaaaatattatataattatggaccaataaccattcataaattaaaatattttcaatgagaatttttttatgtttacaaattattaacatagaattaattaaagacatttagaaaatcagtttttgtagaacaaaaaggtttagaaaatgatgttttaggaataaatggaatagttatacatatatgagataatgagtagaaatacgaaccaagattgtacttccatgtcttgatggagccgtgagagtcccaatcgccctcgtggaggatgacaccttggatgaggtggccgatagtgtcagggatgcgatgggtctcgctactccacaacttgtagtgtttctccgccgatcccttcagaggcacgtccgtcatgtatgttcccgacatcgccattgatgatttaattaggtttcgactacttttttgttgtgtgtctcgggtgttttaattctttttaaataatgcaattactttcgtcaagctttcctttatatacgcaagatcaacaccaaactacattaacaacctgac

SEQ ID NO: 9515 - DNA, 1675 bp, Arabidopsis thaliana landsberg
cagcttatcaatcatagccttgcatctgacatcatctaaggtttgtcttgacttttaaggactcttgaggaaaggaattcgccgatttgctgatttggtttcagcaagaatttgcacattgtctgaacaagctgggtgtcgatcgacaggagctgggtgtcagtcgacaccatcgggaatagtttcctcctcctccacaaaattgtcgattccactcgacaaaggaaaaacagagtcgtcaagagtagtgttgattgacaccctggtgtatcgatcgacattgattcgttttctgcaattggaaaagttgaaggctaagctgatcgtttgcgttgaagtattgggttgacctgctttccgctgcgtagtgtgactacattgatagaagctgaagtaggtgagagattggagaattgggagcgtagagtgtcaatcttgctattgagatctatggagagagaatcatatttggtatcaagctttgtttggcctgcaagaatttgcgcaagcatagactacattctggtctctgatgagggtggaggggggcttggataggagcagaaattgttgaaacgggagtctctttgctcgtggtggctatctcagctgaaattcttcgttctttatcaaatccctgcgttgaaagacaagttaaagcattggtgatgagaagtaatgcttcactagtagttcttgtcatgaagttacagtagctcgctgcatcaagttgattccggtttggcttgtctgttcctttgtagaatatgttgatgagttggcctctcttggaagccatgttggggacattcacgctaataagacctgaaacagagccaagatgctctaagggactcgactggagcctgagtgaaagaagagatttgtaaacgaattgcctctgtcacggattcatcgaagaagtgattcatgaatggattctctgtatcagtccaattggttagtgaacctggttctagttgacgcaaccatgatgttcctctggtcgctagagagtgggggaagagtttgcaaagaaggtaatcagctggtacaccttctgctttgatagaggatactatgactttgaagactttcaaatgatctaatggtgattcatcgagagctcctctaaactttcctcttcatacaagatcataataggcagggtgtacagcaatgtcttttcttttaaatggaggtagcttgaatgctgattggttggtgtagaaaagatcagttctgttaaagtcgcctattctagctgtctggttctgcagagggtgtcgatcaacaccttgatggtgtcggtcgacactatcgtgattgtctgtcatttaaacgtgattctcaatctgaaggtacctgaaaaacaagagaccaaaagataaagaaacacgtgaataggtgataaaaaagaagtatctagacttaaaacgacacctagtctaatggtgacctaaaggagaacttcgacaacggcgccaaatttgatatctctcaaattgccttaagcttactccctcaaataagagattgtcgttagcacttaagggtcgaattccactgagctagctctttatgttcacacaatagacttaagatgtttttaaataagctagacaaagtaaatgaatgtaaaagacaaataagcaagtaaacgagttgtagatcg

SEQ ID NO: 9516 - DNA, 1190 bp, Arabidopsis thaliana landsberg
ttgatgtcttttctatttcgtcgaaaatctatctattttacggcagagacttgaaacccgaattttgacatatcaaaaacactaacacaatcccatgtactacattatcatttgtattttacttatagaagaaaataactttttatttaaaaattgtatggtaaaaataaagattagttccctaataactatataaaaaatcttattcggtcgttttagctgtatttaacttttaaacctaagaaagaaaaaaatcaatcaaccaaggaagtagtacaacaacaagagtcaaaacccaacaactctctatctagcacaaaagcctgacttttacaaagacaagccttttcaacacactactgatcttgagaatcctctcttcaaagccatggcgttagaactatggcaaactctcaaagaagcaatccatgcttacacaggtctttctcctgttgtcttcttcactgctctagctctcgccttcgccatttaccaagtcatctcaggctggtttgcctcgccgttcgatgatgttaaccgacatcagagagctagatccttggctcaagaggaggagccaccgattcctcagcctgttcaagtcggtgagatcacggaggaggagcttaaacagtacgatggctctgatcctcaaaagccccttcttatggctatcaaacatcagatctatgatgttacacaaagcaggtgaaatttctgaatctaaaaagcgaaattaggttatgggtttgattcattgtttcctctaatcttgttttagcgtataaagacttggactttgcatacttttatgatctataaagctgtgagaatcgtaaagttgttcactttgagaatcaatttcacaaaggagttttgttttgagaatcaatttcagaaaagcacattggaaaagttgatcctttttgttacttttatacaagagaaagattcaaaggaatatgtttttgttgttgatgtttgctagtgattgagatcatgttgtgaaatatcttagctctatcttcgagtataatcaatctcttagactggttttagtgtctcaagtgttgtgtttgtaatgaaaggttggatttttattgtcttcctcaaatctcgttttactctataacaacttggactttgcatagttttatctatgaagctgtgatatccataaagttggtcac

SEQ ID NO: 9517 - DNA, 1350 bp, Arabidopsis thaliana landsberg
ccccattaacacctcctccggggtcggtttctttatagaacaaccgtctcttcctctactcagggatgatgggttagttctcactacatctcatcgcgatccattttctgatttctatagagcttagtgtcggtggaactagatcggtaccggaatgaatgaatgctcccaatgattgattgattgtccatagatcctaaatccaacaatgaatttatgtccctggcggcatttaactggggactggttgcagggtccgtatgtgtactatctctacagcacttatggcttcggaaagggagagatcggtcagcttctttattgctggttttggatcttccatgctgtttggcaccattgttggatctcttgccgacaaacagtcagcatttcttcttctgaattatacttcacctattgtttgtttggatcttcttcaatgactctgtaacttactttcttaattaggggtcgcaagagagcttctatcacctactgtatcacctacattctcagctgtatcaccaaacattctccccagtacaaagttttgatggtcggtcgtgttcttggtggtatcgctacttctctccttttctctgcctttgaatcctggctcgtcgctgagcacaacaagagaggctttgagcagcagtggctttctgtcactttctccaaggctattttccttggtaatggattagtcgccatcattgctggcctctttggcaattaccttgtcgattctctctccctcggtcctgttgctcctttcgatgctgctgcttgcttccttgctattggtatggccgttattatctcatcttggtccgaaaactatggagatccatctgaaaacaaagaccttcttacccagttcaagaacgctgcatctgccattgcttctggtgaatctcttaccttaccttggtttttgacatactgtaatatgtctttgcttccagctttattcttccactaaccacctttttattgaatcagatgagaagatcgcattactcggtgctattcagtctctgtttgaagggtccatgtacacctttgtgtttctctggactcctgctttgagcccaaacgaagaggacattccacatggtttcatatttgcaacattcatgctggcttcgatgcttggtagctccattgcctctcgtttgttggcacattcgtctccaaaagtagagagctatatgcagatcgtatttgtgatatcttctgctgctctaatgcttcctgttgtaacaagcgtatgctctctgacttgatatctctcactggagactctccatcttaaaggagtcgtgctcgatataacgtatcgactttcaa

SEQ ID NO: 9518 - DNA, 1976 bp, Arabidopsis thaliana landsberg
aaactaaatccctcgttaaaaggaagtaacattgaaatcgacagaaacacatttgaagaaaagataacttacgtttaagaaacgaagtcacgcgaatgaagcgaaaactggtttcagtctgaactctgaagcttttgcttgggaatgactttaatggagagatcaagaaatacaaaaagacgttgaggcacttagacgctttttatacgcaaatagagttttcctttttttttttttacaaatttccttttttcagtcactacaattttttcgttttcacaaaagtcgaaagaaataattaaagtaatatatacagatgtatgtttgtgttcagtcgctaaaaggagttatgtattaaccatatattaatttactttttgtcaacgaccataaattataatttactatactttacttgtaatgaataaagttataaagttttctatccattttgaaaatcatcatcagattggaccagaatttatatttttcgtacttggttctatcatgtaaatgtttgcaaaggcccaacaaaaatatatgacgatggatagtaataaattacatatagtcatcatcattatccatatcgcaccacatttggaacattaaattctctctattattcagagagattatcacagcaaagaaaaacaccaagtctcattttattcttcttaataataatagatctttctttcttttcgacaacatcattcagagtttggtttttctaaaagataggaccagcagcgagaatctcctccgtaagcttaccatccacaccaatcttgtggttagcaaaaacctcgaagttcttcttgaacagacctcccagtttcaccagagtatctttgtgtgccttcttatcagaccactgcattttcattaaaacccaaatcaacaaaaaattgttcattatcacttagcatttacattatacaggtttgcagaaacttacggagttgacggggtccaagatctctgaaggtatcccttcgatctcagttgggatttcaaatccaaagatttcggttttcttgtagtttgccttcaagagactgcccgaatggattgcatcgatgatctttctagtgtatgccagcttgattctgtttccaacaccataactgcaggaaataaaacattacagatcatgttaatagcctacaaacatgtgttacaaggcagcgttttgttgtatcgatttccatagaaggacatatatacctgccaccagaccaaccagtgttgacgagccaaccagtagcaccttgtgacttcatcttctcagctaacatagctgcatactttgtgggatgcaacattatgaaagctgcaccaaagcaagctgagaatgttgctgttggctccttgataccatcctctgtgccagcaacctaaatatgttgcacatctttggttatgcttttgaaatttatgaagatgatcagaagaaaaataaagactttttctttgggcttaccagagcagtgtaaccactgatgaagtggtacatggtttgtgccagattcagcttgctcacaggtgggagaacaccaaaggcatcacaagccagaagaatcacatttgtcgggtgtggaccaacacaaggtattttcgcatttggaatgaactcaattgggtaggcagcacgtgtgttctctgcaaccaaagagaatcgaaaatgatcattctgttaattgttaggacgaagagaatgaaagaaataacaattgttttacctgtaacagatttatcagagtaatccacttctctggtgtgctcatcaaacacaacattttccaaaactgcaacaagatcagaatcttattgttatatcactgctttatgtttttttcttaaaaacaattccaacgtactgtctttctacctgttccaaacttgatagcgtcccagatatcaggttcctttctcctcgaaggacaacacacttagcatagcacccaccctta

SEQ ID NO: 9519 - DNA, 711 bp, Arabidopsis thaliana landsberg
gatttattaacatttaattattaagaaaatggtaaggtcaagtaacgagttgcaaataatactaaaacttatgtggaagatcaaatgataactaaagtaaccaattgtgcataagcaaatcttcaataattaccctattaatttataaatcatatcatactatcaatgtaacctattaagtaataaagtatttgttttaaaaatcttactttaaaagtaatacacaagttgtcaaatactataaacagcaagcatataaagacaaattaaataaggtttgtgcatgtgttcttgtaataatgggtgtcaaaaatatgaaatggtaaccaagtccccatcccatattggtcatgatcatgtctcatccctatgacctgatcaaccagcaatagcgaccaaaattgtttgtttgcatgttgttagtttggtgactaattatatcaattgtcaccaacgattacaattttcaatcgatagaattatcagctattatcaacgattactggctgcgtttggtcgtgaaatccagatgaatccagcgacaagcaaacaaacaacataaagataaaataacaaacctgtgtttttctttttggaaaaagaatccattacttttagtattgggccaaagctttaacgatgggccaaagttgaacaattatcccactatgtgcaaccctaattcccttttgcaagattgaatgttggtga

SEQ ID NO: 9520 - DNA, 902 bp, Arabidopsis thaliana landsberg
gactaaacagtttttcattttttggggtagatatttagatttttggcttggtaatgggcttttgtggttcagattttaaatatgcacacatttgtataactattgtggccatagtatgtaaaatggcataatatcttataataatcatattagatatacataaatctattaatattgaattatgaaaaaaatgatacaatcaagtaacgagttgtagataatattaaaccttatgtgaaagatcaaatgataactaagaaattcaattgtgcataaaaaaatcctcaataataaactggttattctataaatcatatcatactatctatgtaacctattagtaaataaagtatttgtttttaaaagtaatagacaatttgtaaagtacaataaacaactaagtagagaaagacaaactaaattaggtttatacattttgttcttgtaataacgttcttgtgattactcaaattcaacaaactcaacaactctcgaaagatacgaacctgtgagattatccaagcttgatccatatgcttggtgaaatttaaagaactctcaggtgaatccaccgccgaagccttgaaagtagtagtagtcggaaaacggcaaacgaccagtacaaaccctagtttcgttctactccgcaaattccatggattcataatcgatttttttacaagatgtgaatcgcaacacatgcaaatagccatttccttcttcttcttcttggccgaaaaggttgaattcggattttaatctactcgggcccctcgggttaaaacattctctatttagctcccattattaaaaaaaatatgtttatctagtttttttctccaaaaaatagtaaaagacaaataaaacaaggggtttttacttatttacgacccaaccattat

SEQ ID NO: 9521 - DNA, 1348 bp, Arabidopsis thaliana landsberg
  unsure (1)..(1348): unsure at all n locations
gacatcctggcgcttccagtgttggagaacttggctcttagtgaccttttgtttggaaaagttttaccccatgtcagaagcattgcatcaaatatccatgatgctgtgacaagaactgaaagaatcgttgcttctttgtctggagtgtggacaggaccaagcgtcacacgaacccacaggtaaatgatttaacaatcaaatctgaaattttactttctcacacatgaaggtttctcatggttcattgtagcgaagcattgtagttgcatcttgtgatgttgcatattgtttacctttacaatttacagtccatctgcatgaaaagttaaaagcttattttccaagtgcacgaaagcaagtaaagtaaagctgtcgaatcgggactaagatgtttaaattacataattttatcttgcaaaatctgggcaattctttcaaaattaggagtattggtcaggctatggtctttatgtttctttttttggaatctcattcgtcttagaccaatcaatttcattgtttatcttcatttggttcacatgatatctgcatctcatatttggacgttatgttgaacctttgccttgatacatactaaaatattttatttgactttgcagtcgtccgctgcaacctcttgtggattgtactctgacacttcgaagaattctcgagaaaaggcttgcctcaggactggacgatgcggaaaccactggtctcgcccgcagactaaagagaatactagtcgagctccatgaacatgaccacgccagggaaattgtcagaacattcaatcttaaggaggcagtttgaccaaaagtttattgatgggaaactggaaagtcaacacagaaatctttagcctcaggttatcaggctcacctttcggactgtaccagcaaaggctcatcgatttcaacatcgaggattacaagattttccctaggattttacatttcaagatgtattaggctagcaccaaaaccttccggaatccattttcagacacagaagagttttagtactttggcttattgtaagtgtaacctcttgtgcttgtagaaaaccttataataaatataagctaaagtatctcgagtctttttttttccctttatatctgtatgagtttagatttagctaagacaatataatttctatgaatataagccccaacttgtattgctgtgctgcactatagatgcagttaatttgtattacgagctgtgtcatggttttttgcaaaagacaatttctgttggaatcagacgtcttctgctgtaaacaacacaacttgngatcntagtcaagaaacagagaagaaaccccctttgaaagaatctactgt

SEQ ID NO: 9522 - DNA, 815 bp, Arabidopsis thaliana landsberg
gtggaccacactaattggctgacgtctttattcttagtttttaagtaagacaacattacatcaccacaacatttatgcaaacatacaagaaagttagtcttttccttttcaacgaaagccaaaacttcaaagttattgatcaacaaacttcatagcaattatgtaaacgagtcatatatgtaatcaagtgaaatttcgaatgtaaccatttaaataaaatccaaggttcagcagtgtattgcatattctttttttacaaacagaaacagcaattttttacagttggggttaaaacttattaccatgaatgtgattgaaaaaaaaaagtcttgtaattggacagaggatttgggttttgtttggtttagtaaggtgcaatgatagattctatgagttcttgaagaggagcgagttctttcttgtcaatgagaacaaactcctgcaaaacaaaaccagaccaataaaaatcaaaaatcaacaaactcagtgactgataaaagactagaatggaagattaatgatgagtaaaagagggtttatagatacatgagtgaagaggatgaagtgtttgaagcaagtgttgagatgagcttcctctttgagactaactattttctggaaatgagagtggtatatgtgtgcgtaaactcggaatagtcgtttaaagattgtcttcaccacttccttgaagtttggaggaaaagctgcacctgtcagaatttaccatggattgagaccaatgtctttttatccataatcatcaaagatatgccagagtaaggttattttaccaagtttttaggaaatatggtctc

SEQ ID NO: 9523 - DNA, 1131 bp, Arabidopsis thaliana landsberg
atcacccataagagggaatggcttgaagattttgatgaagaagcaggaggttcagttcgaatgggaaacaagactatctcacgagtcaaaggagttggtacagtcaggattgtgaatgacaatggtctcactgtaacattacagaatgtgagatacattccggatatggatcgaaatttgttatctttgggaacttttgaaaaggcgggtcataagtttgaatcataaaatggtatgttgagaattaaagcaggtgaacaagttctgttggagggaagaaggtatgatacgctctacatactccatccgaagcctgcaactgatgaatcacttgcagtagctaaagcaaatgatgacactgtgttatggcatagaaggctatgtcatatgagtcagaaaaacatgagcttgctggttaagaaaagatttcttgataagaagaaggtgtcaatgcttgatacgtgtgaagactgcatctatggaagagctaagaagattggtttcaacttggctcatcatgacactaaagagaagcttgagtatgttcattctgacctgtggggagcacctatagtaccaatgtcattagggaactgccaatactttatatcattcattgatgaccatacaaggaaggtatgggtgtatttcctgaaaacaaatgatgaagcctttgagaagtttgtaagttggatcagtttggtgaagaaccaaagtggtaacagagttaaactctgagaacagacaacggtttagagttctgtaaccgaatgtttaatgggttttgcacagagagaggtatcaagaggcatagaacctgtgcatacacgccacaacaaaacgaagttgttgaacgcatgaacagaactatcatggagaaagtgagaagtatgctatgtgactcatgactgcctataagattttgggctgaagctacacatactgcagtgctactcatcaataagactccttgctctgcgattaactttgagtttccggacaagagatgatctggaaaagcaccaatatacagctacttgagaaggtacggctatgttacattcgttcatactgatgatgagaagttgaatccgagggcaaagaagggagtccttattggatatccaagtg

SEQ ID NO: 9524 - DNA, 1883 bp, Arabidopsis thaliana landsberg
tgttcggaattaggagatcgatttaaatttttacaaagcaaaagggtgtgtgtggtccgattaatattttagtatatgagaaaaagaaaggatgtgatctaaattatagattcagaaggtccattcaaaaagtacagtcttttatgtgtaggttttaagttttttcattattcttaaacgaacaaatgatagattaattttattctgttttttgttgtgcgcactagtaagtttatactctatagcattagatagaaaacagagtaacatgtcaaaacaacatccaaaatctaaaatcagtattagtcgaaaggcctaattcgatattcggtagtatattttaccgtctatgtttagatatataatctgttgttgactggaattcgaatgctaaattactaaacctgaccagaaaaatatcaggagaaaatgaacttggatatgacatccatcaacttgtcccaattggtccaaagtctccatctttaaatacaagacacaaccattaaccgtttttgcccatactaactcaaattccgttatcttcattttatttgatttaaactataaaatatacaacacaaaaattgtattaaaaaaagaaagaaacgatgaatgaatcaacaagtcttctagaaacacttatcttcaaatatctataaagcggcacactctcctctttcctatcatcatcatcatcttcttcaaccttgtctcgatccaaaatttcatcttttaccaaaactattacaatatccctgactctacttgtaaagcttcaatcttcttcacttctcaacaaacagataaacaaaaagcttcaatctttgatactttctcgatggaacttatccccaatcttcccgacgacgttgctcgcgagtgtctccttcgctcctcctaccaacagttccctgtcatcgcctccgtttgcagagcctggaaccgtgaagtctctctctctcagtttttacatcagcgaaaagcttcacgccatagccaagagcttcttattctgtctcaggctcgtgtcgaccccgctggatccggaaagatcatcgctacgcctgaataccggatctctgttctcgaatccgggtcgggtctttggacggagcttcctccgattcctggtcaaaccaaaggacttcctctgttctgcagattggtttccgttggatccgatcttattgtcttgggtgggcttgacccgattacgtggcaggcccatgattcggtattcgtcttcagttttctcacttccaaatggcgcgtgggggcaaccatgccaggtgtacggaggtccttcttcggatgcgcttcggattcggatcggacggtgctggttgcgggtggacacaacgaagagaaatgtgcgcttacgtcagctatggtgtatgacgtgtcagaagacaagtggacgttttcgccggatatggcgcgggaacgagacgagtgcaaagcggtattccatgctggcagattccacgtcatcggtggatatgccactgaggaacaggggcagtttagtaaaacagccgaatcgttcgatgtgtctacgtgggagtggggtccacttacggaggacttcctcgacgacaccggcgataccgttagccctccgacctgcgccgccggtggggatttgtacgcgtgctggggtggcgatgtgatgatgtttctaaatgacaagtggcaaaaggtgggccagatccctgctgatgtgtacaatgttacttacgtagcggtgaggcctgggaagctgattgtgatcggcaacgggaaggcgttggctggatacggtgaagccaccgtagggaatatatgtgatttaagtagctcacgatgggtaaaattggaaacacacggtggtcatgttcaag

SEQ ID NO: 9525 - DNA, 1468 bp, Arabidopsis thaliana landsberg
ccggtttacctatgtcacaaaaaggaccatccatgtcatatttttttttaaatttttaaaaagtcaagttgttttaaatatacttgagatgcaaagaaagatccgaatcatatatccgaagattccgaaaccaaaggcggatccgacggctccaagctgccatattcccttgttactctaccactaaattaagccccacataaaacaataaagacacgaaatataaatacctaagcaaaactataggaaccgaaaaaaaaaaaaagaataattccagcatcattcctcaagtaatttaaaaacaattattaaaagaagcaacttggtcttccatttttttgctacaaaaaaattaaaaccccaaaagaacttaaaatcttttacataaagatcaccaaccagccacatagaaaacacaaccatcggtcttcttattattctttcttcaacaccaaatagtcatgatgaaagtggtgtcacctcgtacacggtcggattcaatcactgagaaggtgtttcgacgagtctatagcaattttaacatctcaacagtagaagatgagtatatccatcgtcagagatcaagtgattatgagaaggagagtcgtctaaggaagagagggttagaagaaaaagaagaagttatggagatggaacagatgggagcagagaggatcaaaactgttcttattctcatgagtgataccggcggtggcccccgtgcttcagccgaggccatccgcgacgctttcaagatcgaattcggagatgactatcgggtaaaaatattaatatttttatttatatcttcattttcattgtctttgccttgaatccaacgcatagggttgagccaataatatgcttcctaaaccatataacgtacaaaaaaacgaaaaaagattgcataagcaacaaaacttaatcatacttttatcttttagtttctgtgtaaaacaacaacaatattttgaaatattcattttgaaattttcaaagctggtaaatatatatatacctcgaaaaatatgtatttatattatgacaaaattttccaatagattatgttataatatatcatagaggagtttctgattctaatgaaatctcagccgtcaatattaaagttgtcgcagtagtcgtcttgaatttgaaaacgaaaagaaacaaatatctacttggaagttttgtagcctagtatgaatcttggagtttgccagggtgtcggagatacgagctgacgtcaacaatctatgtcttaaaacctgtcccacgttccatttattttgtttgtcaataatgattaaaaatttgcattatttatttctgtagctctgactctttgatgttacaattttccctctaggaactaatgtcattttttttataactatagataatcataaaagatgtttggaaagaatacactggatggccactgagggacatgtagagaaaatacaagttc

SEQ ID NO: 9526 - DNA, 499 bp, Arabidopsis thaliana landsberg
aaccatatacactaaatgcagtacatgagtaatcaacatttaaaaatagaggcattacaacatgacataatcaaggaaatgattcacacaagcagtgaagtaacaagaatagatagtagacttttgaaccattacttcacttacaccagtgataacacaaatgggtctagaagatccattttgtggattgatggagccagatatgggagtagatttggagctaaagatccttgctttaagcaattgaaagtaagaagaaacaagaccaatattccaaaacagaaccatcctccagaattcagatgaacagacaaaacacaaaaccttctttacctctctcatcatcttctgtaaaaaaaacctcaaagattgttttgtattttaattatcagaattcagttgagcaattagcatcaatggatactactttaatatatcagagaaaactaacctgagtccaaaaatgaatagggaatggcaaagacttgaaaccaaactc

SEQ ID NO: 9527 - DNA, 1335 bp, Arabidopsis thaliana landsberg
acaggtatgagtatgcagtcgattttacaaaattacactcacacactcacgctaactgttagaacatgcagtggccagatgtcataacaacctaaaattacttttcttcttttaatcttttaagttgaactaaggacatggaagtgacacctataagattgcagttggaagggagaagatcactaactccaaaaaagatagttaagtaaaagcgtaacataccacataatttaagaagagtgaaggttgttgcggcaatgaagaaaaccatagatatggaaacccagaaatgctacaaaaccattagacaatgtcagagacaacctgcagagacaagttaaaagagaaatataagggatcatattttaaacttgtcgagctttgattacaggaagtgtttcccatatggcttcatcactcatagtttcttcatctccaggcatgagcgtcctgcacattctgcaggaatagttgcaaaaaagatttaattgttccgtactctaagagtagtaagaagggtgaacaaaatcaaaaaagctttgaatggaatacctgacattatctatcaaaattgctacctcaaatgcaagcaacggtagaaagacaatctttaagtcaacaactgcaaacagaggagcacaaccaaagcctataataaacccaccaatcatacatgccgtgattcaatgaatagaagtcatggaaaataccatatttatcttcaagatgtacacagagaaggatctcaaaagcaacaagaagtggtgttgccataaccgagtgaaaaggagcccactgccacaagaccaagttaggacttaaacacaacaaagaatcaaaggttcaaaatgaaacaagagaatcataaaaatgccatacatgtcgatcatgaggcattgatggagcaggcaatgaaaatctaccacgagcaatcacagcatgaaacaaccacaagggtgcaaatacaaacctgtaaaacagacaaaacaacacatacttaaaaaagagtgaaagctatccacatcaaagtcttaacctttaaggatggtattgaagatactacttctactttatacatcaccaaagattcaaagtgatataacctaagaaagagtttaactttaagacaaaaaaaatccaattttacaagaagagaacttgcatcattgagaatccaatcgatcaattcaaacattttacaatacaaaacagaagtcaagccaccaaagacagtaactgttagaagataaagacaaaaactggccaccatgaatgagaaacaacatgatcaaagctctaagctagaagaagcgtgaaggagaagagtaaacaatg

SEQ ID NO: 9528 - DNA, 1543 bp, Arabidopsis thaliana landsberg
actgaataaaaacctactttggtacatggcacgtggaaacacacgtgcctttaataaactcttgccaaagttcgtaaaaaagaaagatatttgcactggaaaaaataaagttgaatattttccataatcatcttaaccaaaaacctgaggaatattcactaactatgttgtcagggaacaaactcttgtgtctttattttgacacaagagaacaaaccttttttcttgaccaaaaaccatcgaaccttttgtcttgcactaaggcaatgatattaatttcaggattgtgcacttcggtccaaaatagtaactactaggacgcttatattgacgactcatcatcgggcatgtatttcttctacaaaacaaaacactaaataaaacagagccatagtgtcattaataatcttctctcgctttctctctttactttaattctgaagaaggatgatgttaccagaagcatgcgtggcgactatcctctcatttacaactccggctgacacaatctcgtcggcggctgtctcatcagttttccgagtcgccggagactctgactttgtgtgggagaagtttttaccgaccgattactgccacgtcatctctagatcgactgatcctcaccgaattttctcttctaaaaaggagctttatcgatgtctctgtgaatcaattctcatcgataatggcagaaaggtctgtgatctttatctctgtctctgcatgtgaaccaattcttggtttaatgttaaaattcatttcagattttcaagatcgagaagctttcagggaaaatatcgtatattttgtcgtcaagagatctttccataacttggagcgatcaaagacattactggtcttggagcccacgatcagattcaaggtcgttattaatttaatcatatcattggtgtaacagtgtaagcaataatttttgtttcaatattttgattataggttttccgaaggagtccaacttataatgacagattggttagaaatcatcggaaaaatccaaaccggagctttatcgccgaacacaaactacggagcttatctgattatgaaagtaacgtcacgtgcctatggactagacctagttccggcagagacatcgataaaagtgggaaatggtgaaaagaaaataaagtcaacttatctaagttgcttggataacaagaaacaacaaatggaacgtgtgttttacggacaaagagaacagaggatggcgacgcatgaggttgtccgaagtcatcggagggagccagaggtgagagacgatgggtggatggagatagagctgggagagttcgagacaggatcaggagaaggtgatgacgacaaggaggttgttatgagtctgactgaagttaaaggttatcaattgaagggtggaattgccattgatgggattgaagtaaggcctaaacccctaaaagtgagggccgggaccaactaaaagatgagtgccaaattttgtgtttaccggataatgtgtttggttttgggtaaaaaaaatggtaggatgaggaaaactgttttt

SEQ ID NO: 9529 - DNA, 656 bp, Arabidopsis thaliana landsberg
cagaacaaaatttccgcaaatgcattaattttcaacctttaaattaatcgttcaaattgtttaataacgcttgagacggcaatcgcctacttccgcaaattcatatagtcataatcggagtttcagcgtttaaaccacgagtttggccttagatcaaaaaaaaccttacttttaaaccacgagtttggccttagatcaaagaaaaccttacttatagtcaaccctaatccatgataccaaatggagaaaaaaaaagaaagaaaaaatggaaatttcccaaattaacacacccataactcaaacttgtctcaaacctcagattatataattaggctaaaatctgataaaccaaaaaatgtatcagagtgagtgctaaagagaactttgtgttgacctctctttccctcctaattccttagggttcctcgatttttctttttcaccgaaacaaaaaccttattcctccttctctttctctgtctatctttctctgtacgttttattcactttcctccacgtggatttgcataaaagcatgaaaatttgttgatgggtttctcttcgacatccagattctagcttccaattccgtaattctccgttaaaaaaccctaatttcacgaatttactctgatctgtgtagaaattagggagtg

SEQ ID NO: 9530 - DNA, 1043 bp, Arabidopsis thaliana landsberg
gaccattatcttacgcatcaggttataagctcattcattgcttagaaagaatcagtctttttcctcgggttttgtttaaattatggaagttgattatacccaggttgtgtacaatgcaaacgatttggcagcattagtagagcagaagaagagcacacagaactggcttgactattaccaattgaagtatacaaggaaccaggaacataagccgaggataaaggtaactgagtggtcttagacacaaacttaaagaagcttgtcttgtatctaatctgtttcatgttgtgttctttgggaaactagacgggttttctcgggctatggggaaagaaagttgacgcaatcgatcattatatagctgaaatcgagaaattaaacgagcaagtaagtatcatttcttcctacaacggtttctcagttggaaataatcaaacttgacttatcttttcggtttcttgattagataatggaggagaggaaaaaagtgaagaaagatgatacaagtgtaatgccagccgcttttgtctcgtttaaaacacggtggggtgctgcggtttgtgcacagactcaacagtcgagtgatccgactgaatggttaactgaatgggctcccgaggcacgagaagtgttttggtcgaaccttgcaataccttatgtctctttaacagtaagaagacttataatgcacattgcattcttcttcctcactttcttcttcatgattccaatagcctttgttcaatcccttgcaagcatcgaaggcattgagaaaaatgctcctttcctgaaatccatcatcgagaagtaatgtttctgtctcttactctctccattgtattgcctacttatatgaattagatgttgaatttgctatgttttgcagcgatcttttcaaatcggttatccaaggttttcttccgggtatcgtgttaaagctctttctaatatttctgccaagcattttgatggtaatgtcgaagttcgaagggtttgtatcgttatcatcgttagagagaagagcggcttttagatattatatc

SEQ ID NO: 9531 - DNA, 432 bp, Arabidopsis thaliana landsberg
  unsure (1)..(432): unsure at all n locations
gaacagcttgattctttcctaaaacaatccgcaaaggagtaagttcccttttctctttctctgtctccattggaacagatatagatccttgagcttatgtattgttgcacttgtcacttgttaggattcctaagacggttggggtagcgataccgataaaagcaacgttttttatctcatatataatggtggacggttgggctggtattgcaggggagattctgaggctgaaacctcttatctttttccatataaagaactccttattggtgaaaaccgaaaaggatagagaagaagcaatgaacccgggacagatcaattatcatgcgacagagcctcggattcaactctacttcctcctcggncttgtctacgctcctgtgacttcagttctactccctttcaatatcatcttcttgcaatggcttacct

SEQ ID NO: 9532 - DNA, 956 bp, Arabidopsis thaliana landsberg
agtcactctagaggatccctgataacaaatccgagtaaagtcaacaatttccttcgaaaatttatgagtattctgctgcctattttctcacacccaccaatcatattgtatgtcccttgaatccaagtaatagctatgaagaataaacaaaagtagaaaaaataataaaaaacaatttaattacacaacatgagatccattcaatctattagtaacttgttattagattatagtaaccactttctgtctcttgttctaccaaaacaaaacgcttcatcatgagctctaacaacaaaactgatgattccgacgaccgttctttctggcaaaactcgacttcttacgatgccagcagcaagattttcctcgtcaccaccgtttccttctctattattatcatcatcgtgttcgtttattatctctacgcaaaattcgttctccaccgtagatcagccttccaagacctctccttctctgtcgtttctcagccgccaaaacgtggcctcgattctctagtcatcgcttctctcccaacgttcgtggttggaatcaagaatgacgtggcgggtacggaatgtgcggtttgtctaagcttattggaggagaaagataatgcaaggatgttaccgaactgcaaacacgtgttccacgtgtcttgcgttgacacgtggctcaccacgcagtccacttgtcccgtttgtcgaactgaagccgagccaagtcatccaaggcttgagcctgagcctagggaagggccagttggcgactttgcaccgccgttagatttcgcgggggttgataacaaaaccggcggatcatcggtttcgaggttagactcgttccggaggattttgacaagggaaagatcttcgaacaggcgggatcattctcgcgttgaccaagatcgtgaattggatattgaaagacagtgaattcagtatatagtatatacacac

SEQ ID NO: 9533 - DNA, 1102 bp, Arabidopsis thaliana landsberg
cgttgtttactggtgttggagctaacatggtttcttggttcactttaccgccaaattcatttttttctggagcctcgggagctgttttcgggttatttgtgatcagtgtccttgtcaaggtagtactctagttctcttctctccttgtttcaagtgcttgtaaatctatcatcaggacttcttttaaaactgttttgttagatgtctcggggttggagcaaatttcttgaagttcttatattgggtcagtttgttatgaagagggtaagagtctctcaacatttacacacatcatcattgtggttatagtcttatttcttactgggaattatgtaacaagtggtgatgtgtttcagttcattgattctcataggtatctgaagcagttcagacttcaactggattattagaaactaaattttgtggatttatatttggtggcaatgaattcctgacaattattcagactgttagacccgttgcgcagttctcgggtgctcttcttggtgttctcttagtttggcttctcagcaaatttcccttagagcaataattgaatgcaaagacaggctctaaacctatctgtgagtattacttctttcgaagcagaattgtgtcactggtttgtgtatgtttactgcttattaagagttttatttctttctccaaatctatgagtctgcagttattgaaaacagcaactgtacaatactttttcttatatacaagactattctgttgtaatttacacatagtgagagttctcaaagtattgactctcaaatttcaacagaagaatagaaaaaccaaatctctggcttcagttttgtcctttcagctcaagaacactgtacaagaatgtacaaactgtccactgatcccaaactgtgcttgggactgcttctggcatatgattggcactcgagctccgagtttacaagcagaaagattcatcgcttttgcggttggaagctcccgtttcccgactggaatctgcaataggttaaaactactaccagaggactgtttttggtacagcttctctaactttgcgatctctatgtctttacatttcaatgcattgatagctttgttcgactca

SEQ ID NO: 9534 - DNA, 1240 bp, Arabidopsis thaliana landsberg
aagtggaaattcatatctcagttcagatacgggaacaagggtgagttctgaaacacagtatgaactacttttgaatttctttctggaggctctttttgttatcttgatgtgtttcagctgttttgcagtttctattcctcacaggtgggattgttttcctaactttggttgttaatggatccactacccaattgctcttgcaccttcttcgcatggacactttaacggccactaaggtcagtatgttaatcctatattctcttgtgctgctacttttcaaatctaaaaagcaaagacaggatatatgggtagataatggaacctctgatcatccgtctttatacatgcacaaatgactgcatccttctgcagttgtgggtatattagcttaggtttgtgcgttttacaaaccgagaataggtagttagagattgggaatcaacctgcttcagaatctgtcaccgatccttctaatgtatatacacgcacaatctttgcaactaatgcttcagaaatataatgataatgctcctctttttctattgacagaaacgaatattggagtatacaaagtttgaaatgatgaagactgctttaaaagcttttgaaaatcttggagatgacgaggagcttggatctgctgactggcctacagttataagacatatttcaagcttgaaagatttagaagggagacaagttaatcctcacgatgggtacgaagctggaagtcttgaccctacgaatataatggacatacgtatacgcttcttaaatggtatttcacaatgcgtagtaaattcttctcattgtcaaactagtgtcgttccaaaagtagctattgattcgagactcttgcctgtatcaggtgtccaggcagcttactgggagatgcttgatgatgggagaataacacaatgtactgctaatgttttgatgcaatcagtagatgaggcacttgaccttgtttctaccagttctttaagcgactggaggggtttagaaccgcgtgttcatttcccaaattactacaagtttcttcagtcaaaaattatcccccacaagttagtcacgcatttgatcgttgaaagactggaatctgcttgttacatttcttctgcatttctccgtgcccataggattgcgcgacagcaattgcatatctttctaggtatgcatcactctgttctgttaaataatatctctatgttaaattcgtttgagactctgcaataagctc

SEQ ID NO: 9535 - DNA, 1336 bp, Arabidopsis thaliana landsberg
agactatatttaacacttggcggctcccgctcatatatccattatccaagacgatattttgaaatgaagtttaagaattgagaacttatcccgtctaaagtaattagggagcaactacttctcatgccggtaaacaaatcaaaagaaaaaattggaattaaaaggaaaaagtgaacaacgtaaaaagtaaaatcaagttttgtttggtaaaaagttaaaatcaagtttttaaccgttggtccggcccggtccgtggcagaagctcataaagctagggctttagggaatcagatgttataaagaaatttaggggcatgattttctgaattgttcaataggtctagtggttaagcttgaattttctctactaacaagtcatgagttcaaggccactatatgcattcttttcaaacaatttttttttcttttcattggggcatcaattatttggcttgctttaggcagcccattcattcgggccggcacgttggtcatcttacgtaggcatttggatgtgaagattcatcaaaactttgccttgatcacacattacctcttgcctggatcacacattagcaccggactttccgtgctactcttcttctccatctccactgttagttgtaaagaacggtgtcagaaattttttgtccaatgacgtagtgcttcaaagttttgttaagtgagacccaagaaatgcaacagacactttataccgaggacacgtactaagcctaagcggctaagcctttctcgtacttttaccttttgtggaaactctttcagcttcagaagatgacgtatatatcatcttcaaaaacacaaaattatataagcttcaatcttcaacacatgtatatttgacttcaagttcttaataattgaaaattgcaatgaatttaaataaaattctatttgatgtttgctcctactctaaaaatccgtgaaaattatttttggggcttattaactcataaatatataagtatatataaaaaaaactcataaatatatataaaagtcacacaaaaaaaaaaaccatcgtttggagcaatgaatttatctaatgaaattattctattctacaatttctattgtgaattgattgtgtttgagaaagactaaacgctatcacgtaatttgtgttgcattttcaacaaaaaaatatccaattaaatcggatattaacattaccaatttcacttttataggcttatgttattacttttcactttccagtgttaatttcatcagctaatataaccaaaaattaataaacatgaactcagaaaatgagtagtatcataaaattcgtcagctataaaaggcacaagtt

SEQ ID NO: 9536 - DNA, 737 bp, Arabidopsis thaliana landsberg
aagtgtgatgtgttaagggcggaccgactttacaatattagttacgttatacagcccacaaaacaattttgtctttttctcttaagtgtttcggttttatatataacacaagtttcgcaagctattacaacagtggaaaactccatttctagaactcgacaacctaattagtattacaatattggattatctaacgacgattgataatcctcttttcatatacttaaaagttaacatcttcgtcgtaatctttaagttctttttcacatttagaactacaatcttggctgctttcattagaactggtatccattactcgaaaaaaacagatcaaaataataagaaactaatagaagaggaaaaccaacataaaattttaaaaaaaaaacagaatactaaaagcagtaccggcccaaatgtatgggctgcataaaccaagccagataattgatgttccaataaataaaaaaaattgtttgaaaagaatgcatatagtgggtttgaaccaatgacttgttaatagagagaatctttttgccttacatgaatgatgcctaactacataagacctgaccagaaaatcctaaattgacaatgattatggaactttttttttactaattaattcttttttttttttgaatgaatgttaaattatattcaccaaaaaaaccgtttgatacatcaagtgcaacagttcaaaaagaataaaaacaaggtcgcgacatgacaaagat

SEQ ID NO: 9537 - DNA, 842 bp, Arabidopsis thaliana landsberg
cacactcacacaggatgagtctcataatcaaattgataaactaaactaaaacgacacgtgaagtcttgaacagccaataaaattctaccgacataaggcaaaaatgatcgtaccattacacgtaatccacgtggtctcagattacacgtggcaccacacaagtatctccatttggcctataaatataaacccttaagcccacatatcttctcatcatcactaacaaaacacacatcaaaaacgattttacaagaaaaaaatatcagaaaaaatgtcagagaccaacaagaatgccttccaagccggtcaggccgctggcaaagctgaggtactctttctctcttagaacagagtactgatagattgttcaagttataactcattgaaaacagttgaaacttgatcactgctagaacttccattttcttgtttaatttagtttgtcgtaatttgtgttgaccatggttgttatataggagaagagcaatgttctgctggacaaggccaaggatgctgctgctgcagctggagcttccgcgcaacaggtaaacgatctatacacacattatgacatttatgtaaagaatgaaaagtcttcttagagcatacatttacgcagatttctgatattttcatatggtttgatgtaaatgttataggcgggaaagagtatatcggatgcggcagtgggaggtgttacttcgtgaaggacaagaccggcctgaacaagtagcgatccgagtcaactttgggagtctatattcccttttctaattaattgttgggatttcaaataacatttgggagcataattgattctcgtctcatcgtacttgttgttg

SEQ ID NO: 9538 - DNA, 1138 bp, Arabidopsis thaliana landsberg
ttttttcaaaaaaaaaaggtttttttttttttcttgttcttggcaaataagagctcgaaatgtttgccgaacgcatatgcaacaaacccccgttacataattctggtttacagccatagagcaaggctatattgttaaagccttaaaaaagatctttactatgacatatacaggcttcgagatatttctaaaggctcaacttatatataaataacctcaaaaagaagacacggaggcgagaggatcatactctcacacagaaatagtcacattattatatcctctaaaaaaccaaactaaaacgacacgtgaagtcttgatcagccgataaatagctaccgacataaggcaaaactgatcgtaccatcaaatgtaatccacgtggttttagattactcgtggcaccacgactccctttagcctataaatataaaccattaagcccacatctcttctcatcatcactaaccaaaacacacttcaaaaacgattttacaagaaaaaaatatctgaaaaaatgtcagagaccaacaagaatgccttccaagccggtcagaccgctggcaaagctgaggtactactctttctctctttgacagaactcttaaactggaaaaattgttgaagctataactctttgaaaacagttgaaacttgatcattactagaaatttcagttacttgtttaatttagtttgtcgtaattatgtaattgatgattttatggttacaatggttgtcatgtaggagaagagcaatgttctgctggacaaggccaaggatgctgcagctggtgctggagctggagcacaacaggtaaacaatccatacacagacacataacatataatatgtaacgaaataaacgtctttgtaagcttacatgtacgcagatttctgatatggttatgtatatgttataggcgggaaagagtgtatcggatgcggcagcgggaggtgttaacttcgtgaaggacaagaccggcctgaacaagtagcgattcgggtcaaatttgggagttataatttcccttttctaattaactgttgggattttcaaataaacgatctttgatcaagaattgcttatatatatatataaatatattgcaaaattattagacgagccaaacttata

SEQ ID NO: 9539 - DNA, 288 bp, Arabidopsis thaliana landsberg
  unsure (1)..(288): unsure at all n locations
ggggctgtacccatgacgacagaacgaacttgcataatataatttgtgataccagatctgcaaaatggggcattttcagagctttgggaaggcaaagcatcaaggactctctcgagaggtacatacaagtccaaatacacgaaaccatcttgcatgnnnnnnnnnnnnnnnnnnnnnnnnnnnnnnnnnnnnnnnnnnnnnnnnnnnnnnnnnnnnnnnnnnnnnnnnnnnnnnnnnnnnnnnnnnnnnnnnnnnnnnnnnnnnnnnnnnnnnnnnnnnnnnnnnnnn

SEQ ID NO: 9540 - DNA, 2064 bp, Arabidopsis thaliana landsberg
tcgggtgaaggctgtactctgtttctttcagaatgtttcaatcaaaagctataactttttctttagctctttccatgacaagagacctctagcttcatactttttataaaaattctctctttttctcagtttaatctcaagaaatggtttcaagatcgtattcaaatctgttggagttagcttcaggagactcaccaacgtttggacgcatgaaccgacaaatcccacgaatcatggccgttgctggaatcatgtcaaacatcgataatgactctaaagacactgatctgtctcctaaagatcgtatcatcattgtagccaatgaattacctatacgagctcagagaagggttgatggtaatggtagtggtagtagtagtagtagtacttgttgtagcaaaggttggaacttttcttgggatgagaattcacttcttctccaattgaaagatgggttaggagatgaagctattgaagttatctatgttggttgtttgaaagaagagattcctcttaatgagcaagaagaagtgtatcagattcttcttgagagtttcaagtgtgtgcctacgtttttgcctttggatttgtacactagctactaccatggattctgtaagcaacagctttggcctttgtttcattacatgttgccactttctcctgatcttggaggtaggtttgataggactttgtggcaagcttatgtctctgtgaacaagatttttgctgatagaattatggaggtgattaatcctgaggatgattttgtgtggatacatgattatcatttgatggttttgcctactttcttgaggaagaggtttaacagagtcaagcttggtttcttccttcatagtccatttccatcgtctgagatttacaaaactttgcctattcgtgaagagcttcttcgggctttgctaaactcggatttgatagggttccatacttttgactacgctaggcatttcttgtcttgttgtagtcgaatgcttggtcttacttatgaatctaagagaggatacattggacttgagtattatggtagaaccgtgagtatcaaaattctacctgttggaatccacatgggtcagcttcagtcggttttgagcttacccgagactgaaaggaaagtcggggaacttattgaacggtatggtcgaaaaggcaggacgatgctgcttggtgtggatgatatggacattttcaaagggattactttaaagctgttggctatggagcagctgcttatgcaacatcctgaatggcaagggaaggttgtgttggtgcagatagctaatccggcgagagggaaagggaaagatgttaaagagatgcaagctgagacgtattcaactgttaagcggattaatgaaacgtttgggagacccggttacgatcctatagtattgatcgatgcaccgttgaagttctatgaaagggttgcttattacgtagtagctgagtgttgtttggtgacagcggttagggatgggatgaatcttataccttatgagtacatagtttctcgtcaaggaaatgagaaactggacaaaattctgaagctggaggcgaataatcgtaacaagaaaagcatgctggtggtttctgagtttattggttgctctccatcgctaagcggagccattcgtgttaatccatggaatgttgatgcagtagctgatgcaatggatagtgcccttgaagtagctgaaccggagaagcagctaagacatgagaagcattacaagtatgtgagcacacatgatgttggctattgggctcgtagcttcctccaagatcttgagaggagttgtggtgagcatggacgaaggaggtgttggggaattgggtttggtctcagattcagagttgtggcactagaccagagcttcaggaagctgtcaatggaacacatagtatcagcttataagaggacaaagacacgggctatccttttagactatgatgatactttaatgccacaaggctcgatcgataaaaggccttcatcgaagtcaatcgacatattgaacaccttgtgtagggacgagggcaatc

SEQ ID NO: 9541 - DNA, 1469 bp, Arabidopsis thaliana landsberg
  unsure (1)..(1469): unsure at all n locations
aagaagaaaagactaaccgaaagctaatgtcactgaaatttcacgacgacgactgagatatcgtctgagcttttccttgcaacagcctcctctgcaaggtgctttgctgcagccttcgcatcttttattcccttgattgagtcaacggcttcttggtttgacatgacctatgagattttaaataatcagcgaccatacaagtaagttgttgaaaatagatattgatagatcaaaaccttccatagtccatcacttgctaggataagaaattctgcatcatcatcaattatctccaccgtaacatatggttctgaactcaaatgcatctttaaactcttatcaccaaatgcccttgccacagccagttgaccatcaactcgaggaacatcccctgaagtggttcaaaacaaatcaaaatcaaacatatgcgacatatatgatcagattatatatgtagaaatgtaattgattagataccaggaaagttagaaacgaatcctcctctgttctcgatttcatccttctccatgttcggctcatgatcaactgagagtggcttcgcaacaccattttggcaaataacagctcgagagtcaccaacattagcaaccaccagcttctggcaattgatcaatatcgcagtcacagcagtagaacctccttttcccaaatcatctgccttgtctagaatcgttgtatccgttatatagtaagctttctttatcgctttctcaggttcnnnnnnnnnnnnnnnnnncacaattaaaaacaaggacaacatcaagttcatattctcaagttaaaaaaaaaaacacttccgggtaaaactcaattacctctttcaagatgttctcaaacaaatgggagcacaagtagtccggaatctcgtggctaagatggccatcgaagatagcaaacagaccaagctcattatcatcaacttccttgaatttggcaaccacataatcttccatctcgtgaaaagctttccctttcaccaaatgaaaaccatgtgtgatctgcttcaacatcttgctcttacctttccctgaatctgcagatgaagcagatgcaccaagcccaactttctcctgctcacagagccgaaatttcaaattacaacagagacagaatcaacagccaatgttgaaacctaatatctagtatcgtatcggggatcaataacctaaattaaatttgtggtatcacaaattccaacaagtatatctagatctgacgttacagcttcacatagatttttcgctacgctctactatcaaatccaatttcgaatcgatctactcgaatttactggccatattctcgaaactatcgaattggaagcgattgttcaagcgacatggagagaagaaagaatcgattaccttgacgcattccttcatcttgtggaggatttctctaccggtcatggttggaaaatgaagacactatctatatatgtgtatgaa

SEQ ID NO: 9542 - DNA, 1094 bp, Arabidopsis thaliana landsberg
acatgactggcgacttcgttgaccccaaaaaagaagaagataggactcatgattctgaaaaggtaagttataaggagacatttatttaccgcttcataactctaatggtttatcatcttctttcttcaaaatcttcgaagatcgtgctgacaacaacttgaccagctcttgcttgatgtgagtcagaacaagctcgattacgtcttggctttgactgttgagaactttctggagcttcgtcttcagactattgtgttcaagtctggtatggctaagtctatatccatcactctcgtgtcctcatcacgcacaggcatatcaggtattcatgctcttcgattcatttgtgcttgtaaaattaacattttctctattcgaattttggactcaaggcgcatgagaacactcttggaagctagcacgggaaacatgaagacaaagggataagaaacaaggaatctataggagacaatggattgttggtggtgcagaagtaacgtgattgtcacgttaatgacacatcaactattgtgtctggtcattgatggtgtagtggattatggtgattaattaatctactgaggtgtgtgcttctgtgtaagttctacattatgcaggtgtataaaagatcaaaacttcaagtctagatccggatgtcaaaggttctacgaggcaagtcagtagaagatttcaagcttggctcaaggtggatattgtaagaatatgatccaacttgaagaagcgtcaagaggaaaaagcaatagggaagaataacaaaaagaggagaagtgttttatgctcaactgtatcaaatacactaaaaaagagccagagggttaattccttaaggaatgaagtggaagatgctgaaggagatagagtctctcaagatgtatcctaattggccacacgctcgttgacacgtgtgaagtcgttagggttttgggtaatcacgtaggttacgtactatgttttactataaaaaagaggctccgcttcttagttgaacgaagccgttttcgagcgcttcgattgttggtagagcgagagattgctatagagagataggctgttttatctttttacctttttcc

SEQ ID NO: 9543 - DNA, 1618 bp, Arabidopsis thaliana landsberg
attggtagttgctagctgccaaagtttaaagagattatccaatgaataacttatgaaaagaccaaaagaatcatgaaaatgatgaagcaggtctctaattgataatattgcaagtctctgagagaggccaataatgaatactcacatgtgtaaatattggtataacttttcaatgcattgaagatatctgaagtaaacacatagacaccacagtttatcaagtcactgacctgcattgagtagataatttaagctaaacaaatttcagagcctgtgaaggaattaagaaaacaggattgtttagcagataattacgaaagtctcgggcttctctgtataatgcaggagttctttagtatcaggatcagctatcaattcaccaaattggctagctgcttctgcagaaacctgaagtgaaaaagcgatattcatgtttatgtttgatctttatgtttgtttccttagtgacatctaaaataacatcaggataacgaaccttgattactagcatagttccaataccaccatatcttcgatgtgcgtctacgaaaagtagtgaagtacatcaaagtaagaaaatgaaaacgatgaagcagattagcgatttcaaagggagattaccaagtatgccttgaagagggaaagaacagcaaacatcacagttgaggaggaaaacatgtgactgttcaaagagacaagaaatggaagatcaatcaggaaaacaaatgactgatgaggcaggaactaaagttgggaatttcatcagaaatcaaaccggtttctcttccataattctatcacgaaagtaataaagagcaccagctgaaccatggggtttatcttctttcaagtatctatataacaagaacatcgttcaattctcgatttcacattacacaccaaaaaccaaaaacacaaatgctactacaacttaccgcactggaattttcagctcgttagatattgaagacacatacaaagcaaattctcgttcctcgtaaaatccaatcagaaaaatctgagccagatttgatatctgtccatgccaaatacaaaacaaatataatatgatcaatcatcattacaaagttgagaactttcccatcctttgagcctgaagaaactatgaaaagttcaaaactttgacactacaaatcatgcaacaacaagaaaatattccaaagtgtagagtactaaaatggaacaaacccacataaagacaaacgatccatgtcaaatcaaaacaagttatgagcaatccacatttcaaagttgacaactttcacgactcaagcaataccaaacttttctcagggatcaaaagcaagaaatagtaaaaagaagaaacctttttacaagcagagataggatgatgaatcataggttgaccagccaaaggaatcaatggtttcggtgtattgaacgataacgggcgaaatcgagttcttaaaccaatccacattagcaaaaacccaaaaccaaaatcaaaaattcatgttttgaaaatagaatttgagatccaaaagagaatgttatacctttggtcggaccaccaaccatgatcacagcgacgactttctcctccgacatgtcgagattcaataaaacctagattcgt

SEQ ID NO: 9544 - DNA, 1781 bp, Arabidopsis thaliana landsberg
tgtacatatataaaggacgttaataagaactttataaactcaaccattttagattttgactttggttttctatatatataaatacatatatcatccacaaaaacatatgacattcactcacatcagaatttcaaaaccgtaaagaaataccttccttttgaagtctttattctctccacgattgacgattaatggagatgaagaagtggagttatgcgaatttaataaccttagctttgttgtttctcttctttattattcttcttttggcatttcaaggttcggcttcgatcctcttgttattttttcttccatatctataatcatttacttgatagtgatggatccatatgatctatatatgcatttaggtggatcaagagacgacgatcatcagcatgttcatgtggccatcagaactaaggatatctccatgggacgaaaggtatatacaactcatacaaataatggctaaaccgaattaagacacaccaaccgcatattttgttcttaataatgatgtgtatacatacatacaagtaatttcatggaaagtgatatcgtgatatcttcactttcagttaaaaagtttgaaaccgatcaatcaacaaagaaaaacgggtttgagtatccggatcaaggatctcatgatgtacaagaaagagaagtatatgttgagctaagggactacgggcaacgaaagtacaaaccccccgtccataattaacggttgcgcgtagtacgtagtcattgataccgggcaaattatggttaatttactgtttaactttgtaaaataaacaaatgaataagtcatgttatgatgtttttattttgtataaggtaaatctcctcagtatgtgctggttttatttcatatcttttacgattatttttctattagaaatgtaaaagaaaaaaaaaacaaattgttcaaagctgattattcaatataaatcgttatcaactctacgtatacaaaccaaatttgaaataccattctatatagacatatattacgtatgaaactttttcttgcctctcagattaaaagatggactaaaaatgttgccataactcggattaaaagatggactaacaatccagtactaaaaatgatcccataacccggattaacagatggactatattataacaatgaagagaagtgtagtgttcattttcttatattcagctcagagacgtctttgaccaacgattccttgacggatatggggttggcgccatccatggagctggctggttgttggagttgcaattatcaagcattgactactctttgttttttagcggacacttgtttttatttctatagttccggttaattgatggaatttttaacagtaatgagtactgtttataatgatcattggcaagtagttgataatttggtgctatcatctaaaaatagacagatagatggaaaataacaattgctttttgactttctgtttttcaccgtagcatttaactaattttggagagaatatttcatcagtgaaaaaattagcactggtcattggacatccggtgattaaatataatatctttttcttcaaccaaatttatagcttttgactttaattttctatttctatatatacacacacatactaacatccaccaaaacagatgatattcactcacatagaaatttcataaccgtaaagaaatatatatcttccttttgggatctttcgggaagaataatttagagatgaagaagtggagtttatgcgaaagttaatgacctcagcttt

SEQ ID NO: 9545 - DNA, 664 bp, Arabidopsis thaliana landsberg
  unsure (1)..(664): unsure at all n locations
atctcnccgatgtggatagttgtatacatgtacaatcaaaccttagaaacattcaaagtacttatatgatacgatcagtcattggatacagtataaaaacatcataatagaacttttcgaacgttttatatatgttttacaaagttaatttacacttacttatcaatgacaatgacagccacgcagccgtcagttgtttttgaggggcttgcttctgggttttgggccttggtagtccctagccatcatatcgacaaatacttcttgtccagataaatcactagatacttgatctgaatactcaaacccgttcttctttttgggattgatcattttcaacgattcagtttttggtttcaaatcttttaactgcaagtgaaaataaatcatgacatcacaggataacacttgtatatatggatgcactgcattaagaacaaaatatgtaattactgaagtaatcataaagtactcgtagctgttatttgtgtaaattgtatatacctttcgtcccatcaagatatccttagttccgatggccacatgatcatatagatgattgtcacctcttgatccacctaaatgcatatatagatcatatcatatgcctccatcactatcacattaaacgttataataataataatgttttttaaaaaaaaag

SEQ ID NO: 9546 - DNA, 442 bp, Arabidopsis thaliana landsberg
tcttcatttacgagaacaccagacaaatgagacctatttgattgtatttttttccttctttgctcaggaccaatcaagcaaaccaatggttaccttcttgttcacgccaatggtggtttgaatcagatgagaactggtgtaagcctcttcttcttctctatgtttccacttccagtataagagattttctcgaatcctcacttcatttcttcttcacagatatgtgatatggtggcaatcgctaaaatcatgaacgcaactcttgttcttccgtttcttgaccattcatctttctggagtgatccaaggtacgtactaaccatcatcatcaatcaattcaccatcatcatcatcataatttaattaagctcccttttcagctcgttcaaggacattttcgactggaaacatttcataaaagtactagcagaagatgtcaata

SEQ ID NO: 9547 - DNA, 1689 bp, Arabidopsis thaliana landsberg
ttaactaactagaattgttcgtggtgtagacaaaacaagaatcttttaaatgttctaagcacaccaccacaaggagcaagcgatctctacttctcaacgcggttctcacaatcattgttaggacaattcaaatcttgtttgtggaagcagtggataacttactggagaactcctgactacaatctagcaagatttttctttacattggctgcagctgtcatgctcggatcaattttctggaaagttggcacaaaaaggtttgtttaattacttgaatcgaatacagaggcctcaaatctagtatcagagtccttacttatatctaaactctatacaactgttttcaaaaacagggaaaacgctaatgatcttacaaaggttattggagcaatgtatgctgctgttttattcgtgggcgtaaacaactcttcatctgtccaaccgctaatagccgtggaaagatctgtattctatagagaaagagctgctgaaatgtactctgctttaccttatgccctagcacaggtgagattaaactagaaacgttttagttacttgacaaacaagaaaccttaatgggtcgtaaagcagtctttaactaaaactttcccatggtttcaggtggtatgcgaaataccgtatgtgctgatccaaactacatattatacactaattatatacgccatgatgtgtttcgaatggacattggccaaattcttttggttttacttcgtatcatttatgtccttcctctacttcacatactatgggatgatgacagttgccctcaccccaaatcagcaagttgcagctgtttttgctggagctttctacggacttttcaacctcttttctggttttgtcattcctagaccggttagtgttggttacttttctggcaagaaagctgaaaccctaaatgattctctattgattctatcataagctggttttactttcctcttgcagagaattccgaaatggtggatatggtattactggatctgtccagtggcttggactgtgtatggattgattgtttcgcagtacggtgacgtggaggatacgattaaagttccgggtatggcaaatgatccgacgataaagtggtacattgaaaaccactatggatacgacgcagattttatgataccgattgctactgtgttagtgggctttactctcttttttgcgtttatgtttgcttttggcataagaacgctcaacttccaacaacgatagagtgtagttgcctgccggatatgtttggcgtgaagtagaaaaaaatgaaaaatgagggtttatgccatatagtttgtgattgatgctttattgattgtaagtaaagtgtacaatatatacaacacaatagattgtggggagaatttacaaggacaaatctaattataattaacttaagatctaaatttatgtatatcctaacagttatatccgttttgtacactattttaaaactttttacagatctaagataaacatagatttattttaagaatcaaattgtgaaaactctgcgtggaaaaaattaatcatgagtcatgacaatgatgagctagttaaggttccaagtgattgcaatcacattttgtgagcactaaagaacacatacacacactatatatatattcttgatcacctaacgagtgaatcaaaagagatgagtagttt

SEQ ID NO: 9548 - DNA, 1839 bp, Arabidopsis thaliana landsberg
aaggcaagtcttacagttgtaagcactgcaagacccatcttgctctctgtgatgatgtagtctctaaggtttgaatctgagctaaatcttaatttgggttattggaatttatctcctctgatgatcatatcatcatttggggtctcttttcactaggattgtgttttgaaaattgcataaattagatgatctaatttgattgccaaaatcatatactttttgatgatatctggaatctggatgatcatggatacattaatcatgatcagttaaaaaaaggagctagaattggggatatactgactgttctgcattctcattagatcaacttatgcttcaaacattgttagactctttctcagtgatactggattgcgattagatgctaaatgcaatcgattagtctaagtgcttatggttcagacattgtaagactctttctcctcttgtaatggtgaaaagatttgcaatgtctcttagtatttgtggcatatagaagatactaaagacattcctgcattctctttccgtataatgatataattggtggttaagctgtgttagatgctgctatatgcaatcgattagtgcttatggttcacttcaatacattggaacactctctcctcatttgatttggagtgtgtggtgtttcttgctttttttacatggctccacaatttcattttgttatgaatctcttctacttggcttcacaatgtcttagtattgtggcatatgcaagatactgacaacatcttgtttgtctatttgtttacagtcttttcagtcccgacatgggaaagcttacctcttcagtaaggtgtaagttttcttctccaagtttgatctggtgttttttgctagccatatttgaagaaacccgaagatccttttgatggataggacgagctatgcattttcaccagttatggatttgtgtgaacagagtgaatgtgtatgctggcaagaaagaagataggatgatgatgacgggaatgcatacggtggtcgatatttactgtgtcaaatgcggctcttatgttggatggaaatatgtatgaaaacatcaaaatgtttattcttattcttcctctcttggtcttctgcattcggctcttgcttgctaatctaatctaaccaattattgttgttcaggagtttgcttttgagaagaatcaaaagtacaaggaaggaaaatctgttctcgaaaggttaatacccgattaatcataaccgctgatgtatcttctttgacagagatacttgagatgatgcatttgttcatattcttgacaggtacaaggtctggggtccagatgggaacaattattgggtggctcaagaagttgaagccggagacagcgattctgatgatgcttgattctcatcattcatatctgactcgtttattccccatatctctgtcattaatctttattcttttttcctcattttgtaaaccatctatcttacattagaacagcttccgagaccaattgtttggtcattgctgcaactaccttggacacataagttaaagatctcattatcttatttgcagcctaagtttagtttgtttccaaagttctttacttcatgaacaggtacagagtttaattatactaacaatctctgttttatgcggtttggttcaatttgatttgagcaaaatgggaaattaaaactttatttatccgagagaataatattatgggaaaaatgtaacaattatagattatatatttttttgggtatcatgtgatcaaaataaggagacacatgacaacactgatattgttaataatgctgcaaaatgctttcaagtggcttgagtta

SEQ ID NO: 9549 - DNA, 1162 bp, Arabidopsis thaliana landsberg
  unsure (1)..(1162): unsure at all n locations
aggcttttcatatgaccaaaacagagaatagataactgacccttagtgttgtttttacaggtaatgtagcttcctggtcaaatacagcgttggatttcagcaaaagatcaggtttcttaatgtagccacatcctccattgcctctaaacattccttgcattacccacaatgatcgtccaagtccctgcacaaggaaaagttcatatctcccaagtccctccattgaattcagtttgtcttacaactatatgtagctgtggatattaaaaggaaacctgcatattgaaagccaccatttgagctccatggctccaagcgatcagagggttatagtttgatgaagtaattctagttcctttcggataaacccgtagcaaattcctctgagtgaacctacattatttagtactccatgatcaacagagtttctaaagacacttggaaacagaaattgttcttttcgaaacatacctcacaatctgtttagcatatttttctgaggccttttcaagttgttcttcacttaagctaagccgtcttactttatcaggatccaccttcaaacattcagttattccgcctttcggtttcccagcctggattgcaatcagatgcttatattccggtggtgcattcttcttaatcttatcatcaccatcatcatcatcatcatcgtcatcgtcatcatcatcatcatcaccatcatcatctccgtttgaatcattctaaaacaaggacgaaagaaaaaacacatgaaaaccaatgagactaaatgaagatgatgtgttattacacaaaccttgtcaacacttctgtcccttcgaataaagcttggaacttctcttccccaaacttctttatcacccaaatcccttccttttttcaccaaatcatcatctgttgctgccttatattctttaggaggtttagttgagatcataatacgctttttcaaaaacgccggcgatggaaactccttcaaacattcccctgaaggaggagtaaacaacatttctccaaatatatctgtaaccatctaaacacacaacatctctaccatcaattactaaagccaaaaagttgtcacagaaatgcaaaagagtctacacacctcagcaactttagcttggagtttangagtaagatgatcttcaagaagtac

SEQ ID NO: 9550 - DNA, 541 bp, Arabidopsis thaliana landsberg
agagaaaatgagttgaactgagttaagatgaagatctttctaataccactgttgatgcaattgctcatcggtatatctatcagcctgtaacaccctccaattggcacctacgattattaacaagtttaaaacctcattgacaatgaatcataagaaacaatggacaaacaaaacaatcctcaccgcaggtttagctctcttgcttgtaagagggaacaggcgagtcccagcaccaccacctagtatgatagacgctacattcttagggtctgcattttgagttttcaacagaggttcctgaaaaatgattctttatatcagaataggacttggaagaaataaagctaccaagggacttaatttaagaaaagaagcttcaattcactaaaccagaaaattttgattgatgacagactctcctgcccaaccaaaccttaaaagccttattagccagccctcactaaactgctcaaccaactcacaatagctaccatctgctacattaagtactaggctagttatagtagacctaaagctaaac

SEQ ID NO: 9551 - DNA, 3146 bp, Arabidopsis thaliana landsberg
  unsure (1)..(3146): unsure at all n locations
ttctttaaattcaccacattccaaggacgttggactggcctgtcttctagatcttttaacctgtaaacaccattctgaaccacttcgataacattgtaaggtccttcccaattaatgtcgagcttgcctgctccttcttctttcttatagtcaaaaacacgctttaagacgtaatcacctacaaagaaaggtctgcttttgatcttggaattgtaatatcaagttgctgcctgtttgtaattctgaattcggattaaagcttggtctcgcctctcgttgatggtatctaacgaatcatcgagcattgcagaattttcatcttcatttaggggagcctctattcggcgaagtcaggcacgttgagctcagctcgaacaactgcctgcatcccatacactaaagaaaacggagtttccccggtagaacgctaggagttgtgcggtaagcccataagacaggttgaagctcgtcgtaccatcctccctttagatgattcaagcgcttttttagattgcttaggattgtcttgtttgcggtttcggcttgaccatttccttgtggatatcgcggggtggaataactgactttgattctccaatccgaacagagaacttcgaattcgtgtgaaataaattgtggtccgttgtctgtnnncatctcgtatggaacaccatgccggcatatgatatttttccaaatgaaagtttttaccgctgaatccttgatgcttacatatgcctcggcctcaatccacttcgaaaagtaatcagttaagaccatgagatattgtacgcctcgagttgatctgtgcaatggtccaatgatatccatcgaccacctcataaacgggtacggggcggagatggaggaaaataattctgaaggctggtggattagaggtgattgaagttggcaacacttacaccgctgggcgtacttaacacaatccgtaatcatagtgggccaataatatctcattcttttaattttaaaagtcatggcccttcctgatgaatgactcccacacaaaccttcgtgtacttcgttcatgacaattttcctcttcgggcccaaagatgcataataagtaagggtcaatgccacctcgcctatacaatgcgtcctttgacaaacaaaatttcgcgctaacgattctcattttcctggcttgccacttattttttgggagctcgcctgtcacaatgtactgctttattggctccctcaaatcagccctccaatctttagccagaatttggtcgatctcgtgaaatattcatagttctggttcgggatgctcatttggctcaaggatatcttcctcgattagtggctcggttcttataattgtttctggaactgcatcttctgtcggattgatgggctcctcgctactattttcttttgacacgccgggcccgggtatggttgaaccatttgactttcttcatttgacaggtggcaactctatctcgggttcaccgcgatcacgtatagcagctttgaaatgacgagggcttctttttttctctttaatgcttactctgaaatacattccaccgggatgactcttttaaccttaggatccgatgttgatgctaaagcagcaagtgcatccgtagtcatattttctccacgaggtatgcgaatgagttcgaactttttgaagcttttagtcagatctttaactacattgagatatgcttccattcttgaatctttggcttcataatctccattgaacattgaactggttaacaactagttgcgaatcacaataagcgactactacttcggctccaattccttgtgctagcctaagtcctgcgattaaagcttcatattctgcctcgtcgttagtagcgttaaataaaatcggaatgcttgttcaagaatttccaatgttggagattcgaaatttattcccactccggacccttcttttgatgaagatccgtctacatgcaatttccaagtttgactctccggttgctctagtgcgccaagtactgataattcggtcaagaaatctgctaaaacttgggccttcatggcgactcggctcttttactctatattatactcacttaactccacttcccacttcgctaatattccggactgacttggactatgaagcattttttgaagtggctggttggttcaaacttcgatttgatgagactagaaatacgaacgcagcttctgggcagaggttacaaccgcaagtgtgagattttccatcattgtatatctggtttctggatctgtcatgtagtaaattggtttttgttctccacgatcctcccgtatcaagactccgcttactgcatggtttgatacagaaacgtataagtcgagcttttcatccacttcgggtttggacaatacgggtggtgtggttaggtacgccttaagctgtccaaatgcctcttcacacttctcatcccaaagaaatcctttgtttccctttagaaattgatagaagggtaaagatttatttgttgatcttgaaataaaacagtttaaagctacaatccgaccagttaaccgttgtacttcttcgaagttttttggagacggcatgttgagaaaggaattgatttgattcagattggcttcaattcctcttttcgtcacaatataaccaaggaattccccggtgcatttcgccgggttcagcttcattttgtattgattgagaatctcaaaacattcttctaaatgcttaacgtggtcctttttcttcaacgacttgtccaacatatcatctatgtaaacttccatcgtcttcccaagatattcgtggcacattttgttgaccaatcgttgataagtagctcctgcattttaaaaccaaaatgcattaccttataacaataaatatctctatcgttgataaatgatgtcttctcttgatcttcgggattcatcattatttgattataaccagagaaggcgtccatgaaagttagtaactcgttcccagtggttgattccacaagacgatctatatgcgaaagtgggaaactatccttcgggcaagctttattgaggtccgtaaagtcgatgcatacccaatcctaaccattcttctttttgaccacgacgttgtttgccatccaatccgggtattgcacatccct

SEQ ID NO: 9552 - DNA, 1297 bp, Arabidopsis thaliana landsberg
gcaaatacgtgaagccgacccctgtgcagcgtaatgcaattcccatattggctgcaggaagggattagatgttttgtgctcagacaggctctgggaagacagctgccttttgttttccgattattagtgggattatgaaggatcagcatatagagagaccacgtggagttcggggagtctatcctcttgctgtcattctctcaccaacaagggaattggcttgccaggtctgaataactggtataatatcatagtttatatgcatttgttgatcacatgaagatttcatgaaaagacatctcttttatgatttttctgcagatacatgatgaagccagaaagttctcctatcaaactggagtgaaagttgtggttgcttacggaggaacaccagtcaaccaacaggtttctgttactgttttataaatgcttcattttccacgccttatagactcttgtgtatgtgtgtgagagagagattacttgtgcttttccaggctgtaattatactttagttttttggtgcgccttgttaaattttgttctgacagttgctttagctcttagtttggatgatgaaatgtcctggctgttctttgctctgtaacataccattactcctctcctgtatatgtgggtttataataatgaacaattgtgtccttaagatgaaaagctgcaggaatcagctacatttcatgatagtaagtctagtgctcttgctaatttgttcttgttttgctgttgtacagattagggagcttgaaagaggagttgatattcttgttgcaactcctgggagattaaatgatttgcttgagagaggtagagtctcattacagatggtaagattcttggcacttgatgaggcggacagaatgctggacatgggttttgaaccacaaatcaggaagatcgttcagcagatggacatgcctcctcctggtgtccggcagacaatgttgttcagtgctacatttcctagggagatacaggtttgtggaactcgttcacatgccatttctatgttttctccttaccggagaagattctcagctatctctatcttcagtctttcttgctctgttagtgtcttcattggtatgggactacgttatttgggtcttttgggtctccagtacaattgttctgagaattattatcttttaaatcaacttggataaatctgaccgagcacttatccttaacttgggtaaatgatctgatatttgcatggagtgaggaaaaatatagcgggtcttattgtagtgatatgaaagaacaagaaagcgattca

SEQ ID NO: 9553 - DNA, 2340 bp, Arabidopsis thaliana landsberg
ttttttggtacttttttactttcatatctaattattagagcactgtgatcaaataaaattgtttctcttgtgtattcaagattctggttattttcttacacattaatagatacatccatttgaatatctccatctcctctgtatcaatctcaaatctctggccactttattggctaaactctgtgtatatatacaatatgatgctgataagacccgatttggcttttctgctttctcattcctgttataaaccaatgccatatgaatttgtgttggatcaattttcttgtgaatcaaatgcgaaaggtaataaagtaccttagagggatcaatggttgtagtagaactcgaagaggtctcaatgacagagtccgagattcttgcttctgatttctcgttcgagtaactgaaatcaagaaaagaagaagataccacagaaaagaaaacgatagatattagagacgttcttcgtcttctcaacccaagaatgtaacaagagagttaaaagaagattgatactcacgtcgaaagtatagtgacccaaataagctccacgcaatctacccagagaagtcgttgttctactgggaccaaaccgtatgtgatcaaatgagcaaatggccaaagcttccaacctgcctgcattcatatcaaagtatgtttaatcttgaatcttgaagatacagatgaaatacaggaaggacggctacttactgttagcataggcaagaacgtagcttttagttctttgaagatgctgataggcgattcgaaacgcaggaaaccaagaaccgtgaagtaaatactgttccatatagctgaccagactgtttgatcaaaggcaactttcacaggaaccacccaccaatcttgaaacgggaaaagctcttcacagaactggtaatagaaatgcgataacgagccatggagagtgaaacctactagtcctgatctcaatgttcttgctctatcaatttcaaacaacggtttgccttcgtaacactggacagaaagatcacaaatgttatcaaaacgattcaaattcatagcaacaggggaaagaagagaaacaaaacaaaacaaaaacctgagctatccaatctcctacagagtagacaactccactaatgaccattttcgctagaaccgggttttgctttagcgcttcttcgtaagcaatccagttatgttgaggagcatatcttagtatctcaaacagagtccatccctgagattgcaaaaccacaacaaacaagttcaaatactcatacaaatcaaatcaaacatagtactcaaataatattgtaaacagtgaagacgaataactcaaaaatatctaagtcacaatctttgtgatggaaaacaaaggagcatcagggaaagtcactcaagcaacatcaaagccacaatctttgtgatggaaacaagagagcaatagcactaatcactccaaaaaacatcaaagtcataatctttgtgatggaaacaagtgagcaatagcactaatcactcaagcaacatcaaagtcacaatctttatgattgaaacaataatgcaatagcactaattactgaagcaacatcaaattcaatacttacatgccaataatcatgatcgatggtaagcaatttggtaatagcgtaagaaccagcagctaaaacaatcgtagcgttaatggttcgatcgatcatcttctccatttcttcgttctctcttctcttttcatctcctaaatcagctcccgaagaagaagaagaaggaaacccttctaacgaaagctgaccttcactcgtcgcagcactaaaacctacaacaaccgattcattaccatcaaccgccgtctcagtgctcatcactaccaccgaaacttcctcatggtcggtccgatctcggctctgaaccggaatcaggtcgatttcgtcacggatcaatgcgcacgaaacgcaattcctctgtttgtttctcagtagaatttgggaacggtgaggttttagagatggtttggagagaggaaggaagctacgtggtgagattgaagtgtggagtgaagcagcagccatggcggagacagagttgactcggtggtgacgactcagagagtcagactcgcttcggtttctccgagttgggggaatttgaaacggacgttatcttatatttgtgtgagccgtgaagattccacacgtagcttatgtccgctacggttatattacggtgtttgaactaaatctaacggttgtgattcgttatttgacttatcaatatgtttgacttcgacgatgaacggctacgattaataaattctggaaagtttcggtgtgatcgagaagtcttgtttta

SEQ ID NO: 9554 - DNA, 1053 bp, Arabidopsis thaliana landsberg
actctcctatactcattgttgagtattatttagcccgctgattatatcacaactacatcggagattcgggattaactcttgtttgacctgatctgcgctctgtgtcccaccacaagatcaggatcatgtcttcttatattagatacagtccgatgatgtcctaattgattgattataatgaaaatatgtttctttttgttctttagtgaaccaagattatgcttgttttgtgttcaaatggttttgttctccttgggagatttgtgacatgacaaaatgtttgttttttgggtttggtctgaaacaggatggggtaccaacgagaagctgatcatatcaatactagctcacaggaacgcagcacaacgcagcttgatccgcagcgtttatgcagctacctacaatgaggatcttctcaaagcattagacaaagagctttctagcgactttgaggtatttttaactcttttctttctttctttcttttgggggtctctgaaatgatatagtgactgatttaggattgtgaaactgtagtatttggtgtttttttgtaacagagagctgtgatgttgtggactcttgattcaccagagagagatgcttatttggctaaagaatccaccaagatgttcaccaagaacaattgggttcttgttgaaatcgcttgcacaaggcctgctcttgagcttatcaaggtcaagcaagcttaccaagctcgatacaagaaatcaatcgaggaagatgtcgcgcaacacacatctggtgaccttcgtaaggtaatcattcaataaaccaaatcttgcttgtttgttttgtatttgggacacatgtttctgacatatttgtgcgtcctcttttgtatagctcttgcttcctcttgtgagcactttcaggtatgaaggagatgatgtgaacatgatgcttgcaagatctgaagctaagatacttcacgagaaggtctcatagaaatcttacagtgacgatgacttcatcagaatcttgacaacaagaagcaaagcacagctcggtgcaacactcaaccactacaac

SEQ ID NO: 9555 - DNA, 779 bp, Arabidopsis thaliana landsberg
tcgctcatttctgccttcccttacgaaatccccaacgaaaaatcttagcttaacaccatcgcgaccggattccaaattccggcccatcgtctcaccgggaaagaccccgcctattgccgccgatttcggttccggtctgctcagatctaatcgagtggcttccttcttcctccagatctcttcactttgaatcggttactcgatctcgattcgcggagggcttttgctagtcgcgatggaggcgatcgatgagttgtctcagctctcagattcgatgaagcaggcggcgtctctcctcgccgacgaagatcccgacgaaacctcttcttccaagcgccctgccactttcctcaacgtcgttgccttgggaaatgtggtgagttcctcgctctcactccacgctcctcgattttcctctctttaggctcgtgctggttttattctgtgttcgagtgtatgttggattgccatatcgtggatcttctggatctagattaggtttttatcgaattttgctaggacacactcatcgtttatagctagttttgttgggattctctttattagtggatatatggttacatgaggagcgactcgtgccggagaaggctgatgtattttgttatttgttacttatctctttttgcatactgaaccagggagctggaaagtctgcagttctaaacagtctaattgggcatccagtgctggtaagttgtacattgagtctatggttattattggcttactccttttcttatactaatactgacctctgt

SEQ ID NO: 9556 - DNA, 1365 bp, Arabidopsis thaliana landsberg
aatgagaatataaaaaacaaaggaacatgactgaaaacatatagaagatcttgacaccttagttgtttgtgtatttctgagaagtgattagtgaattgagcacccttgtctttcattcttatgagacttgatagctgcatgaattaagcggaaaggatttgttttgaatcagatatgaaaggaagtacatggaggaacttaggaacaaagcagagagtaaagatgaagaagctaagaagagtccagggcttggaaggacagaatcagctgaaaagaacagaatatctactgcatcgtctgagcaagatctcgatacattcctgctgggagatctagaagacagtgacgaagctcctggtgagacaccttgacttgatgtagcttcccaagttttagctatgacttaaatcctgattttgtctgtataatcgtaaaacttgcagatgatggtgatggtgatgatggaggaagcctgggtgatgatgactttgacaagattggcaactctgtaagtgaaaacgtttgattattctctcagttctttaaaacatacaacaacagaacatcttggtttaatccaaatctgccttcatgtgtttgcaggatgttgaggaagagaaagaatcaaatgcagcaaaaaattagaaatattattaagttttgttacatacccaattgttgggaagtaaatgaggatggtatatgatctgtttcatcatcagtgattcagtgtatagcttttgatgcaaaagatgaagacacattttattcattcgaattcgcaaattataaaaaaacagactttgattacaaaattatcctaaaaagcgaaactttgacataaatattagtcgctggagaggttaaagtttgctaatggcagtaacatatcttctccggcgttacaagccggcgacaatatcatcagttttgtctttctcgacgaaatgttttgtgggcgaacatcatcactctctgttccaacggaagctcctccggttccaaagaagatcccattcgcaatctcatctcatgggatcacaagacaagatcctttccattggatgaagaatacggacgacaccgatttcgtcgacttcctcaagcgtgagaactcatactctcaagctttcatggctgacacagaaaccctgaggcgtgatttagtctccgagatgaaaactcgtattccagaagagattttcactcctcctgagcgttggggacaatggttcatctctctaatcttgtaactttctctgatacgagtataaaggagtgagctttttgattgatttagtttaaaatgtctattgagcaggttatatagacaatacatacccaaaggaaaagagtatcctctct

SEQ ID NO: 9557 - DNA, 1991 bp, Arabidopsis thaliana landsberg
gtttatgtcaccattcacagtctatatatgtattcacacatatacatgtttttagcatatgatcagcatggaattgagatttgatgagacaagcaataattggtctattactctatagtctctatgtagagatatttgttagtagtgtaaattaaaacgtgaaagcttcctcatgtgtgatggcccataggtgatcatgtccatcattttgtggttgaaactactcacatggactgatggactcacatatatccccaatatggcacgatatattttatacatatacattatttttgttggcaaattttatacataaacatttatatgcccgaattattaaacatttcaaactaaaaaatggtcgccggaaaagaagttcagtttttcaactttgaaaaattatatttggatttcaaaatttcggactagttttgtgtcgctcaaacacattcctacaaaaaaaaattgttatttaatattgatgtaaagaaaactagtttttcttacaatttttcacattttagagttccccaatttttttaaccaaatctaataaagttgctcggcccaaagttcgttaatcttgaaaaagcctatgtagaacaaaagttcatgattgaactggatcagaattggttcgaatgtcaccatacatatcaaaagggtattactgtaaaatacatatccacattagtagtttgttcggactgaacgtgagatgagtgtatgtttacatatccacgtaagtatttcgtagatatacattttgccctcatattactttaaatacatgtagaacaagaaaatcaaaatgcaagaatgtatagaaagtgccaaagtggtgggtgaaaccactggaaatcgaatatgtggttcatacattacgtgatacgtacacgttacacgttaattaagttatagcaaagtaaagataacggagctagttggtaattagtcgtgtaaaaggttaaacaacttctttaccaaaaaaaagaaaataaataaattaaatagcttatattctttgctgaaaaggatttaatgggctacttatattatattttggttcattcaaaatgcgtaagatatgccaagagtaattttgaatgaaccaaaatatagttaggaaaatacccaattagatgtacatggaatgggctacttatattgggccatagtgggcttatattacgccacaaactgaatattaattcacaattatgactaccgtgtgccacttaaattaaagacgcgaactgtaaaataatcctaggcgcacctagagcgcgtcaacgacacgaatacaaaacggctggactcgtccagagatttcgtcgtttttcagcaaaattaaaacaaaaggcgagtggagatttcaactttaacaatccgctgaaacgtttatgttttatgacttggcccaaacttcttctactcgagagaatatagctggaaattataacagttactatcaaagaaattgataagatttattgttctctttcaaatcttcacttcccttaagaattgttcaaacatgaacaaactaaacgagtgatcagagaatatcaggaattacaaatataataaaagctacgaaaaaactaatcaggatcatataataaaaactcaaaatgtggatcaccggatgcaagacggaggagaaatcttgccacctatccaaccgccaacattctcacacacagaggttgctggaccgtctctcccacggtgcactatgttaatgttgaagagctgaacgtttttgcaaggaacattcttgctacattgcaacttcactgcctacttggacgtcgacgttccccaaatgttttggaacttcacgtctcttatctgaatctttgaaaaagactacaataaaaagaagaaaatcaaattaggtcatgtcaaaaagactaaaaccttgtttcttgttaaggaagttacctgaaagctgacggaggatttgacagtatcgtgatctatgtgat

SEQ ID NO: 9558 - DNA, 1561 bp, Arabidopsis thaliana landsberg
agtttacctgatacgcaagttcgcgatttagcattaagtaataattgtgttccttcctaagaaaggccatcatagacctagccctgacttctcttggaggatttggagggttaattccgtgtgacctgccaacggaactcataatagtttctctaatcaaaactccttgcatgtattccctttcataaacaatacggttcttatcttgtccctcgctttggcctgagccagaaaaccgtgcagacttagatactggcccatgacatgtaaagtctcttggaggatcacaggtggtttcaccagctgaagttttcacagaaagactttgtgtcacagtgtttaaactccttagctcctcaacatttaccgatgcactgcgagaaagtacaaactttccagtgtcatcatattcaagagagcgacaccacttctttagagatggttgtttagttccagcaggataaaagactcccttcccgtcttttaggcctcgggaccaggtaccataatataaacatccatcagcaaacttataaactccagagccatgtctaaagccattcaaccaaaaaccgtcataaagatcaccgttttcccatctcataactcctctctcacacatcttaccctttttccagttccctatgtacctatttccattggtccaagaataactaccacgcccgtcttgtaatccttctttccacaaaccgtcatatagatctgagttacaatactctttcctgccaagcccatgccttacatttattctccaggctccgctgtagacagactcatcaggtgaggtcatggtgccaaaaccatgaaggtatccaccagagaaatctccctcatatttagctccagatgaccaaataagcttccctttaccagagattttgccttcatcccaatcaccctcgtagatagttccatctgaccatgcatactttcccttcccattaggaattattcctttcacttccccagaatagaaatcaccatttgggaattctctatctccagacctgaagatacacaaagtatcatttcactgaaggaggtaaaaatactaactttcaggaagattgattaacaataaaaaaaaacacctcatatccatctgggattagcttttggtgatcctagaacattgttccgcaacttacatatgatttgtaacctgtcctcttgtgcacatgatacaattttctgcataagctaagaaaaaacaacaagattcctaagataaaaatccattctttaactcaagtcatcacaatttgttatccacaagcatacagattatgaatcaaaaagtttccagagaatgaattaatgatgcagaagacgagagattctcctggagattccatcactcattttgactgaaaaaccagagcctaaacttgagggtcaactaaaataaggttcaagcaatagaagtttatcagtgatttgtctcaaatccagttttccccagaaaataaatagccattaaagtcagaaagcaacttagtagtcaaatatcagcattacgaagaaatagctattgcgaagc

SEQ ID NO: 9559 - DNA, 1828 bp, Arabidopsis thaliana landsberg
  unsure (1)..(1828): unsure at all n locations
gaatctgaaaacagaagctaatgccatcaatatcgaaaaataggaatataagagacttattttggaatcaaccttagaagcaatgagcgcaatcaactgcattaaaaattctcctagtccctttccttgaacccgggattccagctgtatttcatacacataaaggacaggtatctcttcctctaaaataaaccggtaatgcacaaatccagctatctgattacacccttccatgcaagttctttgagtagatgtctcataggctttaccaaaacgcagctcacgcacaaagatataatgtgcatcagcggaagacatctccttacgcttcacctttgcttgtataggccaatcagacccatagaacccttccatgttcgtctgtgaatggtaaaaaaatttgagtacaacaataaatctagaataaatttctaagaaagtatgttcagaaaatttaatgatacttcattctctttaataccttcaagagtttttgaatgtgatgtttcacagacgaggaaagtctatctccacggccagattccaggtacaaagataagtctacaagacgtaagaacaacacatacacagaattagctaaccatcaagactcttctgtgaacttaaaacgaaacaagtaagcactgaaaacaaaattcacacaaacattatcataactaactaacaactaatcagagcacacttgatcataggttaccaaagtctgcatgagtaagggattcacagataattaaatccatgttaaaaagcacgaattccaactaacactacatctacttcataatgtagtaacattaggaattgtaaaagtaagtttatatgcatcaaatcattgtcaatgataatcagttcgcataaacaaaatcccatatttttgagaaactggcgaaaataaaattgagcagaagaacaaatttaccgtttcttcggtaacggcggaaagaatcaaacggagaaagaggatcgtcaatggaagaagctctttttataaggtcatgaatcgtctttttcttctccaaaatctgcacgacaattctcaattatcgatttcgaacaaaatcaaagatcgaaatttcgagtgctatgaaacatacacattacttccgagattttttttacctttcgccgtttcttcaaatccattgctcgccacaccgatgattctcttccctctgtctcgttcgttctccacgtctgaagtgattcggtaggagacggatccatcaaacgggtttggacccgaaatagatccgacaataataaatgacgtcagcccaaatgtcgtattcgttcaaattcgatagagaagcccaactttctatatggactattagaggcctttttgttttgtttgctcaagtcaacgggtactatctcaaggaaaaaaaaagagtcaaaaactttgcaaaattgatttcactttgatatatggtataaaaattatcgaaaatgaacgcaaagacacaattaaacagagtttgcagtttctctctggcacaaaagatgattttaggtactaggagcttttctcttcttatcagaggcagatgaagcatcatcaagtttagactgaccaaatacagacctgcaaatttccaaaagcttttcgatattagtatcaaacaacatgatagattgttatcttgagaaagaacatgacgggtcaaannnnnnnnnnnnnnnnnnnnnatttcttgtgatgctcacagataatggacagactctctgagcatatgtagcccatatctattgtcttcatgtggcaaaagcacctgcaaattttgtacttaaaaaaatctgttatata

SEQ ID NO: 9560 - DNA, 1900 bp, Arabidopsis thaliana landsberg
  unsure (1)..(1900): unsure at all n locations
agactccaaattttaatttttaagctatttctctctctctctctttttagttttgtttgtattattttatcaagctctttttcttagttgaattatttttgtttaatataattattgctgatcggttttggttaataatgatacgaacgtagctcaaagattcgaaaactagttgtagtaatatgtgggttggttttgatcgttcgaaaacgtgtattacctctgtcactctgtgcaaacttgctcactttacacaaaaagttaattttggtgactgcgagaaggttttacattttggccaactatcaatttgcgaacaaaaccaaaacatgaagaatctttttgtacaagaatttcaaagaaaggtcaaaccagcgagttcttaactaatggctttgttaagattgatctaattacccaaataagtttaacatatgttacactaacttaaaatatgctttcatttaggaaaataataacttgactaaagtgctctgttttctttggtgcttatgttttttctgtgttctggtttcatgcaatttactctttacttgatgcttttattcttcaacccttatcagatcaaaaatatcaatccatttgcaagaaaacatggggaccagaatgtttcttaaaataacattttgatcagagtactttcaattacttaaatcccacacaatcaatcttcatgtattcaagcacgtggatagaaagcatgaatggccaaaccacacatttcttggggtgcatccacgtctctcttgatcctcatgaaaccattttccccccaagaattcttcaccatccaatacttacttccttcttcactcatttcataaccaacaattgtaaccgcatgatgcaaaatccgtcccacattctccgttgaatatccctgccgagtagtgcctaaacgcagctcctgtcccctctatccccatggaaacaggatgttgagacaccgcttgtaccaacgcttcctcattattcatttgccatgaattttgaaatatagttcaaaaaggcctacttggaattatcatattttttccccttactctatttgtcaacgcttgagtctaacttattggataaccagtacagttgtaaactttaaatatgcaaagctatgtatgattcatgagaagctttcgaatgtatatagaaaaatttgaatcattgagtggaatgtgaatacagaagtaatgtaaaaattatatcatttatattgaaattgtaaacaatttgatttcagctttggtacacaaaagcaaataaaattacaaaattgaaatcaaattaattacaatgtgaaagatgcatgtaattagctgacttgcttcatgtagacttcacaacaccttgtaaaagagactacacaacacccattacaagccttgcaaaataagaataccaacatccattttttttttttgcatatactgaaatatgttttggttacacataaacaattttaaagaaaataattgtatcatcaactgttcattaagtagaaaataatatttaatgtgaacatattcaaagataacttttgcatatcctagaatatatccaatgctttttctagttccgccattactacaaatatcattcacgacatcttccatttctctacgctatgttggacttagaacaatttcctaagatccgatcaaacgctatgttagacttagaataattttctaagatcttatcgaacgctatgttgaacttaggatgaataactcattcgcttgtagagaaaaatcacaacaaaacaatgtttctcctcttgaaaatatatctccgtattccaatgaataccaaaaacagagagggcgacgggaggggaagggaccaaactcctacatggctngtgacaaatagacaggga

SEQ ID NO: 9561 - DNA, 1135 bp, Arabidopsis thaliana landsberg
atgctggagtctgttccctccattgagaaaagaatgaggtcgtcatcacagaggttgataaacttcttcacaataagttttggatttcaatacaatcagcgataccctatcattaaaactcaaaagccagttctttatggatatgttacttttctcttctttcagttcaagcttgaacgcaaaagaggagaagaggccgtggattttaagagcaaaggaactttcaattcaagctggcaacaagcagacctctgaggagaacaatacactaccgcaaagactcatatatataagctgtggttgggaaagctttaaagaggtactagagacaaacactggtatcaaacaatgctgccgctttcgttcattctaactttgaaacaatggcttaggactgcaagtcgttattatctagcagagcgtgggagttggaaaaagcccatggcttcaacttctttcccggaaccgacaggtattatagaaacatttacttccattttatactgcacaaatattattcatgcttattttacaatttggttttcagcattgaagttttggccgtattcaaaagaagggttgcgagcaagaaaaagaagaaatcgggaataaaaaaagtgggaattaagaaagtgcgtgctaagtcacaggactcttattagttaatgtctgtaacacttgaacttcagaggtttaggagaccatctaatagatggaaacagttttgctctgttcctgttgataaggagatatgagtctctctttttgtgtcattgcaatatttatcttatcaacttctgttggatatgaagaaaaagtgcaaaactggacagatacatctttaagaatgagaagaaaaacacaaggctgcaagcgatttcttacaacaagcaagtagctctttcaatgtgtctttccacctttggatttttccaagagaggaaaggcttgtagaatgttgtatgcccttaggtcctgtctggttaagatccctaccacaggacacatctgcaaaaaaattgattcgcattggaaggaagttagtgttgtttagaggctttagcaagaatgggagtaaaagagagttaaggcatataaactcactcctgaggcttgaatcttgggaacaataagc

SEQ ID NO: 9562 - DNA, 1726 bp, Arabidopsis thaliana landsberg
acgatgtccaacaagagacatagagtaaacacgttctggttgcaaatatgttcccacttgggtgcgttcaggcccactagcgcctcttggatcccaacatttaactgttttatcccaagatccagtgatcacttgtcctgtaacatcacaaaataaagataatgtgtaaaaaaacaaaatgctgaaatcaaaatatctgagttccagatatagttacattacaaaagattagggaacaaagttcactgtccaagacagctaaggtattaaatcatccatcatcagagtcatataacaaaaactggttagctatgagttttctagaacttaaaagcaccagaaatcgtcagtgttgaagttcaaactagcataaagagtaccactctacctacccgcagcgtaagaatactcaacacatcgcactgctttgtcatgtgtccccaaaatgtcctctttgccgacattgaatacaatcctgcagtataaccagatgaaaccttataaattaaggaaattatacaacggattcaaggcatttgctaaatgtagaaagattccatagccgtcacagtgacaaaatatgaagaaaaaatcgcagtaaaatcaacaacttctgagcagccaatgttaaattagcctgaggggaaacattattatgccaacagtctcttcacatgactgagagaaaagagagacaataccgtcggactttgtaatcagcgccaacactgaagccggagaagtcatcgtgaaaacagcaatcgagtactgctccgccatgtaagaactctcctttcaacgaattggtgctcacatcatacaatctcacacgcttagattcaacaaacacagaacaacagaaaaaaaaacttcagatgaaggaaagagaggactcgaatcaaatcagtcaaagagcaaatgaggtgtttcactaaccttatcccatgaagaaacgaggagatgatcactgttattagaaaatcggagattagaaatgccgtcggacggcggattcgagagctcacgaccggcggacggagtcacagtcgtcatttttcccgttgaagatcacaaatgctagggttttctactttctaggtttagtgagagagagattcaaaagtagagtggtttaaattttgaattcaaattgcagaagtacaagggtcgattagatctactctacatatcaaaacagaaaaactaattttattttatttgaattcgaattagcgaaatggtcgaaacttcaatgatccaaaatgaatcatgtaaaacacgagttcaacgaagatgggccgttagatgtctgatacggacttacatatttcgagatgattgggctaataaagcccatattatacagaaccttgcaagcccaaaaaggtaagaagagtatagaatctgaatgagagaaaacgtctaaaactgcgtttcctgagaagatgttgtctgcgcaatcgaagtgacacgtgtataaattgccacgtgacgtctccgccaacgcgtttggataaattacgtccactttttttgcttgttgggtataacaacaaaagtgacatgggccttacaagtggtaacggaactcccacgtgtcctataatcacgccccgttttagttactaatacggtacgccatgcctcacccaatctttacctcacctacactcaactccactgaagttagctcaacattctttttttcttttctgaaaacaaaaat

SEQ ID NO: 9563 - DNA, 1694 bp, Arabidopsis thaliana landsberg
  unsure (1)..(1694): unsure at all n locations
aagaagaaaaaaaaaggttagttatcttcatatcttcaaaatattaagattcatctacatgattcccgatgatcacaaactaaccaaatagaatttttcatttggatctgcatctgaaagtggatcttcacgcatggaccgagttttagggtcataatgagctgagtttacatcaagattcaacaggtatttagcagtgtcttctctgatacgcagattcctgaaattaagaaaaggtaacaccattagtgcatcaagtagaaacaccaatttaaacttatgttatcatgtttgatgaagagtagtccatacctaacagttcctgtgctaccaccaccagttgttcgaacacgtttctcaacctttgcaaaatccatttgcctactctcatcaaccttagcttcatcgaccctcaagtcgtcaaggtcttcctccccatcactggttgcatcatcaccgttttcattattgttcttctcctctagtttcttaagttgctgctccttgagatacttctttcgtgcctcctctttagcatcataacgatctaccacatgacggtaggttgaagtatcataaccgttccatctgtccctcttcccatcatagtcaagttcaaaactctcgattttctcatcagcagcaatgttcatgtttgtgtatttagctccaatcttacgaggtctatccatacatgctttagaactgtgagtcattgcaccacagtttatacacgctcccttgcggtattgttcagcttgatagatctttttacctctatcataccatatctttttgggttcgggttcaattttccaatttttttgatgcttcaaactctgtacaaaaaaaaatcacagagtatgagtgtgaatgttctcaaccaagacaatgcagagaagcaagagaaagaagaattttcgcatataccggctgttcagacttgagataccatggagcttttgacatatactcaggtatgtgaggattgatttctttgccatcttcgtctacctcagcaggagcgagaccagctttacgagcttcctctaattctaatttcttcctgtgatcttccctagacttaaaagcaactgcagatcccatagaaaacatatatcagaacaacattcaaacattgaaaataaaatcaattttgccagaatttagccaaaatgaatctagccaatagcaaaactagtaaaaaccctaatttactaatatatagatttaaagaaagaagaagatatcagaagcgagattcttaatcatcaacgggaattaacagagaaatcgagaattaggttaacgtattagaagaagaaattgaaggaatcatggtacctgaagccgtcgccatgattgttacgatcgttaagcttcgagtagaggaaaaaaaaaagtgcgaataaagaagctaataagacctaagatctaaatatattannnnnnnnnnnnnnnnnnnnaatggaaagataaagaatggcggcttattcttcttcgtagtacaatttgggattttttatgggccgttattaaagcctaaaggccctttaagaaaaataaatttacagatgtatgatagataataaatatgatttccatttgacaaaccaatcaacgttttcattagttggcaaattaagcacatttacctgaaaaggcgaaaaatgttttgaattttaaaaagagta

SEQ ID NO: 9564 - DNA, 1879 bp, Arabidopsis thaliana landsberg
attgtttcaaatctgagactcattgtaaagtttacctgtttttttgattggaatgcaaatggaagatgagatcctccttctgaggagagaaggatccacgtttaagatcaggcctcaagtaattgatccagcgaaggcgacaacttttaccacaacgtaaaagaccagcatttctagcgatgtcactccaacatccttgtccattagtcaacatgtatcttatcagcttctcatcttcatcaggcgaccaaagtccttttcttagcttcggtttgttgttattaccaccacatgcatgatttggcttgcctttgtctctgatcgtagtaatgtccggtttcctcatcatcattttggactggtggagcctttttgaagaagagtatacagatttgaaattggagagattgtaagaagcaaggaaagatggagaggatgatatgatttgtggggattgctttggaatgatacgaatatgcgtaatggatatgacaaagagagaaagagatagaaagtagtgtttgttgagattgatgggtagagtagagagagtctctaatagagagagaccgagagaagatgaaatggggatgtgaagaagaagcaagaggtgggtcttcatttttttgttacaaaatataaataaaataaatgtcttcgttagaaacatgatgatagacttgtgagtgaagaaaaatgtatcgaaaaagactggtttagagtcaaagacaagaacaagaccaacctctttctctgtctcatccccgcaccacacacgtgtgtttgaagtatcaaagtatactaatacatacattggttatagtttacgatcagtattttttcttaaaatttccttctttctaaacgacaactaataaccaattttcactatctaaaagtaatatagtatatatactcttgcaaggaggcttattttgagtaactccattttacgacacaatcaaccgaatctaaataaataaataaattcaggattctttgacagaaatatagcatcaaaagccaaacacatcaaagccaaacttaagaataggtgcaagataaaatcatcattttttctcaattcatttccacataaataatatttcatgtgatatcaaaagcccataattcaatcacaaaaacgagtccatttataacttataaccgaaataaaaccatcatcatgaaaaaatattttcaaagtagcatattgaaaataatgtgcatgaaaaaattagcttttaaggagcaataatagtaagtatcgatcgataatagcaagtaatgatggagcactgatcatactccatcttaatgcatactaagcatcatgcatcacgtacgtaatgaatataactaaaccttttttttatattattcatacaaatcacagtgttcgacaagtctaccatgaaattaagtatgaattttctgaaaaattcaaattttgtataacaaggatatcacaaatcaaaatctagactaattttaagaaagttaaaagagcctaacacatccaaacagatgatacataggctattaatctgaatctggaaaaattaagggactgttcgattcttcgacgaacgaaggtaagaaactggtcagtcctctattggtctcatgctttatattgtatcatcttcggcccaattcaactcataaaacaagaggctcctgtcctgtctgtgactataaatcaaaattatttgggcctataaactatcattgggctcatgcttcaaattgggtattctttcatcgcacgtatgatgattttaaaacttggtcttttcaccaaatccatttaaaagaagaatcatgttagatgggttttgttctataggtcattagtcattacaataacaatcgttac

SEQ ID NO: 9565 - DNA, 459 bp, Arabidopsis thaliana landsberg
  unsure (1)..(459): unsure at all n locations
gaaataccacttcagatacaaattcctagtgacgtatcgagatgctacaattctcaccgatggatcatataatatcttgagaataggggccctgtcactggatacatccattctggttcagtagaaactttcctctaacatgaccaagtnnnnnnnnnnnnnnnnnnnnnnnnnnnnnnnnnnnnnnnnnnnnnnnnnnnnnnnnnnnnnnnnnnnnnnnnnnnnnnnnnnnnnnnnnnnnnnnnnnnnnnnnnnnnnnnnnnnnnnnnnnnnnnnnnnnnnnnnnnnnnnnnnnnnnnnnnnnnnnnnnnnnnnnnnnnnnnnnnnnnnnnnnnnnnnnnnnnnnnnnnnnnnnnnnnnnnnnnnnnnnnnnnnnnnnnnnnnnnnnnnnnnnnnnnnnnnnnnnnnnnnnnnnnnnnnnnnnnnnnnnnnnnnnnnnnnnnnnnnnnnnnnncaata

SEQ ID NO: 9566 - DNA, 1258 bp, Arabidopsis thaliana landsberg
ttattcgatccaacattgagaaaggtgatagttagcagagatgttgtatttgatgaagaaaaaaggtggaagtggaataatagtgaagatgaaattaataatgttccaggaatgttcagtctcagttttgaagaatttggcaacaatggtataagagaggaggatgatatcacagaagaaacagagatcaatgatggagagaatcatgatcgtgaagctgaaattcctactcaagccatagagactgtagaacaacaagtagagccgcaagtcacactaagaaaatccgtgagagtgatctcaaaaccaagttacttagacgattatgttttgttggcctcaatcgaatgtgaacggctcttacttatgataaatgaagaaccatgggactacaatgaggcaaaggaatcgcaagaatggaaggaagcgtgtgtagaagagattgcgtcgataactaagaaccacacttggaatttggtggatcttccgatcggagctaaaccaattggactcaaatgggtctttaagttaaaacggaactctgatggaagcgttaacaaacacaaagcaaggcttgtagctaagggttatgttcaacgacacggtatcgactttgatgaagtatttgctccggttgcccgaattgaaaccgttcgacttatcattgctttagcagattctaatggatgggaaatacatcatcttgatgtgaaaactgcatttcttcatggagaattaaaagaagtggtctacgtttcacaacctgaaggatttgtgataggaggaagtgaagataaagtgtacaagctgaacaaagctctttacggactcaaacaagctcctagagcatggaataacaagttgaacaagattctcatggaacttaagtttactaagtgctctaaagaaccgtcattatattgtcgaagagacaaggatgagctacttgttgtggtggtctatgtggatgacctacttgtcacgggatctaacttacaagtcatacttgagtttaaagaagagatggcaaagaagtttgaaatgagtgatcttggaaagcttacgtattacttaggtattgaagtgtttcaacatgaaggcggcattatgcttaaacaagagaggtatgcaaacaagatcctagaagaaacaaaaatggatgattgtaatgcggttcagattccgatggatgcaaacctaaagctaagtaaagcacaagaagagaaaaacatcgatgagaaggaatatagaagaaata

SEQ ID NO: 9567 - DNA, 653 bp, Arabidopsis thaliana landsberg
ttcttctaactactttcttgagttttcttccttagttagatagatatgcattcaccagaggtaatgagagatgaaagcatatccattcatattgaagtcggaagactaagtaatttaactatgactattaatttatttggattttaagttattacaccaaagttgataacatttcatagttttttcacatcatacatgtaaattaaaacttagcagaaatcaaaaggtcggtgaatattttgtcaatgtcacacattctttcaaaccaccagttgcgtgtcgtgacataacccggggttttgcttccttcaagataagcttcgcacatagatatactatcaaaggctctagcagccgcctcagaagctgaccggtacgccttagagcttgcaaaccctttagcttcctcgatcgccttattggataattcatattctttcacgcaagacctataatacttcttgagcttcgaataattctcggttctatctaagcctttaatcatctctaggttcttatagcccaaccgttccgtctgttgatagaccatattgacaagaccttgcatgtcaagggtgaacgtgtttgggaaagaggttagccaagcgagacagaactgcttggaaattgtcggttgtgagcagagttggttg

SEQ ID NO: 9568 - DNA, 557 bp, Arabidopsis thaliana landsberg
ctataaccttatttatcatctacatgttggttgatcctttggatgacaactagatcaggcattattcccatcatgatatgagtgacatatatctataatagattaagatggcttccaatatttttacaaactgtaaacaccaagaaaactgttttccttcgtgaataacaaacaaatctttcatactgtgaagggctcagttgttaaggagaattattaagagtttaagaccttgttataaaatagctatatgcggttttttattttcttactacagcacttaagtacttgtttcattattaatgtcaagaaaacttgattcgtataaatcgtgttcttggggtttaagttacaaatctatctgccttatatattgactacaactcaagtatagagcttaacttaggagtaaatacttaactaataatccataactaataatgcttaatatatatatatatatagagatcaatattcaggctgctaaaatataattggacattctaggttactcatgatttttgtgtaagtgggagataactcgtgaatatattaat

SEQ ID NO: 9569 - DNA, 615 bp, Arabidopsis thaliana landsberg
  unsure (1)..(615): unsure at all n locations
tccaaacgaaaaaattacaaaagatttagtcaaccaactctgctcacttccgacaatttacaagcagttctgtgtcacttggctaacctctttcccaaatacgttcacccttgacatgcaaggtcttgtcaatatggtctnnnnnnnnnnnnnnnnnntgggctataagaacctagagatgttcaaaggcttagatagaaccgagaattattcgaagctcaagaagtattataggtcttgcgtgaaagaatatgaattatccaataaagcgatcgaggaagctaaagggtttgcaagctctaaggcgtaccggtcagcttctgaggcggcttctagagcctttggaagtgtatttgtgtgcgaacgttatcttgaaggaagcaaaaccccggattatgtcaagacacgcaattattggtttggaagaatgtgtgacattgacaaaattttcaccgacccttttgatttctgataagtcttaatttacatgtatgatgtgaaaaaactataaaatgtcatcaactttggtgtaataactttagacccaaataaattaataaagtcatagttaaattacttagtcttctgacttcaatatgaatggatatgctttga

SEQ ID NO: 9570 - DNA, 1680 bp, Arabidopsis thaliana landsberg
gggagttgacagctcggccggtgatttttaactttggagattctaattcagatacaggaggacttgttgctggacttggttaccccattggcttcccaaatggacgcttatttttccggcgatctaccggtcgtttgtccgacggacgtcttctcatcgatttcctatgtaagtagaacaaaaaacttgtttttgataaatgatagtgatctctaccgtacgtttacttttggatgtacggcccagattgtgttaagacataaatgtcggtgcgtcgcaggtgtgatccataagaaaaaacaaaaaaaaatcggtcattgaaaatcagaatctagtagaacaaagtgggttccatgtagcacatgttagaagtcaatttatgttttggtttgttttagttgaattttttggtttggtttggtttggtttggtttgagtttcgattcagtttggttttatcgtcaattcataattacatttggtctgttttatttgaaatttgttaatttggtttggtttgagtttagattcagtttggtttcagagtcaattattttttttggtttgttttagttgaaatttgttgattcggtttggtttgagtttagatttagtttgggttaagagtcaattaaatttttggtttgttttagttgaaatttgttggtttggtttgatttgagtttatttcagtttcgttttagataaaatagtataaccaaaataaataaaaataactcattattttcgttaatgctgtaaacttttagtatatcttataaaaaaaatcttatgtattcaaacatattaattctaataaataattgttaattcgatttgattgcacaaaatttggttttggtttagttttggttagcataatttgatattgagatttctataacgggtcatacaaataattgttaacgtaattcaacaaaaatatatagctcaagttagttcgattatcatatagataaaatttttatatgcgaaccaaatttatatatttatgttcgtgttattcatttaaatctggtaaatggatgtactagcaatggaataatgcatatgcaggtcagagtttgaatacaagtcttttgaggccatacttagattcattgggtagaacaaggtttcaaaatggtgcaaattttgcaattgctggatccccaactcttcccaaaaacgtccctttctcgcttaacattcaggtcaagcaggtcagccatttcaaatcccgatcactcgagctcgcttctagttcaagtaaacctacctcatcccaaatcattattatttatcctaagttcttaatcagttaatgatcttgactagagttagcatttgtgttttctggattcattaaagggcatgttcataagcaacaatggattcaaaaacgcgttgtacatgatcgatattggacagaacgacattgcgcgttcattcgctagaggcaactcgtattctcagacggttaagttgattccacaaattattaccgaaataaaaagcagcataaaggtgagtttattcgccttaatataactttagagtatgcaccatgtaacctttaaaaatgggttttatggtctccagagattgtatgatgaaggaggaaggagattctggattcacaacactgggccattgggttgtctacctcaaaaacttttt

SEQ ID NO: 9571 - DNA, 1155 bp, Arabidopsis thaliana landsberg
taaataacagcaaaaatatagataattaagagacacaatccaaagattgattcccttaagataataatatatccacttgccatcagattcaactctaatcagaatgctatagatctaatcttccggaattacaatttcatcccggttttatttatttcagaaacatacaaattggttttagtatctcattctggtttagcttagacacaaacatgatcttatagacagtaatttataagacatcttgtagagattggaagtaacaaagaaagcttaccaattcataacttgcttctgcctttctttgataagcttaccaaagccttagccttggtcctcagaacaaacttctggacttttccagtcgatgttttaggaagatcctcaaacacaatactcctcggagccatataatgtggaagccggtccctgcaatagctaataagctcctccgcactggccttagacccgtctttaagtttcacaaatgcacaagcagtctcaccccaatactcatcaggcctcgcaactacagctgcttcaagaacacaagggtgagtgaacagagtagactcgacttcaatcgagctaatgttttctcctccagagattataatgtctttcgatctgtctttcagctctatgtatccgtcagggtgtttaacacctaagtcgccactccaaaaccaacctcctttaaaagcttccttggttgcttcagggtcctttaagtaaccattcatcaccgtgtttcctctgaagacaacttcacccatagtcacaccatcagctggcaaagttctcatggttacagggtctttaacttgtatttcctcgagccctaaatgattcacgccttgtcgagctttcattttcgcctgttcttctctaggcaaagagtcccactcaggcttccatgtacagatcgtgcctggtccataagtttcagttaacccataggaatgaaacatagaaaaccccaactcttccatcttgaaaatcacatgagctggtggcggtgcagcaccggttataaaagacaccttcccgggaagcggtttctgctcagattcaggcgcattgatgatcatattcaatatcgtcggcgcacctcccatatgagtcaccttatgctgggaaatagatcgtatatag

SEQ ID NO: 9572 - DNA, 1094 bp, Arabidopsis thaliana landsberg
tagagatggaagaaaacataatcatggtcaacacacaaaattaagctacacatcataagatcacaagtaacttacaggttctttcttgacgcatccatacttgctctgtatctgtaacaattaatatgaaagaggaacattacaagctgttctttagcaaacaaagatactaaatttgtatgcaatgaatcaccttgatagagaagtcggttatatctagtaacagtaatttcgattcaaagtaatgagccaatgcttttgcaagcatttgctgatagaattctgcagagtaaaagaggcaacaaaattacaccaaagtctgaattagaaaaagattgaggttggaagacaaaagggtaggagatttttaccagcaggtccagacagaagaatggccttacttccaggtgcaagattacgcgtgtgcttcgagatatcagattgctttaggtgaacataagctgcacttgtcaataaaagccgagttttctcactgcaacatggaaaagaaacattagtatataacacaacactgtcccatttaggcaacgttatcaatcttttagtaataaaatgcaagaaagatatgtcgagcaatgtaccttaggtaataaggaaactcgtcgaaagtgacactactctctctgccatcaacgatctgcctaaccaactcttgctcaatcttttctccggttagtccatcctctgcagaaatagaccagtttgcccatttacccaaactctgacccgacgctagaccaatccctaacccaacaccaacccctaacgcggaaaacaacacgctcttctgctccatttctgccgaacaaatccttgattagcattccctagaaggaaagatattcaaatataaacgaaagaatgaatgttttgtgttttcttgtcaaacaaataacctgttttgttttgctctcaagattttgtagcggaggaatgtctttttgaggggtaaataagattgtagtggacgacggagaagacatataggtttgactggtgtgggacgatcctactctatatttagcaatgcttcttccattaactcttatggacgataatattctttgacggga

SEQ ID NO: 9573 - DNA, 1849 bp, Arabidopsis thaliana landsberg
  unsure (1)..(1849): unsure at all n locations
aagaagttcctgcatcgccaaactgaaagtctgtggatccatatctggcagaaaacattagaggaagaatctttcttcttcagtcagaagtgagttccaagtctcaacagacaatattcccgttaaatctggtagatcgtagagctcgtatggtatgttacagagctgaccttcaaccaaagctagctcacagtttacttgcgcaatgtcgtaatcatcagagtcatcatcttcagagtctagcccaactgtttgattcttattcatctgtagttaaccacttactacccttaaaacacaagtacttcaaatctccaaccacaaactcagtagaaaggaacacaagcaggagatacctagatagaaaatgttaaagactcatcatcagcaattcacattacaagaattctactacaatacaatggacagcgagaagctgagtatgttactaatcagaaatcaaacgaacataaatagcattttactcactgatttcagcaacaacaacactaaaggctatataaaacacgaaatatacattgtgagatcaatgaagcactcaaaaagaagaagatacacaacaccagaaaatctcccagatcggatcagctacaaagcttaaacgtaatcgatcgcgaactcaatcaataaccaaaatcaaaagctccaacaaggcaaataactagagagcgaaaacccttggatttgacaacaaaaatgtgcagacaatttgaataaaaaacaagtatcatacaaatctcagcacaaatcagctccaatgagtttcaaaaacctaccggaactaataaaaaaaaagaatctcgagatattcagagaaatcgatcggaaagcgtaaaagacgaggagcttaccggctctaaagacaggtgaaattagcagattagggtcgaagaaaccatatccctttggctacagatacgaacttcatcgccttcaaagattctctgcttcctttctagagatttctatggcttttcgatcgatgccacagtagagtagagactagagagactaattactgttacacttgtattttgatttctttaattaaagccgcctaatgtaactaatgccttgattactttaattaataatcatttttaaattgtgatttataatcaagttagacattacttcacaaatagtttgggcctggaaacgtattggcccatgtaaactttaataaaagaatcaccttgcaggtaagtataatatcctgatattattatttacttgatagaatgggcctataataaaagaaatcaccattaaagaattataggcccatgatatcaagtaaatatcaagaaatgatgattaatgatcaagttagacatcattacttgatattttggtaagtaggatcaatcaacggtcaggatccttttagtaaaatcatgtgtcattttcagtttgtctaaaagataagcctttctctttctctctctgtcttattagaaaagaaaatttgtaccgtttccaaagtctgagccaatcattgtgttgattctggaattctttgtgggaacgagaaatttgtacaaggnnnnnnnnnnnnnnnnnnnnnnnnnnnnnnnnnnnnnnnnnnnntagcctctgttttcttgctcttattttcatccttcaacttgcaggtactttaaactttcgtaatctgtgtgttaaaattgcttactaagatcgatttgttggactcttgagctacaagttaaaaaaaaacaaaataaatcaaactttgtgatttttttctctgcgaatcaatctaagacatatgaaggggaaatgtatatatggttttttgtaattgtttctatatcagtaaagttgt

SEQ ID NO: 9574 - DNA, 1733 bp, Arabidopsis thaliana landsberg
aagaaaaaattcagactccccttctttcaggggaatccctctcccttcaaaacgacatcttaaatctcatccctacagagaacttattgctcatggcttctagatatttgttcaagctaatgatgaattggcttgtcctgctcaaaccgagagtaattcgataagcagaatgtcgaaaaaactcacctcagatattcccatagagtaataactgtctaccttggtttatagtatacaatgaacatagttttcgtttgagtagcatggcgtgcagtagcaagcactcccagatgcatactatgacttgatataacggatgaaggcatactgctctgttgaagattagcacgtctgactccaactcgcaactctccgttctcccctctggaaaatataatatagcttggaagttcaaaatctaccaatggaccatcaaaagaaacaaaacaaggtagcagcgtgaagtataatacctcaggaatacaaaggtgtccccagcaaccaatctctttgatgtaacaaaggtgctccaccctgtcgtcaatagatgcctccgtggttggcctgtttaatgaattatcattcattttatacaattatcatggatacataaagtttgatctgagttaacaagaaatggattcaccacctctaaaaatatgcttgaatttccactgataaccgtgcacatcttcggctactaactcctgggtcggggtttgctgagtcatatcctaaaggataagaacataagaaattcatatcaaaggccattttggtgggaaacaaagcacaaatagtaagcgtgtcctaataccagcggaggaagacattccgtggcatgtttccttagaacagaaaagccaccatgggtgcttgtatcagacgctgtcaaaaccttgctgaaagagtgaactttcggcctttgcaactcaggaggagagggatcaggactcataggttcatcaacttcctacagtttacatttagagatccactaaacattgaatttaaggaagttgcaacaacaaaaacaatcaagtgatctaattgtgtcactcacagttccaacagggatcaaagtaatctgagcatagacctcatccgtatctttctccgcctgacaagaacagaaatgaagaaatcaaacaagatccagaacttccactcatatttagtctaatcatttccagcttcttcatagattttctacaatatccatctatatatattgctttaactaatggacgacacatcatcagataaattcggttttgctaaatgtggaaagtatacctgaagactaacgttcataacattgcagagaatcttaggaggaagaacaaaaagaggcttcatcgtatttaagtcgacttgttgcgttgacgcttcgagctgaaccaccaaaaatagaaatgtttcattaaaaaaaatctttctcaaaatttcaccgatctaaaagagaagctgcttacttgttccatgtgaccttgaggaaaataataaactctttcttgagcttgaggaacatcaacaagaggtcccgcgcataatttccataactcatcgtacagatattcacctgtttcaccacacaatgtacaccggttaattgcgccggtaatgtcgccggaaaattgaagaaaaaaacaaaactccggtcaatttctcacctccgcgatttgccatcagctgattaaatcttctatcagtcacaccaaaacacacagtct

SEQ ID NO: 9575 - DNA, 793 bp, Arabidopsis thaliana landsberg
ccccgtgagacttcgctatctaagtgctttttgacatatcattcttttaaatgtaggtggtgattctacaaagtctgtatttgttatccttccttggctacttcggaagcttctgaatttcatgaagtcgaagatatgggactcaggtgtctctaaaaggggttttcgctgattgtctaagaattcgtgtaaactcttaacgaagagtgtgactggaggaaagatggtcttaatggatgatacctcgaatttcaattcaactgtagatggaaattctgggaaactttggacttgtgtgcaaccagagagatcaacaactcggagtttttgcaattgttgaatgtctgggaaactttgcaagttcttacagccgcaaagatcaatttcctcaaggtttcgagcttccgaaagttcctcaacttcaagcagattctgtgaatggctaaggttgatcctcttcagcatcttgagattctgaaaataaagagaaaacacagttgaagtaattagctaaaggaataacacaagaggtacctcttacttttcatttgagtttgcttactttggttcctccccaaagtctttggagttgactataaggcaaattaagttcaacaaggttgcttggattaaaatcttgcagtaaggattgcaaagggtaatattcccaatggagaattttaagtccatacggcagagactcgagggcccttccatggttttcgggatcagagtagtaaatcttcagaaatctaagattgtacatagatccgagagaagaaagtttacatcc

SEQ ID NO: 9576 - DNA, 1512 bp, Arabidopsis thaliana landsberg
tagttagatggacgaaaaattattcaagccaagtctcgggctaacatgacatatgcaggacatccatcacatggatatgttcaggtggaaagaaagacatgtgagagaaactggcaccataatagcttacttaagctacagtgatcatgtctgaatatatttgttatgcaagctatgtgttatttatttgggtatagctttcaaacataccatactagtgtgtttgcagaagatggataaacaatggatctcccatatatagaggctgcagaagcagcggcttgaaacctagcctcgtgcctgctcatattctcactggcagcagcagaaacagaagaaccctgaccatcagaacttgaagtaccggttcctgtatgaagcgtagagcatcgtcattagtcaccatgttaacaaaaaatcaaacgcattcatcttctggacaatctgaagcacataagtcatcatccatactaagaacatcaagagacaaatataattgggagcacagagttcaatatcagcaaaaatatgtctgaatagcaagaccgataccttgctgcagggattcttggtgtggcccacggtttccagaagctgttgatgtagcattctcagctgggacaaccagtgctctgcaggtgggacatgtgttctgtcgttccaaccatgaccgaagacaatgtacatgaaatagatggccacatactaatttcttcgctgaggtcatttcttcacgacatatgatacaagtggcatcatttctgcaaaccccaaataaagaaatgtgattgatctagatatataagcataattagttttaagaaactgctcaaaagatatttagaatatttggaaacataaatcttgtgggaatatctggaacttacgaactaagttcttcaggagttgcaacaggaaacaaatcattcatattggaagtgattttccgatatcgaaggtaatcagtcacacgaatcttgaagtttctgaacgtttcgtagagctcccgtattagatgcaagggaaggccatagttcctacgcaataaaaaagtgatactcaaattaggatacaaattccaatactatattgccataaattgcataaagactgacgtagtagatctattgttttggctgattattgtttctcatttatgactttcatcgtctacaagtaagaatatatgaaagtactaatgtaaccaagagaagactcatagatggacataagtgtaatgatagaattatgcaagtaactcttgctacaagtatccagcaacaaacactgtataccgataaggcgatagtgagttgtgacatactaatttcagcatgttaataattcaggatttaggtttcttttggtggtataacatctaagtttggaataatgaaaacgtgaataaactaaaaacttacatgaatatcatcaggaagaagcaaagatacatggacaagtgaagcaagtcacgaacaagctccagatagaaagtgtatctgggtttccttc

SEQ ID NO: 9577 - DNA, 1405 bp, Arabidopsis thaliana landsberg
gatgctaattatcagaacaggacgagtgttctaggggggggttccccacccaggcccaagactttgtcacttacaaaaaatcaatttgcttggtctgcattcatctcatcaagcgtttgatcaggtgaaggaagctatgattgatgttcctgttttaggtcttcctgatttttccaaagtgtttgtgttggagacagatgcttcaggcgcaggagtgggggctgtgttgttgcagaataaaagacctatcgcttatttcagtcatggtttgacttctagagaacagcttaaaccggcttatgagagggaattgatggccattgcgatggcagttctcaagaggaagcactacttgctaggcagttaaatttgaggtacacacagatcaacgcagtttaaaatttctccttgaacaaaaagaagtgaatatggagtatcagaggtggttggtgaaattgttggggtttgatatggatatcatttacaagtcgggtattgagaacaaggcaacatatgggttatctcgcattcctcatcctgtttctgctcttttaatggccttgacagtaccttctgtgattcagttacaggagctttacaaggagattgctgaagatgcgagcatacagaccttattagctcaaactaaggcatctccagattctgcaggtcattatactgtggtgaatgataagttgtggtataaaagaaggttggttattccaaaacagtctaaattcatttctttgcttttacacgagtttcatgacagtaagttgggtggtcatggtggtattttgaagacattgaaacggattcaggcttgttttcattgggaaggcatgtataaagacattcagaagtatgtgacagagtgtgtggtttgtcagacacaaaaatattctaccttatctccagctggtttactacaacccttacctatacctactgggatttgggaggatatctctttggactttatcgatggtcttcctacttctggtggtgttaatgtcattcttgttgtggttgatcgtttgagtaaagcagcgcacttcattggcttgaataatcccttcaaagctatagatgtggctcaaaagttcatcactgaagttgttaaacttcatggttgtgccaagaccattgtctcagacagaaacaaaatctttttgggttaagtatggtccgatatatttcggttggcaggcacgaagttgaagtacagcacatgatatgatgcccaaacagacggtcaaacggaggtcttgaaccgctgtttggagacttatctgcgttggtttgcctctagccacccgaagacttggtaccgattcttggcctgggctgagttttcttacaactcatgttatcattcaggcatcaagactactccctttatgat

SEQ ID NO: 9578 - DNA, 1018 bp, Arabidopsis thaliana landsberg
gtttttatcatcatacagcccttaaataaagtgagcattgatcaaatgaaattaaaacataataagttataaggaattactccttgggaagagttaactcaaacttgtctctaaacccgaatatcgaactccatagtatccattatgctaagtttgttaatgtagtcaaatgtggtgaggtttagtggtcagaacagcaatgagtttgccctcacgagtgattgcatctgagaccgcaacagttcttgttacattgtggtttggtgatccgagtgtggtatttagaagttaagtaatttgaattgtaatatgatggaaactgcaggggctgacagagaagttcaaggagaaggacacagcatactcaggctcagctactttcaactacgaaagcttcatgctcaccgtcctccccttcctcatcgcataagttttttttacggtaacccgtttgcacatcttctgtttttttgtatgttctttgttgtgtgaatgctattgtcaatggaagcttttccggtttagttgaactcaagagtttataaaaaaaaatgtgaaatgtatagtgagagatcttgtgttataaaataatcaaacaactcattatggttggatattattacatcttgtttattggaatacatgtataaaagaaaaactttgtgcatataatattgcgtagttttatcttttaataaaaagaatagttaaaaaaaatagttatggcttccaattttcatacatcttcaaaattctttttcgaattttctttgtatggaaattagggctcggagttgccttgtcctataagactgtcttagaccggaccaactcgtgggattcttagccgtggagttggacttggactggactgctcgtttaaataaaccagacgtccgttcagaggttgagctggtcttgcgttcttctcataaccctagttatcaacaaaatatgtttagttaaaaaacagaaattcaaaagtgttcttagtaaatgtgtttatatgagagtgtat

SEQ ID NO: 9579 - DNA, 1077 bp, Arabidopsis thaliana landsberg
gttggagacaggtatgtgtatggtgttgcttcatataccccacccttgaaacagaacatatcttcttcaagtcataaccacaacaattattattcaaagagcaagaactccttcacgggtcacggcatgggagatcgtcctaaaacaccgcgaaaagtaacatttacactctttaattcttctctctttcacattacctgaagaggtttgactcatctttttttctttgtattgatgctataggcatcacagaacagctatgccccacccccacttcttaaccaagaaaaaggtcgcattgcttacccgatggacccagtaaagaaaaagtctggagctttaaatcgggatgaaacagagaaggcgaaagcgaggacaaaagaaaatggtacaagtatgaatgacttagcaaacggtcaagatcatattaccaatggagaatgtgagtcatgttcgttggatgctgaagggaatgaaagaagcaacggtgttggttctgtgatcagaagggatcaatataacctccctagctttcagaccaaatacgaggaagcaatcttttttgtgataaaatcgtatagcgaagacgacatacacaagagcatcaagtacaatgtctggtctagtactctcaatgggaacaagaagttagacagtgcatatcaagaatctcagaagaaggctgcagacaaaagtggaaagtgcccggttttcctgttcttctcggtatgctaataggatttttcgctatatacgtattcagttttgcgacgtcttcatggtctctgatcgattttattggattcaggtgaatgcaagtggccaattctgcggtgtagctgagatgattggacgagttgattatgagaaaagcatggagttctggcaacaagataagtggactggctattttccggtgaagtggcacatcatcaaagatgttccaaatccgcaactacgacatatcatactagagaacaatgagaacaagcctgtaaccaatagcaaaaacacacaagaggtaacattagttccttaataggcttaaggaagtgaatcattatcaagagctaatgt

SEQ ID NO: 9580 - DNA, 1378 bp, Arabidopsis thaliana landsberg
  unsure (1)..(1378): unsure at all n locations
ttggggacgaaaactacctcgtagctgctggttgcaacaccaaggcgtcgctgacaaatgtagaaccaagtatggtaggatgcgagtcaacttgtattacaagcaaaaatgcacagagcatccctttattcaacaaagttagatgctctaagtcttggtctttcgacagcaacactgaaaacatcttgccttccaaatacataccggtttgcaataaaacggaaaaacaggaagacacaatctgcaacgggaagggatgctgccaggcaannnnnnnnnnnnnnnnnnnnnnnnnnnnnnnngtcacaataacgaacactagtaatggaaaccttacaacgggaggaggatgcaaagttgcctttttaacagatgaagtctacactttatggaatgcaaccaaacctgaaaatttattttctaatggctacgctaatgtgagcctaggatggttcatccaaacgaagaatcattcgtttatagaatcattgggctgccaaaacagagaagagttcgatgaaagtaaaaaactccgtattaaaagtacagcaaaatgcacatgcgataatcatacagcttccgagatcatttatgcaagttgtgcatgtgctggcgggtacaagggtaatccataccgtgtagactgccaaggtagagaattgctccttcaagtatcttctttccttgtgtgtctcacatcacccatcatttcagtacaaattcatgacttccttttttatatatgtttcatgcctttttcgtttgcagatgttaatgagtgtgccgcacctaagaatccctgttgggatacaagtattttatatcgcaggaaatgtaagaatacaccgggatttttttattgcgtggactaccacattccagaaacaatgctaggtaagtcattgaatttgttatatatcaaaattcaagcagcaaaacttttagatatatgatgatgaacgtctagtttttcttgtgtggtgtttgcaggattaggtgcaggtttttttgtcttaatagtaggcggcgctatatggtggttgagaaagcttcttaggaagaaaaggatgacaaagcgcaagaggaaattcttcaaacgtaatggaggactattgttgcagcaacagttaaatacaactcaaggcagagttgaaaaaacaaaaatatttagctcaagagagctggagaaagccactgataacttcaacgataataggattattggacaaggcggtcaaggaactgtgtacaaaggtatgcttggagatggtagatccgtagcagtcaagaaatccaatgttgtagataaagacaaactacaagagttcatcaacgaagtcattattctctcgcagatcaaccataggcacgtcgtgaa

SEQ ID NO: 9581 - DNA, 595 bp, Arabidopsis thaliana landsberg
tcagccttgtaccagcagaacgggtctaatagagaccaatgtaacgtaacccttccctataactctataagtatccttttcagctgtgcatacttgtttaacaagaaacattcaacatcatgaggggaaacaagaattactactttctaattctcctctattttctaattctccaaatccttcactctagctcttgtcaactcacatgtggagatatccagatcccgtacccctttggaattggagataaaggttgctatctcgacgagtggtacgaaatcgaatgtctatcaaatactgcttccaaaaaagattcccccatccttaaaaaaatcaaaatggaggttgtgaatatttcccttcctctggcctcttataatctcggtgctacttctccgaaagtctcttcaattcgtgtcaaaagctcgattgcatccatgggatgttctagcgatggaaaagagtttggattgactttgaatctgacagacagtccttttttctttggggacgaaaactacctcgtagctgctggttgcaacacccaggcgtcgctgacaaatgtagaaccaagtatggtaggatgcgagtcaac

SEQ ID NO: 9582 - DNA, 1710 bp, Arabidopsis thaliana landsberg
gtgttagagcagtcttgactgacaaggaccaggtttttgttcattgccactcaatgtttaatgatttagttcattctgtcaattggtttttgtgtgctttctaatttcttgagttgggtcaaaaacatgaagctgagtatatatatatcacacgtcaaagatgaacatagtttataaaatcaagaatgtctctgtcatttttatcttcctactcactgcatttcacactctttcgtctctgtagtgcctactataagcttattcatgagtgtgttttttgttgcagaatccgaaatggaaaccagcgagcttagacgaagtagatgaaaccgaagtggacgcgctctttatgccattaagtcctgaatttgaagagctaaacgtatgaaccaaacaacagagatattgcttagatcatgaattggtgattattgtgttgcagcttttgaacatatcccatatatttatcaaattttcaagtcgtagattgattaacttacaaacaaataaatatataaacacggtaatgaaattattttttttgtctttacataataaatgaagtacaaatggaataagaaacaattcctaatggttggcagtggtaatgaaaagagaagcagaatcacaaaaatttgtttggaaaacttgaaagcaattttacatgaaagtgacattatatatctctccattaatctgaacagagcataagatcccgtttttctcttaagtctttacatgtcaataagatacgataggacaaaagacccatgtctagatgttgaaactctttaaaatcaatttttagtctcaatgtttatgccacgaagaagaggaaaatcatgagaaatgcaatgagtacgaagaaaatcttcatcattagccatcggtttgatgatatactgttgagatacctggccagttggctctgtgcgccttccacatttgctaatgtatcttccatgttttgatcgatcctgtataaaccagcaacattatattatacttcctttccacaaatgttctatgaatcattggacattataacacatattgatgtttttcctcaggaggaagacgaacctgattgcaatttccccttgttgagaaaccatggttgctagttgtgtgaagatactgcttagctcatggattgttgattcaacggtgtgtagagcttctgctcgaccctgcatatatgtgtcttgcaatgggaccattggttgctgttgctgttgctgttgttgttgactctgctgcaacaatggtgaagattctccctctcccggcttcctgtaaaagcagagattatgaaacgtcttgagttcttgacaagccagatcttaaatcagcaacgactgacatggtacagaaaacattctagtaaacccatgacaactttctggactcccattagaccaaattcttagccagatttcaagaagtatgctgtatttgcaactgtggttattcggttaatagtactttaccatgggactaactgagatgaagatgaagaagacccatttgcccatggaagaggaacagattcactagcagcagccttagcagccaaaggacgctggcgaacgaatgggtttgttgattcttttgaagcatttgaagagaagagttgccttctactttcatggaccttcatatttctgcacaccaagacaagtaatcatagctgcatactcagctttatcg

SEQ ID NO: 9583 - DNA, 745 bp, Arabidopsis thaliana landsberg
ccaaaacccctaatcaatggttttgatcttccaaccagatcttattatctatctctttttaaacccttccttctgggctcttcggagaggtgatttatcaccccaaaaaaaagatttttaaagtctaaatccttttttctttctttccttcaacatgcctttaccttggaagaaatctaaatctagtcggatctctagattcgtatcagactttcaacaatctcctaaacatggtggatctctcgttgttgaaactggtttcccaacttctttaatcgatctctttgttaagaatcgcgatcgtctcaaaaaacaatcttcaaaacgtaacaacaagaacaacaaagcccagactgaaacgcgtgttttgtctccacctcctcctcatatgtctttgcagcgtcgtatgtctcttccttccaagcttgatccagctttggttacagaggattctcctttggtgagaaagatcgaggaaacttctgttccggagattgtccatgaagacgacggtggtcatcgcggtggagaaggaggagggtgtgttttgatagtggtggtgtttaaggtttttatggtggctgtgcttgccttgagcacgaagaagctcgccgtggggatcacgctctctgcttttgcccttctcttcctcgagcttgcggtggcgcgtgtcttcacgtacttgaatctctgtcccgacgcgcagattcggatagattctttgatcgataagctcataggggag

SEQ ID NO: 9584 - DNA, 455 bp, Arabidopsis thaliana landsberg
  unsure (1)..(455): unsure at all n locations
aggaccgccttgaggttctgcccggcggccgaggaaatgacggcgaccttcttgcttgaggcggtctcgagcagcttgcgctttttctcgatttccttttcggtcatcgcatcggccttggtcatgaccaggatctcnnnnnnnnnnnnnnnnnnnnnnnnnnnnngcgcgccgtaggccttaagctcggcgcggatggtcttgtaggccgccaccacatcgtcctgcgtgccgtcgaccagatgcagcagcgccgccgtgcgctcgacatggccgaggaagcggtcgccgaggccgtggccttcgctcgccccttcgatcaggccggggatgtcggccatgacgaaggtctgctcacccatatcgacgacgccgaggttcggcaccagcgtggtgaaaggataatcggcgatcttgggcttggcggccgtaacgaccgacaggaggtcgacttg

SEQ ID NO: 9585 - DNA, 891 bp, Arabidopsis thaliana landsberg
gcatcacttgtgctctttaatatgcttcttgcatgtgctatgatcgaagaacattgagtttctaatgaccaaggtattgattatgttttcttatcctgttgagatgtttaatctgtttgctcatattttttcagaaacagagtgagcagggtacgttatagtctcattcaaagtaggacaatggaatatagtctaacctgaagagttgttaggaggttggtccctgtggaattgcgcacggattgttggtaaaaactatcttataatcgtcaggttttgtctgaatgttacttgtcctcattacttgtatattcgctaaaacataaaggggatcaatcagctcaaatgtggaaggaatggaagagaaagagataaacagtaacgtccggtgagagtgggagataaagaaactttttgtatcttgtggatgatgagtgagtctgacactcaataatcaatcagtacaacgtgtgtagtcatgggtaagagtaataagaattataattgcttactctggttgttataaggaccctattgacaccacttgtgcagaatcatgatggctgagcagttttcctcatggtggaagctgtgtacgaggatgtagccatattgtataggctgtgttcaaccaataaaaagatcgctccaatctataaggatttaagttgctatcaaagtagaaatcaacgttctaaggcaaggcgctgaagttaaggaaatcaaatgataatttgtagaactgtctagtatgcaagttctcatcagccaaattctgaatacaaaagaaactacactctcattcctttatttacagcaaaacaaatagtaccatcatatccacacaccaaagtgtttgattcacatcacacccaaatacaaaaaaagaga

SEQ ID NO: 9586 - DNA, 1783 bp, Arabidopsis thaliana landsberg
ctgctttaaaaattaaggttattgttccttctaacatgtctttgtttaggataaaccactgtgttataccactggtcctctttttttttttttttttacttattttctgacattttttcgcagtcggggattgctgaaatctggacatagggtgagttaaaatatggaaaaaagttcacaggttgtctcttaataagtcatctttaaaactattttttcccttaccttaatcttgcatgcactatagggtattgatgttttgaatggcatagcatgggacagtgacaagcaacgcctctttggtaataaatcttgttatcatcccctctaggcttgattactcgacgtcgcctcatagtcacaacattttgtgtctccatcaattttgtgtctcgatcatttgttttgcagtaacggggaaactgtggccaaagctgtaccaaatcaagctaaaacaagcatcagcaaagagccgaaattatatcgagcaacaatgcttggtatgaaaatattgtgcatggtaatggttagaatgtatactggctataatttaccataatttctgaacattagcatttagcaaacttcaatgattgaagatgagaatcaaaacctcgtaccttgaaaatccaaaatcgcggcaaaaggaaattacaattcccctcggttaacaaaagtctctcccaaaatcaaacgacgtctctgacactctgcaaatgccacaccacaaaacataatcccataaatagtataatacccttgaccaacatcttcggcaaaaaaactaaacacaaaacgtttttagttaaaaagtgatcaaggcccataaagggcccaacgaatattaacacctaatctgttgtctccttccgccgccgatccccaaagaaaaaagtaaaagaaatggagaggttggtcagcggagagacaacgacgtcgtcgaacatgaagaagaagaagaagaaggtgtcatcgacaacaaatccgtcacttcccgatgatttggtattggtcatcatcgcacgcgtctcaatattatactatcctattctctcactcgtctgcaagagctttcgatctctcctggcttcaccggagctttacaaggtcaggtcactcttgggccacaccgagagctgtctctatctgtccatagcgtgttatcctgattatcgcatgttcaccctctgccggaaacctgatcaaaccctaaccaccagtgaggaggaggagaagaagaaatcaaatggttattatttggctccagtcccagatccagattctcatcctgtctacttctcgagtctcgtcacggttggttctgatatctacaacattgccggttcgcacgcctcctctaacgtctcgattctggattgccggtcaaacacgtggcgcgaggctccgagattgggcgtggagctaacctcagtttctgctagcgtccttgatcgaaagatatttgtagtaggaatgtacgcagatgatgaagaatctgaatccaagatcgacttctttgaggtgttggacacagaaacacacacttgggatcctcagcccttcaattgcagcgagacaaaagacaagtttttaaactgcagacccgcatttattgacggaaagttcctcgtgaaaccttggattcatagaggggtggttgcttacaattccaaggaaagtagatgggacccggttcaaacgaagatggctatgtccatgtttaatgattcttattgccaaatacaaaatgttatctacttagcttttacggaaggatcagatg

SEQ ID NO: 9587 - DNA, 996 bp, Arabidopsis thaliana landsberg
  unsure (1)..(996): unsure at all n locations
acgtgaattgccacttgtcagggaatatttaatcattttaaaaagaagtaacaaaaanaacgtgttgccgtgtagaggggtgcgaggagaatctgttaaatcgtcgctatcaaacaagaaacggtgtcgcattatcgtatagtcctcttcctcaaaatcctacccaatataaacagagccgtacaacaaaaaactcgatatcttatcaaaaactcgctctccatccaacaaaacccgaagaaagagagattcagactcaaatctctcagtaggaatggttagttacgttaagatcaaatactctctggtttatatctctgtcagaccatatctgaaaatgttttaaatttgttcttcttatgtaacgaattggggtatttggtatgcaggcaagtgaaacagagaacatcaagtatgaagaggtatctgttctttttttttatatatagaaaaaatgaatgtatacatgtagatagagaaatctggtttttgattggtggctatttatttatgtatgcagagtttcatcaagaacactcgaggaatgaaactgttcacgtgcaaatgggtaccagcaaagcaagagccaaaggctttagtctttatttgccatggatatgcaatggaatgtagcatcaccatgaacagttgagatacttcagccaacttcatgatttcttatgtattcatcaaagataatagatttgttaacaattttatcgatgtatatatgattggatcaggtactgcgaggaggctggtgaaagcaggatttgcggtatatggaattgattacgaaggacatggaaaatctgatgggcttagtgcttatgtcccaaactttgacctctcgttgatgatgtctctactcactacacaagcatttgcggtaatgttgactttatttgtgggggttaaaagtgaaatattgactttttagacctagactatatcttttgaagacactgtcaaaaccgcttttttttttactcattc

SEQ ID NO: 9588 - DNA, 1068 bp, Arabidopsis thaliana landsberg
taatccaaaagtcagggttcttcctgcctagcaacaattcaactgcttttcccattgactctcctaacataaacctcatcgtccacttgttttcttccctctctatttcaattttgcattccaagagataattaagtatatgtcaaatagaaaaacaactttcaagatattcattatcagctgcttgcatcatcgcacgttcgaccaagaaaattcatattgattcaccaattatatagttttttccattacaacgtttttttgtcacacaaaaatatcaatcaataagttgacttttaccatcacaaagtcaacgttaccgcaaatagctgtgtagtgagttgagacatcatcaacaagacgatcaaagtttgagatataagcgctaagcccatcagattttccatgtccttcataatccattccatataccgcaaatcctgccttcacaagccttctagcagtacctaatccaatcatattcaccttgaacgttattttttttttttattgttggggtaactaagaattggatcttagaccagattaattaagcggtattagctatttccttgtctcagataaaagctagatgtaaaaatgtaaaaaaaaataaaaaattataatatatagaatttgtgaagtgggttgatctcaactattcatggtgatactgcattccatgccatatccatggcaaaggaaaactaaagcccttggctctctgtttgttggtagccatctgcatgtgaacaacttaaatcctcgagtgttctttatgaaactctgcacataaatatataatcatcaatcaatcgccagccttttctatatatgcgttgcatacatatataaatacacacctcttcgtacttgatgtcctctgtttcaatcgcctgcacaccaaaaccaattcattacaagaaatttgaaagaaaaaatacacttttaggtttaaacctaatctaagaagaagagattgttaatcaactaaccattacgtcacaagagattgatttcaatcactttttttttttctctcatgtaatcttggagacaagagttgag

SEQ ID NO: 9589 - DNA, 1454 bp, Arabidopsis thaliana landsberg
aacatctgatatccaatataatctttacaatacaactttaattgttaaataaacaaaagtaggccacttttattaaaaaaaactcaaaccccaccattttctcttgttcttctttatctatctctatctctccactctctgtcttacattaaaacctcaaaaacatttcctttcctctcatcaatctaaagttgaagtcactacgaagaaatagtaagtaaagaagttgaagatgatgaatggtttgagaagaacgttttggagttcgattcataaaaagaaagacaacaacagagtcgatgattcacttgatcgacaaaaaccaacaacaacttcaagattcgggtttttctctaacccgtctactccaaggtctgagacccgacccgattctgtaacctgctctcctaccattccttgtcagagttggtctgctacagctatctccactccttcaccgtctcttcccgctagtcccaagcttcaatgcaatacttccggggacgttactccgacgagaaacagaagtcctctctctttcctcagcgtttcttcttcttcttctacaccttcctcacctaaatctccggcgagcttttctctactcaaatcaaaactctgtttcaccaaagtaagaatcctaaatcgaaacaaccaagttaacatttttaaaaataactcaaagttaacatttttacgtttgtgttatgaacagagtagcatcagtagtagcaaatgtggaatttgtttacaaagcgcgaaagctggaagaggaacggcgattttcacggcggaatgttcacatacgtttcatttcccttgcgtagcttcacgcgccggtgatcggaatctactctccgattgtcctgtttgtggtgcttcatggagagaaacttcgcttcttcctctgtctctctcttcttctctccacgaatctggatccgaatccgattccaagatccgagaatcaaagaacaataacaaatcgttaagagtttacaacgacgacgagcctttgatttcatctccaatctctcgtaccggtttcaacactataccggaatcaaacgaagacgaagaagaagaagataacgatgacggagaatttaaagggttttacgttaacacgccgtcaccgttaacgacgaagaaaatgttaacggattccgttactggacacgtggacgttaagctgtcttcagaagctgcaattgtggcggttgggagaggtaacgagacgtactcggtgctcatgaaaatcaaatctccgtcgttaccgacggcgcgtagatctccggtggatcttgtaacggttattgacgttagcggagggaatattgagatggtgaagcgagcgatgaggcaagttatatcgtctctacgagaaacggatcgtttatcgatggtctcggtctcgtcgagctcgaagcgattgacgccgttacggagaatga

SEQ ID NO: 9590 - DNA, 1220 bp, Arabidopsis thaliana landsberg
tatctcaatttcagtttgtcattacactttaattatttaaatttctcttacatttttttcacagaacatggattgttgtttcaaagggtctcctctcttggcatcaactatggtcaagtcggcgacaatcttcctccaccggacaaagttctacaactcttgagttcactccatatcaataagacaagaatctatgacacaaaccctcgagtgttaacctcatttgccaattccaatatcgagctctttgtcaccgtcgaaaatgaaatgcttcccagcttagtagaccctcaacaagctctccaatgggtcactacccgtatcaaaccctactttccggccaccaagatcggaggtatcgccgtcggcaacgaactatacactgacgatgactcaagccttatagggtttgttacatacatcccctcattcctataaattgttatccttttcaaatcttggtccattacaaatatgccctactaaccaaatcatggtagtcatgtgggtatcatcctgagatcctctagttcaaaaaaagaagaaagtattcaacctcgttattgctatgattcgcaggtatcttgtgcctgcaatgatgggcattcatggggctttggtccaaaccggactagacaagtacattcaagtatcgactccgaactcactatccgtccttcaagaatcttaccctccatccgccggatgttttaggccggaagtagctggcgtaatgacacagctactaggtttcttgcgtaacacgaattcccccttctggatcaacgcttacccttacttcgcttacaaggattccccaacaaagatcccattagactacgtcctcttcaaccctaaccctggaatggttgacccctataccaagtaccactatgacaacatgctctacgctcaagtagacgctgtgatctttgccatggcgaggcttggcttcaaagacatcgaagttggggtctcggagactggatggccgtctaaaggcgatggagatgaggttggagccactgtggccaacgcagccgtttataacaaaaatattctaaggagacaacttcaaaatgaaggaacgccattgagaccaaacttgagttttgatgtttatctatttgctcttttcaatgaagaccttaaaccaggaccaacctctgagaggaattatggattgtatcagcctgatgagaccatgacttacaatgtag

SEQ ID NO: 9591 - DNA, 1279 bp, Arabidopsis thaliana landsberg
ttgtaatgaaagaaataaaaaaattgagttcaaattaatagctaaataatagtcgatttctactcacacaaaaagggttatatccttagtggataagaattatttcaatataaaaaaattcgtcgttgttcaactacgtcaaaatcacaggactaatttcaaatttattttgggtattcatattcatgaacaacgagtaaaacgaaagtatgtatatagctaaagacaaagtagatttgtacacacaacaaaatggcctgaacatattgataagaataaataacctaatatagggtttgtatacagaattataactttcttccttcaaacttcaaaaccaacaatggatttcaaaactatatgctgtattcactattcagattgaaacatagctagagaatagtagatgcctacaaaaacacacatatcatgccttcattttaggttttttttttttttttttgatgacaacctttattttaggttatattatttaagtaggcaatataatatagaccaatgattgtcttatctttagtgagaatagcatatggtacccatccacccactgtgactcctcctcacaacaaataacatttaaattaaatgttatgtttgtatcaccatacatataatggtgtatattgatgcatgcatgtatcatatgtagagagagatctataaagcttcataaaagtgtttctctagaaaaaacgacaaatttcgcagagaaaatccaaaccaaaagtagttttgtaacagagagatagatagaaagctcttgaagatctaaccaaaatctacttttgttcttcttcttcttcttttcataaattttcggagtggtcctatttattgtttcttggatcattagagagacagctattgatggatgaagatggaaacttgcagattagtaatagtaattacaatggagaagaagaaggagaagatccagagaacaacactttgaatcaaccactgcttaagagacatagaactctttcttcaactcctcttgctttggtcggtgccaaggtttcacacatcgagagtttagattatgagtatgtcttctttatcttctagatcttgattatttgattcttattctgttttcatatcgaattttacttttcttgaattgtttgttggatgagtcttaatcttgttctataaagagtgacaaaaaaaaaccttattctataaagttttgagctttactctgtttccagataaatcttcactttctgatggtttattgagtttgccattatct

SEQ ID NO: 9592 - DNA, 941 bp, Arabidopsis thaliana landsberg
ccatcaaattcgtattatgccaattcatattttaagcgagagtcagttttttttctttatcaattaccttctttttgacagaacagcttggagcacaagcacatttgaagtaagctcttggagatggattgtctctagtcactttctgtccatatttcctccattgatacccatctttcacaacctataagaaacaacttctacaatcagtaaaccatataaaataaagtttctaaagatagatagataccaagtttgatcattttcatgaatgcttacgagggtagtgtcagaagcttcggtcttgtaatagacccttgagactttctccttcacgacagtctcttctctctgcttcttacacaaatactcatcttgatccgttgagctactctccgacactccgccaataaccgcgcagctgaatgcgtcctctctcgccggagatttgcgtttcttgggagggctgatttgatccctctcggttatgttgctcttgttaacatattccataagttgcttcctcaagacgttgtagttgtcacacatcaaagttagcatctccgagagcttcttgttctcagcactaactcggtttaattcttccaccaaagcacttgtctgcaatttatcatttatatatatatatatattgcatgaagttagtaaccatattattttcttcatactataagtttaatatgattttatgatctagcgttacatctatatttcaagaacccaccacatgaattactaacgaatttttcttgttgttaaagtttatgccaattatatataaaaatatttgtgaagtataagaaaatatctatgtttatagattatacatctgaaaaaaatgtctatggatagttgagttagtttatatattttcaaaaccaaccgaattgaaaaatgtaagtgtataatacataatgatg

SEQ ID NO: 9593 - DNA, 1926 bp, Arabidopsis thaliana landsberg
  unsure (1)..(1926): unsure at all n locations
ggaggccccgtcactctttgattcaatggcctacatgggattcaaacctaagattgtcatatgcaacattgtgactaatggtgtttgcaaaaacagagatctggataacactagattgctttttcatttttttataaatgattttattttgcttttcgttattaaaactatctagatttaaagacgtttaatataaatggtttagtaactgtttaaatagtctttttattgggtttagttcaaaaaccgattaaaccaagtttatggagaaataagttccgaactatcgatttggggagatataagttgggaaatttagtttccgggaggggggggggagggataatggcctatttggtacgttgtaatacttcttgtggagaaatatactatgttgtttttctatttcttcactaaagtttttacttttttattctctggatttttttctgtttttatttccttcacgttgtccccgtgaaaaaaacaattatttttccacacaaattaattttgagtgaagtttctagctactctcaacagcatttctcttgatatttgatagttttacctttttttttttatcttgatcaagaattggaagaaaaatgctcagtggtaatggttcgatccatatcgagcaataatatgattaataaaattacaatttctttttacatcaaatgagctttttctaaacttctatatttattccaaaatcaaataaattttttttcaggaattgattaattgcttaacccatacaagagcaaattgaggagaaagatgagaagatgatgaagagaaaagatagttgagcaatggaggaagaagaagttgttctatgaagaagaagaggaagtgttgtgaagaagaagaattatgactttagtcacaattggattaagaggccattggggtagaagataagtaaagcccaaatagaagttggtttgttttgtttaatagaaagttgaagcaccaatgatgtagattggagaagaagaaacgtctaatgtattgggcttatatttttctaatttgttttttttggcccatctccaacttaacctccctttatataataaacgtaaaagttaaattaaaacctaataaaaaacgagataaaaggtattgttatcgtaattatgatttttttttccaaaataaaaaactagaagaaatagtaattaatgtgtactttgtaatacaaccgtagtttgttgtttccaaaatgttgttcgcattgtgtataatgatagcttattgtctaattgttgtgatctgcttcttttttcatgtttttgtttttacttttgagttatacatatagattaacatatatgtcaatgttttttaacccgactcgcacgatgaaccggactactttcgtgatcaccggttcattgagtcaatccagttcgatgacgggtcaatttcttaaagtttttttaatgttacagagattatatagtttttatatataaaagatatattatatttaacaaagtaatatatttaacaataataataaagtgattaattttttaagtccaactaaagtataaagccgtaacaaatatgaaaatagtggagatcaccgatgacataaataaactaataaaacatcgcggatttaaaacaacgaatctcgattttctctctcatcatttcattcactcttnnnnnnnnnnnnnnnnnnnnnnnnncaatttaaaacatcaaatgagtatatgaactagaaaaagttataaaaataatataatatagtctaaaatcttttattgtagacctttttccgagatatcctatgtattttttgtttttcttcataacgnttctaattntctatcctcttgggttntgtctggtttcattttcttcccgtgctccatgaatttttttacttttccaccaaataatttt

SEQ ID NO: 9594 - DNA, 1698 bp, Arabidopsis thaliana landsberg
accaacctcgtgctccacaggatccaaaaggatagtaaatgagacgtagaacgacccaagacagcgcgaaaagaacaaacgaaatgctcgcgagactttctgctccgcaatatttagacattttcccaatttcaaggaacacatcgctcgcatcatgaagtgcaagaataacagaaccagcacgagttaatctatatcatcaacatccaaaaacaaaacaagagtcagtgtatcctttcctccacaacacaagtgtataatatacgtacctgcagatataggagaggacaatgagaacaagcgttgtgatatgatgacccatggaaactccgaaatcagaccgtcttgtttcccaaaacaccaacgcgaatatagagtacgtgtagaatccagcagcaaacatatataaaaacttcaacttcatcctgcacacatagcagtatcatattttagcaaatgaccatcacaaaagatatcgatgaccataacgaaacaacttacttcattggttgatcaggccaaatctgatctccaggaccaatccaaaagtagagagtatttgaaaaccaaggttcattatatgtgacagataaagcaagtagctcagctgatagatagtaaatacacttccaagctgattctttaaattttcgaacttttggactatttttcttcctgtcttttatgttgtcactcttattcgtactcatccttccatagatcacaagacttgccaatttctacaaacaccaataaaaacaaatatgtaagctttcacctaccaaacaatatcttcatatacattgcatttattttcagacaaaatctaaacatcagcagaatcatacagagagacaagactaatgattggtctctcaagggtcataactcataactaaaaagtagaaatccgaaagtaatattttttttttgggttggttggtgaaacaacaataaatgcgattgaagaaacaacaaatctaaaatcccatgaataagtaaattacctcgaagacgaatctgtcaagtagaaatcgaattgtagggaagaacactgcaaagagaggcaaaaaccctaaatcttgataagttgggaacgattcttgttcccaatcgattgatttcaccgattcgaagagacccatctctgaaaaatcttctctttacaatcacataagaaggaatctcgtgggggttgaccagaagaaagcagagcaaaggagaatgagataaaagaaagtacaatgctttaagttagatttagtagtagatctctcaaatttgattttatctgttacaataattatgagttcttgatcggatcagaatttattcgagaatgtatgtaagttgcacttgctggagataggccttaggttttttactgatccattctcgatgggctcttgtttttttttttttttctctgcgtttcaattattttcttgaaagtaatgaaattatacatatcttttatattatttaattcatagcattttaaaaactattactattttttttctttttctaaaagctttattttctttttcaaattttcaaattatttattttctttctctttcgggaagagatcaatttgaattttttatttcttttgaaaaatatgttgattccagcaggcactgcccatcaataaagcaggtgaagcatttgctttaggccacgccagataaaaat

SEQ ID NO: 9595 - DNA, 1516 bp, Arabidopsis thaliana landsberg
gaaaggaagattgttggatacaaaccaaagatctctcatcggaagtttagaaaaaaaggtttctaatatataactcaaattcaactccaactagtataaagcctattgaaaaaagttcaataacaaatttttgtggacttaaacatgtaaactcaaaaagaaaatatcatactaaatagaaattatgaataggcttacaaaactcattatgttcttctttttttgcaattgttattaactattcaactaaaccttgtttgtttttataattggttggtcaacggtaatttttagcaaaaacggtttacaaattttaatttgtaagagatttaacattataaaatttatattgttgaatcgttatcactacgaactacaaaattaacccgattcacggtaatcaaattgttcgcaactataaaatgaacatattcttaattgtgataatcagtgtggcagaaatttgcgaaacgaacgtgacaataatttatccaaaatggaatatatgcatctatagaccaatcaatgtagttttgtaaatgtgttaacataccgtcaaataataataatatctattcacaacaactcttaagcaaaaaaaccaaagaagttacctcttaaaatatttaaatcagtatcacgataacatactttattcagtagaaaattatctatgcgatcaaaagaagtttaacggaaacatttataaaaaagaataattaatatctcaccaaacaaatgaaatggagaaattccaatggactctcttggttttgagtttttggacttaagactgcgggaagatcacggaacactttttgtccgaaatctgacgtggcagattataacggctactttgatgactcactatttctttttaatattataaaaatcgaagagagacgttaagattcaaattttttgaagacagaacaaaaaacaacacaaacaattaaaacaatcagaatttttctcgaattcatggaccacaataattactattcttcttcttcttctctatgatctctgcttccttttttctgggtatctaaaaaaactcaatctttatttctttttgttagcgaaaatggaggataatagctgtatcgggtttgagggatcgaaaagatttggtgagactagtaaacgtatcattggtttgattgactcagtgactgagtcaacgactgattcaagtcttagcagctcaagttctggtgttggatcgagctccgggaggtcttctgtagctgagagatctgtttcatcacctccgacgaaatcgcagattcttggatggccgttaggacaaggttcatggaggaagagttctggtaaaatgaagaagaaaactccgacaaagatcgatgattttgggtttaagagagttggaacagagacttcaggtttgtgaaaatcgtgaacattagctaataatcaatctctctcgaagacgacttaaagttttgacattttgatttgtttttgtagagattgaattgttgaaagagagaat

SEQ ID NO: 9596 - DNA, 1537 bp, Arabidopsis thaliana landsberg
gacgctcttatggttatctgatatgtaaggagaacttaaagccgatcgatggtttgtctcacatggaagttgttatggcttaaatagttgttgttcacgcttgggatttatcatgatcaaccaattgttatgtgttgtgataataaatctgcaatctacattgcaacaaacccggtgttttacgaacgaacgaaatatgtagaagttgaatgtcagtctatatatcactctattcctgatgaaattgttcaaggtaacattgcacctcgtcacattggtacaacttcatagttagcagatattctaacaaaacctctggtcatagataattttgcagtcttcaagaacaagttaggcatacgaaatttgtctgctccaattgagggagggttttgaagatgaaaactcggtttggttatcaaactggtttactaaaatcggattggtctatattaacttggtcataacgttgtgtgagtaaaagaattggcgttaattgaggaaacgattcacaaatcagtgattttctaatgtttttttccttaatttgtaaagatacgtatcagagagtagcatgacataagatgttgtttacctatatattggctgatataaaataattgtgaatgaaaaagaaaactcttgagcctctcttctttttaggaatttatcgagtttcggtcataggccaaagaaataagcaaaagtcattacggacaataccaaacgtttagttatcaatgttcgatttactaaaagctaactataattactgtttttcacggctaacgataatttttacttatcaatgattgtcttgactcttgacccaccaaatcattgtgttaagaaagtcaaagcatgcatagatgtatcgtgatgactggggacgaagctacgttttacatatgaaggaaccaatgagtagtggtgggacaaagattttgatacaaagaaatttaaaaacattcggcaagagaccaaaacgagcatacgttaccaaaccgtccctaccgttcatcgatcgatggccctaaggatgatcacgtgacccatcacgcgtcgaagtttagtaagtccaccgaaaagaaaagactttttagtatcccatcaacctctatgccttttctttaatacaagttgttgcaatttctaggttcttttggccaggttttgtgcctacactttttcaggttctataactaataaaaatataatttatacatattttgaaaaaaatgacatcataaaacaaaattgtaaattgttagagacagttaatgttatcttcttaatatgtgaaatggacctttaaactctaggaaagtagcattaaaattcaatattttacttatataccaaatgaaaatttaagatttttggaccttaattaaaattggtactattaatgatctaagacagatactatatatttttgtaattttgtttttatgtcactggaagaagctgtattgtctttttgctttggcttcttatgatccaattatctgtcgatctataatttcttaagttattt

SEQ ID NO: 9597 - DNA, 1156 bp, Arabidopsis thaliana landsberg
ggctcatctctatcatttactaaactctgtccagttgatttatgtcggttatgaatgctactgtgtttttggcttgctactgatcacaagctcacaacaacacatttaaatacgtgcgtaagagaccaagtatgagtcatgagtcacaagtaagaaatctaatgataatgatattgataaaaactgagtctcaacaatagaaataacagcccaaaaacagagcaccaacactccaaaacaaaacaaggatgtaaatcaaacataactaaacattattatcttcgcttctcttcttcaattcgtgaaaggagccacgctggtcctcctctatctaaataagaatgaacccgccgatctcttgtaacgcttgaagctatctcaagactcatttttccacacgtaccttcagaaaggagagaataggcacgtgtcaatcttctctcttgctacttgattcgtcgagtctcttcttctcttgtatcgcctcttactgcaaaaaaattccaaactcgaaattttaatcatccccaaacatgaagaccattctacatttaggtcttacccaaaattcgattattcacacaaatgttgaattctctgttgttgatttattcttgaaaaatcccaaacgggcaatgcacagaaggtgttcgataaaattccccaatgatcaaaattgtgtttttccaagcgttgtcacgtggctctcacgtgataagccgttaaatccgttgatattcccgcttttactcatgcttcttcttgtaaaacacatatctctctaaagcagaaagcacaagaaccttgagagtcgtttctatggagtctactactttcctgaaagatgctgtgagcgtaaaactccacgcaaaggcaaaagaactcttcgctaatggagatcacatcaatgccttggagataatcgaagatatgatttgtgtcaataaggaagacaagaacatatggtttctttattcggaacaaggttacatgtttacgaaactatcggaaaaagcagagaaccttgacgttgatttcacattcaagttaggtgctgttggatgttcttcggaacatgagaagttattaagtttgtgtgcacatggattccacactttggctcaccatattgggtcagtgatgtattacaaaaagt

SEQ ID NO: 9598 - DNA, 1106 bp, Arabidopsis thaliana landsberg
agcggatctaggtgtatggaagatgggacacgtgccctacactaaattataaatattatcttgtaaatatatggagtttaaatgattcagcacaaatggttaagtgttttcaatattcgtctttctttacacaggtccgaaactagttgaagtaacttttttctttttttaactttttttttttcttccccacttttatcaattaaatcacttgtatttcttcttttcatttatgaacattcacttttaactttcttttaaattttctttattaattgattaaatagtatgtctgctgatatatttctaaaatgtttgatatatatatatacgtttacttttatgtaaaaatgaataacaaaattatatgtacacaatttcatagtttttccttggatacctatataaattgtgagaaataaattacagatttgttgaactacatattttatcacaaatttatagtttagtaacgaatagtatatgtaataattttgataaaacaataatatataataagtagattaatagtgccttaaactaaatatttttctagatccgccactgtttacattatcaaaatattgatgtttgtcaagataattgcatgctttttgggaaagatgatgcatcattagagaattgtaagttctgtggcaaagatagatttcgtccaactcagcttgggcataaaagagttgcatatcgccagatgttttatttgccgcttgccgacagattgaagagattgtatcaatctaatataatacgcagaacactcggtgaaaagcggggaaatgtctcatccatctgatggagaatcatggaaacattttaacaaagtataccctaattttgcgtctgaaccaagaaatgtttaccttggattatgtacagatggttttaatccatttggtatgtcaggacataactactcattatggcctgtaatattgactccgtataatcttccacctgatatgtgcaagaacgagagtttatgtttctctcagttctagttcatggtccaaatcatcttaagagaagtcttgatattttttttcaaccattgatagaagaattgaaagattagtggtatacggcgt

SEQ ID NO: 9599 - DNA, 1066 bp, Arabidopsis thaliana landsberg
gatatcaaatctgtaaatgtgtttatggtagatgaagaaaaaagtcctggtgtctgagaaagaataaaagaacaagaaagaccatctctgtccttaaaaatgagatcccttgggttgtataccttgtgaaaacattgatatcaatctcatgtttagttcttctcttgaaattaatgatctgcttggtttgcagctgagaaagataccagtaagggtgcaggatgggaaagatttgaattcgacaaagaggccccagttgatgatgaggaactagaagaaggtcagtttcccgtgaatctctacctttactccatgatttcgatgaacggacagagctaaagccggaaatcattctcagttactctgtactcttgatgctaaaaacttcatatgattgcaggtgctgatgatgatgctgccttggtcaagcgcatgggacaaagttttaggttttccgccatcgaggtttactgagtcattagcttacattgtcaacctctaatcaagtcacagtttttattatatcagagcttcagacagtttatatggtttaataaaaacttgtaaggcaaaaagggaagagcagttgaaagccgcccacgatgaggccatgtttggagtacccacaggccaaactcctaccgagaacaccggcgatgatgttacagagataactaatgtaaaggacgatgaaggagaaagcaacagtggcgcgataagtcttctaagtgaaaaggtaaaaatttgtgagctctcttcatttcttttgctctcaaaccaatcgagattcttagagctccattttagggtatgtacgtaagcttgttaatccccatactttgtgttttaggtgcttgcaaaacagcaaggatcttggcgtgacagagctcgcaagtcatgaaattcatacatatgtaatggaactatggaagtcgtggtggttaatctagtttatagttgacaaagttttgatcgtatgttccttgtagaaattttgatgaagtgtttgaaagtgtttgcgatccatatagattgcccatcgatggaagatataattggatcatgt

SEQ ID NO: 9600 - DNA, 1146 bp, Arabidopsis thaliana landsberg
tgcaaaatctcagcttatttatgatgaattcacagatcaaagttgtactaagagctgatgtctcagctgcaaattatgacaaggttgccgttatatcaggttggagtttacttgtccaattcttttttattacaatttgagtttcgttttcgtgttatgcaatgccatttttgaaacaggaggaggaagtgggcatgaaccagcacaagctgggttatgttgaagaaggaatgctcacagctgctatttgtggagatgtttttgcttcgccaactgttgattccatcctagctgtaagtaactcttcccacataacgtttcttcttcttattccttctcttgtgtctttcgagaaaatgatgaatctttgtccaattccaggggattcgtgctgtaactggtccaaaaggatgcctcttggttgtcacggtaaataaaacatggctagacttattcttatgtatatatcaatagctttgaaagactatccttcagtgtctttggttaaattagtttctcttttacatattgttaatagaactatactggtgaccgcttgaactttggcctggcagctgagcaagcaaaaactgagggtttcgatatagaggtaactatatatttattgtttagaatttggtaagaacactggtggattggatgacatgatcccttttgtagactgtaattgttggagatgattgtgctctacccccgccgcgtggcgtagctgggcgcagaggtttagcgggaacagttcttgtccataaggttctcagttttcttctatgttgtttttcctctatctgcactataagatagcatttcttagtagtgtttgcagtcacttatcctcatctttttttattattgcattttcttatatttgtctgtgatgtctaagtggcaggttcttttgtgctcttttgtttttttatatcctttgttattgtttttgttaagggtaggttgctggagcagcagctgctgctggactttctctagcagaagttgcagcagaagcaaaacatgcatctgaaatggttggaaccatgggtgttgcactatctgtctgtgcgcttccaggacaggttacatcagatcgtttggggccagagaaaatggaacttgggcttggagttgaaa

SEQ ID NO: 9601 - DNA, 818 bp, Arabidopsis thaliana landsberg
cattttaagagaattattataacctatgatctgtctgatcaaagtttcttgttaagtaaagattaacagtagagagaaccaacattaactaattaagtataaactaggtcttacttatggccgcccatagacccactaaaagtgaggttcaaatggagcttgtacgtatgcataaatcaatatccgactaagaccaaggaaacatatattaaaaacgttacaggaaaaattgttaaatacttttggtgggttacacttataagaccaagaaaccaataaccgaatctttatttcaaatggagcatgtgtacgtagcacgaacttattgaaccagtcaaccagatgcaaaacagccaacccggattaaaccggaacatgagcttcacggttttatcttatctaaaactcaaaggaacaagcacgtggctctgtacctcagtctgcatgcagccatgttgttcaccatccatcactatacgtcaaaatccgccccacaaatattaatattttcatattctcaacaaagaaaaaaactccattttaatttaactgcattcctcctatctttcttcttcgtttctatagcctcactaaacatctcttgttattttcgaaagtgaagagaaaaatggtggatctattgaactcggtgatgaacctggtggcgcctccagcgaccatggtggtgatggcctttgcatggccattactgtctttcattagcttctccgaacgggcttacaactcttatttcgccaccgaaaatatggaagataaagtagttgtcatcaccggagcttcatcggccattgtaccgc

SEQ ID NO: 9602 - DNA, 992 bp, Arabidopsis thaliana landsberg
acactttgtattgatcactagttggatcattcccgttataaactttttacgagccttctctttgttctgacgcttggtggagttatgaatctaccagtgctagggttggttacgatttgctctcgaccatatccaacgcttatcaatccatttacataatgacaatagtactccatgtgatgagggtatggggacgacggacatgtcaaacgcgatagaaaagacgttgatgatgatgaggaagacgatgatgagaagaaggataacttgtggtctaccagtaccctaggtttaaaggggtgaagacagttgaatataggagcggaagcgattatggtacaaggctgcggcgaccggaaagatgtgatgaaacttggactgcggatagttgctgcacatgacttggatagtgtgagaaacctagctacagatttcaaaggcaacctcctaaatatctcgatctctaggtccagaggcagttgatcaaacttgtttttctcttttgacttttcttgattgttctcggttttggtctttttgctgcgtgtcttcatgatcaatcgctcttgtttcgaaaccctaaaaaaggctctccgtctaggcgtctactctttgctttgctcttttctagcaactagtaaaactatatatatataaccaatgggcttgttgagtcagattttacaagcccaagataaagtctcatcagaagcccacttaagtaagtagagattttgtgtcgagaacatcaatatatatatgaaattaatccacaaatcagctaaatcttggtgacagtttcttttcctcttttacatcttttgttcaacaaagcttcatatgacctatcttatttcttagcttatatatatctatcttattaagttattcaagatcatcaatcttcttgctttggatttgacatacagaattaaaccaggagtgtaaagacgttaactgaaacacctatataaccttacacacttgttata

SEQ ID NO: 9603 - DNA, 2464 bp, Arabidopsis thaliana landsberg
  unsure (1)..(2464): unsure at all n locations
tacatgatttgttttggatgcatgcggtttgataacctaattaacgcaaatttcctttgtatatagcctttataatttgttcttattatatatgatcaactataattaacactttttgatagatgatatcatcttatggttaaataaaagtaaatctttatagttttcgacgaatggttataccaatctaagaacattttcgtttgtaaatttgttcaactgcctctacgtttgatacgagaagataaacaactttcgtatcaagattagaaaaatccttaattcctatgattatttgaatattaagttaccagtgtaatggaaaatgcataaaatgtaatctaaatttctctttaacacagggaagaagctaccttcgtacttgaaatcgaattcgagcggttttgcatcgctttcaaatcgagatagagctaaaaaggtaacacttccctaagaatatcatatatacaaagcactctaaacaattatttcatatagtatcatcaaatcaaaatgctagtaccaatatgaagatctgtctttatcatgaaagagtcacaaataggctctctcatcatactattttcaacatcgtcgaatgaaatcagtggacgacggttgaggttgtagctcgtttgtgttcgggtcaaagccacgcccacgacgcttgttgatcaactccatgagcgatcggtgtagcacctgtgttctcgtgtccaccagcgatctcattttctgttgtagccttactcgtctccgttgttgctgattttgatcatcatcaatggcaggtgagtagtggtatgttgaagaattcagcaacctgttagagcttctattgccatcatccatatctgggatcacatcgttactagaatcgtcattgttctctctaactgctacaggagagtcgtgagaggaagaagcagaggagaaaaggcgcgttcttccctctgtgtcgccattgtcctcatcatcttcatgaccaaagctttcgtgccggatagaagagtcattggccctccagttggggacgagcaaagatatctcattttctatcattgcagcgatctccaaaggatcccaatcagtgatctcaagctccttcaccatctccaaagctacttctagaggtgtgtcacttaaaatgttgaacgggaactgaatgttcctcatgtgacctgtgccacagccaaacagattcataaaaacattttccattggtgattcttctaacaaagttttacaaaaatcagaagctaaggttacaatcgtccatttctatcttatgatgaatagctaatactaaaggtgctacaaatcctgtagcccggttcagctgagcaagtttctagcaacgcaacaaatttcatgttccaatcaaaccaggcaagacatttgtagtaagtagaactttaacttaccatcgccatctagaatctgtacttgaaggaagatggtgtggccttctgagttcatctttcctgttattgacatatctgttgatctagttggatcagtcgttgacggcagatgctctaccaccgttccatttgcagccaaattatggattgcaattgtgccggcaatctaaaaagaggcgccaaatctctctcatcagtgcgggcaaggaatgggtccgctaagagctcctttgcaggcaatcttcttgacacagtttccaagcatttaccaacaaaacgttgggcctccgtgtgttggattagatggaaagagtcaggcaacttcccctgaatcaaatccgcatcaaagaagttaatatatcaaaatattttctgagaagaaaatgatgattgatatgagcctcaggccattagcttaccgatgtaactttcttgtatatttgggcagggttggtgcattcactataaggatactcaccggtaagcatctctaggacacacataccaaacgaataaatgtccacaagctcgttgtaatcttcttcatatagctctggtgccataaattcaggcgttcctaatggtatatgcaagcaaaaggcagagattaattatggaactcacaaaactctattcaaaaacatagagaaagacatagaatacctatgacgctgtgcgcattctgtgatccacgaagaattgcagctaagcccaggtcaccaatcttaacttgccctaggtgtccattaacgaagatattatcgcatttgaggtctctgtgaatgacaggaggatcatgtccatggagataagcaagaccattcaagatctgacgtgcccagctcttgattgcccggatatcaaccttttgatacttccttctatacctgtagatgtaagacacacacaacaagcttctctctnnnnnnnnnnnnnnnnnnnnnnnnnattatattgttgtttaacacacactgtaggggattctcattacaatctaaaggtgcaagatgtaaacagatcagtaatgaagttgaatgttc

SEQ ID NO: 9604 - DNA, 1040 bp, Arabidopsis thaliana landsberg
tctatcagattatcatatggggacacacgggaccatgtcaaacgcgtagaaaagaccagttgatgatgaggaagacgaatgacaagaagtacaaccctttggtccttagatttaaagctggaaggcaagttgtggcaagtcctgattgtagcggcggaagcgattagggtacaaggctgcgacgggaatgatgtgatgaaacttggactgcggatagttgttgcacatgacttggatagtgtgagaaacctagctacagattttaaaggcagcctcctaaacatctcgatctctaggtccagagggagttgatcaaacttttgtttctcttccgacttttgtagatcgttgttgttgttcacggttttggtctttttgctacgtgtcctcatgatcaatcgctatagtttcgaaaccctaaatctagaatctaccgcgcgtgtcctcggaaatgggcaaatcaccaaaagaagatcaaagaagagaaatgatcatcttaggacaaatggatctgatgatgataaacgactgtaaagaagacgataattgttattttggttgactgattttagctaatggagaaaggtttacatttcctcacaagctacaacctaacaaaagagactcatacacacttgttaccatttcaattttcattcaaaagtccaaagccttttccttgacctacttactccatctctctcttcctctctataattttccattagcacataaacattcatgctttacataagttttaaagtaaactaagcataactattgacccaacatttgctacaacttgaaaataagcataagtattaaagttaaccaaacatttgccgctagaagcagaacaaaccctttaccaaaacaaaccccatcatttgaaacatacaacctgattactatgtccaatctccatatacacaaatagtgcatttaggtagtatactcaattaaaccaaaaaaaaaaagaacaagacttcagcagagtaatcaacgaaattacaaaaaataagattacatatatgggtatc

SEQ ID NO: 9605 - DNA, 1431 bp, Arabidopsis thaliana landsberg
atacacgaattaatacaccaaatatattagttgactacagaagaagctggattttaagtttcagagtagtttttttttgttatcattagttgacctaactacaaagataatactaactatttagttaattaatctggtaacgaagagaaggcattgatttaacttaatacaaagaagtaacattgtttaattaatttgatcacgtagagagcggaagatgcctataatactataatatatctatatggccatcagaattatatttattttcttctaaatattttgatgtcacggtaatcttcattgcatgtgcatatgtgttctaagatcgagtattagccgctctcattatcttttttttttcaattaaattgaaaatatagttcaatccaaagcaaaatttgtgttgggtgcaagtttattactgtaatatattcggttttacccatatatatttgaatagtaaatggaacaaagatgatagagaatctctattagagatagtgtgatcccaaaaaaagaagcataatgtgctccatttcctacagcgtgattaatggacaaaccctcactcagtcatctccatgtgttgcatcctttttcatttttcttcaatgctaaaagatgtgtgaacttctctttatcattttcttcttctttttttttactttggtccactttagcccatccgttcacccaccttactaagcaagccccgaaacttttgaaaaagtcaaaaacaaccccaaaccgtctcactcctttcctttatatatactccaaacgactttaccttccaaaaccacacactctcaccaaacgttctacagattcgtaaatctcataaacattatggattggttctcatggctctcgagaacaaatctcgaagcttctctcatctacgagtacggtctctctttctcaaacaacgagctcgagtacgaagacattgcttacttcaaccacgaatttctccagagcatgggtatctcaatcgctaagcaccgcctcgagatcctgaagcttgctcggcgtgatcggaaaccttcaccgctcaccgctcgttcgattttcagagtcttgatcgccatcaagaagaccgggaaatgcttctccgagcatgttagggcctggatccgacgagaggaatcgtcccgggctctggtcgttgtgtcgagaagcacgagtagcagcgggaacgggagatggaaaagtgcgaggaagaagagattggtgatgccgagtaacggaaatggcgtaaaggaagagagactcctgttgacgaatggaactccttgtaggctcgatagcttctccaatccaaaggtttattcaggttatgaagatgatgataatcattggggaaacaaagatgtagaagagaagattaagtgggattccatgtttcagaaccttaaacctacttga

SEQ ID NO: 9606 - DNA, 409 bp, Arabidopsis thaliana landsberg
aacaccaacctgcagcggagaaacctgtcacgcaacagcgggtcaaaccgctattacattcatagcgctttacttgatcgcactcggaactggagggatcaagccttgtgtctcttcctttggtgctgatcagtttgatgatacagacgaaaaagagaaagagtctaagagctctttctttaactggttctactttgtgatcaacgttggtgcaatgattgcttcctctgttctcgtttggattcagatgaatgttggttggggttggggtttaggtgttcccaccgtcgcaatggctatagccgtcgtgttcttgttcgccggaagcaacttccccaggctgccgaaaccaggaggaagtcctctaacaagaatgatgcaagtcattgtggcttcatgcagacaatct

SEQ ID NO: 9607 - DNA, 741 bp, Arabidopsis thaliana landsberg
aattctgtttcttcgtggagtcacacatatatatatatcgcggcttatctgtctaaatccgataattagtcgtagaaatatcgttgtgtagattttacttggcaaagaagtcatcttttgtcctttttctcagtaaatcaggtcaaaaattctcacattgttgaaaactcaggggtcacacttaaacttgtcgaaaccaaacaacaatggaagatgacaaggatatatacacaaaagatggaactcttgacattcacaagaaaccagccaacaagaataaaactggaacctggaaagcttgcagattcattcttggtattgttcaaacctttaatcttttgttgtaataaaaaccaaatcgtttttttttgttctgaatttgatttgattgtatctatgagcaattggcaggaactgagtgctgtgaaagattagcttactatggaatgagtactaatctcatcaactatctcgagaaacaaatgaatatggaaaacgtctctgcttctaagagtgtcagtaactggtctggaacatgttacgctactcctttgatcggtgcttttatcgccgatgcttatctcggtcgatactggaccatcgcttcctttgtcgtcatctacattgccgtaataatttactctttgctctgtttgctctcaacgtgaacaaagaaaatcacagaatcttgaaactgtttgctcttttttttttgtttctgtaatttagggaatgacgcta

SEQ ID NO: 9608 - DNA, 1752 bp, Arabidopsis thaliana landsberg
  unsure (1)..(1752): unsure at all n locations
ccatcgagcttgctcttatccgttaagctctcaaatcgaatcttgtcaagagcctacaaaaccgttcatataaacaaagataatcagaagctttactcaatcctctagggtaaatcaaaaactacatcgaagcaagaaccgttctatatatgtaactacaacacatgaagatcgagcacaagctaagaattctaaacttaacgtgatgcacaagccaaatcacgatttatttgaataagcaatcacaacgctaaacctacgaatccaacgctatcaacgaatccaggaattaaagaacaaacaacatgcaagaaaataggaagcggacgagtcacaccgagcagagagagatttgaagggaaacttacatcagaagagttactgatgagctcacggaggaagatttctttgttgctgtagaacgtgttgatgatcaagctaagaagctggttaatctcagcttggaaagcaaaagtttctgcatcagccatctgaacatccgccatcgcaacgaactttgattcaacgcaaacgagaaacgaaagagaatgctaagagaaaatttggaacttcgagagcgtttcgagagatttgtgattgttttgttgatttatgaagaagagaggaaaaaacaaagtgattttatagaggagaaataaagttctagtctcttcttttgaaataaaggaaaaccagtgatttctggattcttctttgaaaacgacgccgtatttcgatgaaatcaaccgtttttagctttgtgagcaacgaattccagaaagttcttttcgtttcgagactccacttgtttcaattccgaataggtctggcaaagaaatttcgccggttcagtgtgaactgaatgaaattatggttaaatataaaccaactctcatttgtcttcttcaccaatagtcattacaagaacacttgccatcttcaaaccgatgaaaccgattattatctctcacaatgatcactcgtctcgtacatannnnnnnnnnnnnnnnnnnnnnnnnnnaatcaccgcaaacacgcagattcttcattactcggatcggtctatcagctggaaacgtgatcagtccaaaagcaatagctaatctctcactatgataccttatggtttgattcttctcgtcaccatccacttctctcagaacatagcttgtgtctgcaatgtaacccgctttctccatctcttcccctaactcagccagcttctcatatatctccttgcttttctcatgacgtctttctccagctgcaaatgtatgaaccttgttcctttcttcaacccaacttagccctgtttccttcttttcccctcggtctcgaagcaattttctagctttagctgcgtcttcgaatctaccatcggctgcataagcattggataacgaaatgtgcataccggaactcactggtcctaattcgaagaccttgtcagctgcaaatgctgcaagctctgtgttcttgtggactgtacaactcgttaataaagctccccatacagattccgtgggatcaatcggcatattagtgataacttcgagtgcttcttgtaatctaccagctcgtcctaacatatccaccaaggaagcgtaatgcttatccgtcggctcaatcctcgattctttcatctgatcaaagtagtatctcccttcatcaactagacccgcgtgactacaagcattgagcacattcaaaaaagttatgaaatttggtttcattccagaaagcttcatcctt

SEQ ID NO: 9609 - DNA, 1007 bp, Arabidopsis thaliana landsberg
catatatccccccatttgttttgtagtaggactgtcaaaataagttattgtctatatgtttgttttgaccttgtttgcccaggtttctagtggttttgtgttgagatgttaatccatattaataaatgatggtcttgtgtttgtttgtatctcatcatcagttgctggatcagtgagacttgaagacgttctttctttatttgaggccactcaatgtccattagatatcatgtggttggcaatgttatcttgttaggcagagtatacatgatcaatggttgtgactgatgtgtggatttgttaaactgattatttgtgtgacaagaagacgcataatattcatcccatgcaggattggactaacatttttttactagtgcgaagaagacaagacatgtgaacttgggtttcgatttcttttaaagcccactaaaatagatatatataaactcggattgggaaacaccttcgccttaatttcagtgatcaagcatttaaatcatcttttcaaaactaaattctacttttacgtatccaaggggtatttttaccaactctgttgtccaatcccaatgctttaatgtactctaaaattctattaatcgtcgtgcatacatcccgattatttccaatgtacaaaatgtgttaaatccaagagaaaagaaaaagcatgcaaaaagcgtaggatactattacccaaaatcaaaaagccttgtcacttgtcaacaaaaaaacatactagcaaagcttattaaaaatatatttgaaaaagttagttcaaataaatataagtgaaatagatagtttctcactagatagatagtattaaacttttgatttgggtgccacaactctaatcactatttgcggaactagttcaaaacagtttttactaatggttaacatgttacatcaaatctagatgatcgtctatgtttggttgtctctaaattatggagttaaagtccttcgagaatgattttaagagtttgatcttactcaccacc

SEQ ID NO: 9610 - DNA, 557 bp, Arabidopsis thaliana landsberg
cccgattattttcaatgtacacgacatgttaaatccaagagaaaagcaaaagcatgcaaaaagcgtaggattctattacccaaaatcaaatagccttgtcacttgtcaacaaaaaacatactagcaaagcttattaaaaatatatatgaaaaagttaaaataaataaaagtgaaatagatagtttctcactacattatgtaaagtcgtagtgtattacaatttggttattaggttgctacgttatacaaatacagtacgtacaaaacattagatgtatctggctttcttaattttgctacatagtgatgttggattaaacaaacaatcaatctctctagaaacatttagaatgatcattctcttgcttctatatgaatttctaaccttaaggcttctcgacgggactcttttaggtttcctaggcgccggtggacaaattcttggcatcgccgagagaatctggtctgaacgagtcggagttttacaataatcgtcttcttcttcttcttctttcttgacggatgctccttctttgcgtgagcaattattcgtctct

SEQ ID NO: 9611 - DNA, 2152 bp, Arabidopsis thaliana landsberg
tcctatctctggaacataataaacttcaggtatgacttgagtaacaccattaactttaactttttttctccctttccccaccacagacattctcgtatcatttccaagcttcacagtacggctgaacccttcttctaactctgaaaaccactccttactcccagccatgtggttgctgcaccctgaatcaaggaaccatacttcatctctgtttgcctgatgctgctccacatacgccatcaataacagttcctcttcttcttctaactccgcataatttgcattcttttcccattctgggcactcatactgaaaatgccccaaattatgacacttgtagcactccacaatggcacgattagtaccacttcttcctcttcctcttcctctaccacgacttcctcggaacactccacgaccccttccttgacttggtctttcctcgtgagtcacctttaacgcctgctcttcttgtacatgcccattcagcctctgctcgtgaacaagtagactcccatggagctcatcaatactcaatgtactcagatcgtttgattcctcaatcgaacaaaccacgtagttaaattttggagtcaaggatctgagtattttgcttacaattgtgctttgttccatcacctcaccattggttttcatcttgttcaccaccgtcaaagttcttcccagaaaagtatcgatcttctctccttctttcatggccagcaattcaaactcctttcttaatgcttgtagatgtgccctcttcaccttcgtagaaccttgatactttttcttcatcgattcccagatcgccctagagcgtgctcttgtcaagaattgtttccagaatctctctatcgatagcctgaaacaaaaaattcttgaccttcaagtcttttagcttagcctcttccactgcgcttctttgcgcttcactgaccggtgttgttccaacgacaattgccggaattccttcctccaccaatctccacagttctctgctacggagaaaattctccattgtcattgaccagaaatcgtaatagccatcaaatctcgggatagctggctgcacaaatttctcagatgacgacatctctctttttctcacttttctctctctcttttatctttctctctcgatcactctctcacacaggttgtttcttgtttgcaagctctgataccaaatgtgaattgtttgactaaaagtgatacttcattaacgagaaaagatggctttaaatagccttacaaagactcgaaagaaacaacagaacaactaaaaaataggaacagactccatgactccactacacgaagtgactcaattccacatctccactacttagactcctccataagactcggacataattgactccagaagcaaaccaacgactaacaaccaaagactttttcaaacaccaacagtgcaacggtttattattgtgcaccacagatgacagtagacttgtggtttggaacccttatactggtgaaaccaggtggatcccttacaaatccaactcgccttatgaaatgtaccagaagtttgttttgggatacgacaacaccaataaatctcgctatagctacaaaatcttgaggtgttaccacggcttgatcgactttggttatgagtttgaaatctatgagtttaactctcattcatggaggagattttatgacaactctcctaattgttcctttgaatctaagggcgtgacactgaagggcaacacttactggtttgcttcagatactgaaggccgccacatcatactcaggtttgatttcgcaacagagagatttggacgtctctctcttctttatcagagtggtggttatgttgataatgttgtggaaactggggttttatcggctgttagagaagagaaacttgcgttgttatatgagaggtttgatgagctgaatgattcatcagagatgaagatatgggtgacgaatactaaaatcgtcgaggccaaagacttgtcgtggagcgacttcttggtagtggattcctctaaatttatggtaacaaggatgacgaatgtgatgagtttcctggtggacgaggagaaaaaaatggtggtggtttgtgatacagacattgatcaacatatgaacagattttacattgtcggag

SEQ ID NO: 9612 - DNA, 1508 bp, Arabidopsis thaliana landsberg
atatattttcattttttgttaatataattgtcaagtatattgtctatatgcatctctaaaagtgctaagtaatcacccttgatctccaccgttgtatgaaacgatctcgcttcgctggctcatgattgtagtaaacgtacaattagaaggctcgatgaccatgatgcctgaattatatatccatacatcatttccggtggccgacatctgaggaaaatggaagagaagatcaaggttacgtaagacgatgatgtcggcatcaatgaagatcactttgtcgtaatctgtcaattgccagagtcgaaacttgctgtagttgtattcattgtacgagtccttctccgcaagtgggtttctgattcgaatgatccgacgaagcttccatcctgcggcggcgagagctcgaagtttggtaatggagatggagtcatcgtggagaaggataagatcgcgtttggtgtttgtctgaaggaggctttgagccaaagttatggcaccacagacataagactcggaagagtgaagaacagttacgtaggcttcacgttttggtcgttttgtctctgcttctatcttcgttaggtcatacactttgtctacacctgctttttgtttttggataaaaaactcattaattcatttagtaaggccattgaaaaaacttcttcaacgattattatcaatttttagttattgctatatatgcatggataggttatcaaaaactacttcatccattgcattttcttaaaccagcaaaaattgcatttttgtgattagaatttgaattatcgtatttataatattcatatttagtaatcttaattaattgacaaacaaatacatagagagttgaatgtttttctaatatattagcatataagctatcattattaacctgccgtcaaaaaaaaagctatcattattaaccttattcgatgatcattcgttttcttaaaccacaagctatttagctaactaactcgatctaccaatacgaatgctattttggaaagaaattaagggtttaatatctccttaaaaagtgtaaggtagcttgtatgacaattcatatttggtggttagcaaaacgacatacctaaaacacaaccactaacatatctaactaattaacacacatcaatcaattataagcaaagtatagaaacatatcgagttgttttatattacaccatacagttggtatctttcacatcaatttcacttaagcaggtccttttatgttacaatgtcttagtcacttcatagttcatctgacacatttccgactatacacctttttacgtttgcgccacaaaacacggtttcgatttcaagttcagttcaacatatattttctgtttgtttagtttaattacttggaaaaagtaaccaaattcaaaaacaaaagagtggtcaaaataatttgctaatggtcctctaagtatattaaaaacaaaaaaaaaaaatttttggtttcatcataattaatttagttacttttgcta

SEQ ID NO: 9613 - DNA, 1626 bp, Arabidopsis thaliana landsberg
  unsure (1)..(1626): unsure at all n locations
cttttcttaaagatatgtaaccaaacaaatcatgaataaatattttaaagcaaatctcgagatttattagaaacaaaaaaggattatttacattaaacagagaaaatctctattgacattggccgtttcgtgatccgttgctggttttatggaaactaaacagaggaatccacaggttttcgaaagtaaaccagtttgattataaatagttcaacttgtcaacaacaccccagtgacgcttcagttacttatttaacgtgattttttcacccgtcggtaaaaaattaaatatcattcttgactttactttatttctatgttagatgacacatatttatttcattactttcttaccaaaaggcaaaacccacaatcgagttaaacttccactgtaatggacctaatggttgcaattgtctatccacacacatctactacgtttctcactagaacaatcacctacaaatttcatggtaaattcttctatacagttaaaagtaaaacactcgaataaatattttccataacacgtgagagtatcttgttggtgttttgtcattatcctcttaacctgacaccaaatttgtagtaagtttattttttacgcaacatattattgactactatattcatacacgatttttttattttatttttctgatcaaatcaaatactcaggcaaaggtcgaaaaacgttacaagattttttcattttattaaaaaaaacacaaaaactcatggttttttttacaagatatatttgtagatttatgatttttttgtaaacctataataaaatacgttaataatatatcagtagcaagccttgtacaccagtcccattgttctctatataaaccattcttctccttcctctcatttttatatattcttctccttgtccttccttactctctatatttttctcaattctccgatttgatccaacgatttcacagatctctgatctaatggcatccaacggtgataaaggactgatcgttagcttcggcgagatgctaatcgatttcgtccctaccgaatcaggcgtctcactcgccgaagctcctggattcctcaaagctccaggtggtgctcccgctaacgtcgcaatcgctgtttctcgtctcggtggacgatctgctttcgtcggaaaacttggagacgacgagttcggtcatatgttggctgggattttgaggaagaacggtgttgatgatcaggggattaacttcgatactggagctagaactgctttagctttcgttacgttacgtgctgatggagatcgtgagtttatgttttaccggaatcctagcgccgatatgcttcttcgtcctgatgaactcaatctcgacctcatcagatccgtacgttttaaatctctctctcttcgctatagatttttacgattttgggattgtagaaagccagatctagaggatnnnnnnnnnnnnnnnnnnnnnnnnnnnnnaaacgaaattcgattaggagtggtagttattgggaatcgcgttattgaatttagaaaacgtaaaagatgatctcactcactggcggngacttttctattagatcttttttatgttcgcgggtcttatttagatccacgtgatgccacgtgat

SEQ ID NO: 9614 - DNA, 1579 bp, Arabidopsis thaliana landsberg
gtcttgttggtttgtagtggttttgatcttggagattttctgattagtgagtggtgttcatctagtattagttgaagatggatttaagtgagaaagatgagttttcagcagagaagaggaatcctgataactatgattctgttaataatccgtctggagattggcgagttgattcatatccttcagagaatctgatttcagctggtcctgcgtcttgttctccttctcagatgatggattcatttgggcaaactctttggtatgatcccacgagtgttcaggctgttggttatgccggttttaatggtggtaatgcttcgtcttcttcgtttaggggtagtattgatagatctcttgaaatgggttggaatctgcctaatttgttgcctcctaaaggcaatggtcttttcttaccgaatgcgagtagtttccttcctccgagtatggctcagttcccggctgattcaggttttatagagcgtgcagcgaggttttcgctctttagcggtgggaattttagtgatatggtgaatcaaccacttgggaattctgaggctattggtttgtttcttcaaggtggtggaacaatgcaagggcagtgtcaaagtaatgaacttaatgttggtgaacctcacaatgatgtatctgtagcagtgaaagaatcaactgttagatctagtgaacaagctaaaccgaatgttcctggatcgggcaatgtatccgaggatactcagtctagtggtggtaatggtcagaaaggcagagaaacctcttccaacacaaagaagaggaaaagaaatgggcaggtgaagatttgaagttactcgtttacttttgttctctccgccttattatgtttctttttgacattcgtaatcttttctgtttgtagaagaactctgaagcagctcaatcacacagatcccagcagtctgaggaagaaccagacaacaatggtgatgaaaagcgcaatgatgagcaaagtccaaattcacctggaaagaagtcaaacagtgggaaacaacagggcaaacaaagttctgatcctccaaaagatggatatattcatgtacgggcacgaagaggccaggccacaaatagccatagtcttgcagaaagagtacaatttctaaaactatcttggaagtttaagtcgaatagaagctatctcttcttgtatttttcatctaattactttgcgatgataggttaggagagaaaaaattagtgaaaggatgaagtttcttcaagatctagtaccgggttgcaacaaggtaaggtcactttaagtgttgataatgatggatattaatatgtaagaagagagacaaagctaattcagaaaaatgaatgtgtgtttgcaggtgactgggaaggcagttatgcttgacgaaatcataaactacgtacaatcactacaacgccaagttgaggtatgccgtttcctaattctcaacgaggtgctctttgtgtttgcttcttgtaatcaattcttttgctcatttcataaattgcttaaacagtttttatcgatgaaacttgcaactgtgaacccacgaatgtacttaaaaatgaaggt

SEQ ID NO: 9615 - DNA, 1211 bp, Arabidopsis thaliana landsberg
aggtaaactgtcttcgaatgtctaaaacattatgaaatttgattcaaagttatgcatcgaacactgggaaaaaaaaagccttggatttcgttagttgtataccaaacgcaaacacaattttcacatttttacactaaagtctcaatgggtcaagtgtattaatttaaacaacgtttgcatcgccaaaaacgctgcgtttaaacactttcgtcttacacacttcttctaccgtatacaaagaagctcatcaaatggtctcttgtaaaaaaatcaaatacatagaaaagtgattgttgttaatcaggaacaaaaacagagagaagtgtacctgatgagagtggatggtaagaagagagggagttgtggaggaggacgagttggtcacaaataacggcgtaaacggcgatctgcttacggagaatctccatctgctcctcagtcatcactctcccactatacgcaccgttttggatctctctatccatctcctctatttctttgcttttctccttttccttttttttttaccatatgaacaagacaatgagaaagtgaatgatatatatattcttttgtttatgaataaagggatctttagtttatttgttaccgttaaatcaaacactttttggaaagatgtctttgtttaatgatcaattggaccaatttaatttttacagttaccaggtttattacattggttacatattgaaaacattggagaactatggcctttcactaggatagattttggtcaacggtattcacaattttttgttagaatttcaacattttaatcgagttttacgggtcaagatatctaccatttgaaatagaaaaatgtgctaatccaaaatatgtatctaagaagatcttaatcctatgtgttgatgacataataagacaccacactaatatataaaaacaacctaattaataccaggtattgttgttacatccgtagaggaacacaaactgtgtatcttactttatgtatatagtggttaggtaaagccggaagcaaggcttaatcacagcattatataaaatattatcgttgtgacttatgactaatgattaaactattgatggaaaaagaagagcatgctttctttctttttctaagttgattaagaagaaaatgtacgaatttgaccaaaaaggttctttgatataaagatgttgactaaaaatttataacataagtgaga

SEQ ID NO: 9616 - DNA, 1321 bp, Arabidopsis thaliana landsberg
tcatttacacatgttaccctaacagcgataaattattagcttcagtatcaaacatgtggaacttaaaaatataactgacacggaggatcaggcaagcaaaacaacacttgaaggatttagagcctcaagcattttaaatcagataatgcttgataattttcagacaagttatttctttggctttttgagccctttcctaaccattatgtgatgatatttgtatgcagagaggagaatttcacatgaaacaacccccaaaatccaaacacacaaaataagacatctatcgtgatgaaatgtccaccaacatctttgaactatctttttggggtaagattaacttggatcaatataatttgtagataagatcgaaactgtagaaaagttcaacaacatagcctctacataacactacataaacttctctaacgttaaaacttaaaaccatatgaaaaatcatgaattgttcaaaaaaaaagcactatttacatatgggtccgctaaatataaaacagttttttttttaaatataacaattaaggctcccgaaacaattacaagaaattaattcgtttaaattagggttctacgtaaaaaccttttgacgttacagaaggtgaagaagaatacacactataccttttaatacatgaacggagaaggagcaaaccccggcgatgctatatggtatgtgattgcgtttctcctgcgcgcattcaaccaaaattcatatttctcatatatactatcaaacaaatattttatgataatgtcatcatcatctacaaaacatcagcaaataaaatgaattggaaaatagaaaaatcattaattataccaggcgctcttcagtgtcgtatatctgcgggaaaacgacgtcgtttctctggctacaaatttaccaaaagagcgatgagtttctccggcgaatacggtggtggatgcgtcttcggaaatggcagaagagacggccgccaccgttgggttccgtcgatccttctccgctccggaaaaacgcggcgcgcggcggttaacacttggagagatcgtcgtcttcatgcgcgcgtgagaatcaatcgcggttgaagaagaagaagatgattcctctcgttctgccggatatgaacgataacactgacgaattagagagaaaaacattttaattatttactctttttattttttaattatatttctgactggattttacatattatttataatttgcttaatctcgatttcatttaatgcaaatggattttatttgcttgattttcgattcttttccatacgatttttatttttatttcctttgtttgta

SEQ ID NO: 9617 - DNA, 1343 bp, Arabidopsis thaliana landsberg
tacgttaaacaacttgaatccactagaggatactgttacactcccataaatgtttcactagggttatattagtaattatgtgttgtgacagaatcatcgaagatcggattattaattggttccactaaagctgccgtaaccagaggccacacgtggatatttcatccacctgttcttctaagcataataacattaactataaaataacaaaactatactagtgaaaatgtatattcaacttagtccagctatgtcgatcttaaacaaataaaattttaaacgttgttgcttgcacttaactaataactatagtattattttcatttgtctccttcccacgattccgtttagctacattaccaatttgacgaatcaagtataagccacaatctttacattttcaagaatctttgattagacctgaattaatgaaaagtgagaagaaattgatcaggtggtacaaggcatgggaaatgtttatattggtgtgggcaatatactcctcattgttcactcccatggagtttggtttcttccgcggtctgcctgagagactctttgtacttgacattgttggtcagatcgcgttcttggtcgatattgttcttcagttctttgttgcctatcgcgatactcagacctaccggactgtctacaaaccaacacgtattgctttccggtcagttatatatatttttctcttacaatcattttaaccatttctacttatatagcctttaatggaggaagtatgtctttcatcaggtacttgaagtcgcattttctcatggatttcatcggttgcttcccttgggatcttatttataaggtacttaactttgcttttgatatttgcttagatcttcaacaaaagtcaaaccaaagaaacactatagcttataaatatttcttggtttataaaaactcaaaccaaataaacactatttgtaatttgtttggttcgtttctaggtgatgcaactttagttcctacttgatgcaattttagcttagttaggttggaaattttgtaaaagtaactttgaaacatataaaaatatttcttaactaatattatatttatctaatatgataacacatattataatttcttatataattaaaataaaattcacataaatatcaattcatttggttagtttacactaaaatcagtttcacttcgatttcgatgtttaaataataaaccaattgggttatttaaatacatttttggttctgattcggtttggtttggtttatactcctaccctaacctttttgtaggcatcagggaaacatgagttggtgaggtacttgttgtggataaggctatttcgggtt

SEQ ID NO: 9618 - DNA, 974 bp, Arabidopsis thaliana landsberg
gtgatttttcaaaacgtcctgacttgctgagaagtgttcttccgtcaatgatgtcaaaatctctttgtggggaagagaagcttaccaacagtgctaatcagctgcaaaatcaattgaaaagttataattctagtgaatatgataaatagtaaccggaatggatacctttttccctttatcttcagagagatcgtggtaacgcactttggatcggatgccaactccccgacgctataaatgggatgggtgacccaccataacttagttttcttgtcgaagtgaaaccgcccatctaacttactagaaagcgtccttggtcttttgctcttccttccttgattgacatcgccatcgggaccgccgccatctttcccagccaatagtttgccgccggaaggctgaggggggttgaaaaatcctaaagaaaagataaagcaaaataaggagtggggggggggaaagaaaaaaattaaaaaggaggaaacttcggattacctcatctgaatcctgataagggttgccaatcgtcatcagatttaagagagatacagtgtgagtagataataaagtttatagtggataacattaaagttagtaacgttggacaatagttaccggcggattaggaatcaaagaagctcctacggaagaaacattatcaacctgtattaaaaaaaattacacaccggtcttagatattttacacggtaaggatcttcttacccggaatttgtactattagctaataatgatgttaaatatcaagtctaacataaaaaaagtgcctaccttcggggtgtcattgagtttagttatcggagatgaagccgtctaggaaaaaaaggaaactatattagcatcaataggtacaatcaatttaaagtaaaacgccataatagtaattttagtatgtaacactgaaattagcttcataaggaaaaatgggtggggtggggaaaaatcatacctttaat

SEQ ID NO: 9619 - DNA, 561 bp, Arabidopsis thaliana landsberg
  unsure (1)..(561): unsure at all n locations
tgcgcctctaggtccacacacagcgacacccaatgttttttgtcgaagttgaaaggcatatacacacaatcagcctcagcaaacaaacgaacacggtcggactcaccagcaccaattagtagatcaactaaagcagatggaaaaatgaaatcttcgggcggcaaagtttttgcaaacttcggaaagagcctcgtcagctgtgaaacgaatttcgagccaagcacatcaaccctgagcttctcgccatcaatgtcgtctgtccgtaagagnnnnnnnnnnnnnnnnnnnnnnnnnnnnnnnnntttgctagagaagtgtttcttccgctcaatgatgtcgaaaatctctttgtggggaagagaagcttcaccaacagtgctaatcgagctgcaaaatcaattgagagaagttataattctagtgtaatatgataaattagttaaccggtaattgcattacctttttccctttatcttcgagagagatcgttggtaacgcacttctggatcggatgccaactccccgacgcttagaaatggggatgggtgacccaccagtaac

SEQ ID NO: 9620 - DNA, 1330 bp, Arabidopsis thaliana landsberg
cagcatggtttctgtttattccactgaagcattgtttttaatgccatgatttaatttgctaggacccttgatgtcccaccttctcggattgtgattattgaaggaatctatgctttgagtgaaaaactgcgacctttattggatcttcgtgtgtctgttactggtggagttcattttgaccttgttaaacgggttctccgtgatatacaacgtgcaggtcaacagccagaggagattatccatcagatatctgaaacagtttgtcctcatttcttttatttcgtgtgactgtttggtttagtatatgagctgccaattgtttatattaacaactcactgtttatgtaggtatacccgatgtacaaagctttcattgagccagatctccagactgctcaaatcaaaatcattaataaattcaaccccttcactggttttcagagcccgacttacatcttgaaggtttgaaaagtgaccggatttctatccatcttatcatattaatcagtgctctgcaaactcagtattcaactattgacagcgtttggttaattgaagttcttttactattactttgttgtagtcaagaaaggaggtatctgttgatcagatcaaggcggtcctttctgatggacatacagagactaaggaggagacctatgatatatatcttcttcctccgggtgaagatccagagtcgtgccaatcatatttgaggatgcggaataaagatggaaagtacagccttatgtttgaggtttgttcagagtttattttccatgttctcatcaatatgactattcaatatctggaaaagctgacaatccctctgattctggtaagatgcttagtatctggtgaataactgtggttctggttttgacaaccaggaatgggttacggatactccttttgtcatatccccaaggattacatttgaagtcagtgttcgcctacttggtgggctcatggcattgggatacacaatagcaactatacttaaaaggaacagccatgtatttgctactgataaggtgtttgtgaaaatcgattggcttgagcaactgaatcgtcactacatgcaggtctgtctatctatactcattcaccatcatttgctagaaaattgattgttcatctggctttatgatgacagtactcttgttcccagttactatgaaatttctttatctccccaaaaaaatatgactacaatattcaaattttgttatacacaggtgcaaggtaaagatccgcaacccgtacagagtactgcagagcagctaagattgaaaggatcgttcattacacgcacccatattgaacagat

SEQ ID NO: 9621 - DNA, 842 bp, Arabidopsis thaliana landsberg
tgttcgtatttaaggcgaaaattgtggtttggtttgcagtagttgacgtgattcttgtgacctgttgcaattttgtgtaatgaaatgtgataatgttgacatttggacccaatttggtcgcagatgagaagggaatgttgttgcctgagccgggaaaggccagacggtggtcacgagttggaggagccaccgtagttgcgacggtggtcttacatgtcttctagaatcttaagattgctttttgtattgttttgttttgaatggttgagtgatgatatctcttcataagatgaacagagtctcactcttttagatctttccaatctgaagttgcgagagtttttaaaggttcgagatttgcattagaaacagagcatacaatgaattgttagtcagtgggtgttggctttgatatattatatagcaaaaagatatatagagatattgggagttaaaatgattactagaaaataaaaataaaaataaacatatcttatcttctctgtttagtggtggttataaagtacagaacagagaagaagcaacgaatctcattacaacgatgattgcaacacaaacctttgtctctgtctttttctttgtcttcttcctcgtatctctccctttcttctcatccgcagcacctccgtcttctgattctatctacgaatcattcgttcaatgtttctccgacaagacaaaatctccacaagcccaaatcaccgacaatgtcttctctcggacaaacccttctttctcctccgtccttcgtgcttacattcgaaatgggaggttcaacacttcatctacaccaaaaccagctatcatcgtcactcctcgat

SEQ ID NO: 9622 - DNA, 893 bp, Arabidopsis thaliana landsberg
acacaagtccttcttaaacggtttcagctcagtcacagtccggattaacccagcatcatagataaattctctaaccttatcatcaggctttcgagaaagaccttcttccacaataatattcttatgggagaagtaagcatacctcttttcagcctctcgagatacaaaccgggtttcttcgaaggtagatgaagcggctactcctttgcccttgccctttttctgccttttgtcaacctgagcagcagtcgactgtttcctcttatgcaaacgatatgctatagagggttgagatgttgcaacctctggtacagtcgattcagtcttctgaacacgatcaattgaagaatgcacactttcctccacctcgatgactaagggcggcagagatgtaaaaagaaccataccccaccgattgtctagctcctctgattctttgactggctttgacacctgaaattctgcttccgtctgtgttggaatttcaggtttctcgtagcctgctctcgtctgagattgttcagcggaggaatttgatttggatttctggtggacaaggcgctgaagatcggagaagatggattccattctttctcactcaatttctgatgaattctctttgggcacaagctttcgccttctcgtcttcctaggatggttgatttgatctgtcaaaccctaattcctctttttccctccaatacccaagcgcattttcctttgttctcatgggcttgtgaaactccaaatggccttggacctaaaaatcgagccgatctgagacacttaacatactaattagtgcacatttgcaggttatcgaaccattgattctcaacattctgctaacacatgtttcctcagcattgataatatttcacaacatcttaatt

SEQ ID NO: 9623 - DNA, 1388 bp, Arabidopsis thaliana landsberg
cttccccagagaaagcgatttgtgatactttatcgaacttggctagaatcgatttaggcaaacaaatcgtactcatagtgtgtaccggtatagatgtcaagacagctcttgttaaagtcgcacggcctgcaaggctcaaaaagtgcccttttccaccccgataaccttgacgacattcgctcaagagactccgcaaaagtgtccttgttgatccgcttctgaaggacaggaacacccaaatatttccccaaatcccgagttgacttgataccactctcgtcgcctataagcttctcaagatctcgtgacacattgctggaaaaataaattttggacttctccaaattaactttttgccccgacgctctacaaaaagtttccaacactctccgaatgatacgaatttgcgagacagaggcttccgcaaagaggatcaggtcatcggcaaagcaaatgtgcgaaactttgggcccccgcggcaaatgcttatcggcttccatttcttatccagaatcgaccggtttatcatatgacatagtctctccatacacaacacaaataaataaggagacagcggatcaccttgccttagccctctcaaaggtttgaaagcttctgttttacccccattccatagaagattcatcgacggacccgatacacactgcataatccaagagacccactgttccgagaaccccgcaacaaccaacgtgtcctccaagaaatcccaacgtatcctatcgtatgctttttccatgtccagtttcaagagcatccatcctttcacccctttcttacgacgcattgaatgaactgcctcctgtacaacaacaatattatccacacttaaccttcccgggataaaacttgcttgatgaggcccaactaacttatcaattacacccttcagccgcccaaccatagtcttcgtaatgatcttaaataacacattacaaaggctaattggcctaaactgtgtaatcttttccggtttcgcaactttcgctatcaagactagcaaagcattatttgtatcccgcggcaaaactcctgtattaaaaaaatccagcacaaacttcagttccgattcgcccactacctcccaacaatcctggtagaacactggctgaaacccatcaggccccggagccttgaacttttccatagacttcacagcaccaaccacctctaccgcaatgaactgtctgttaagctcccggcactcttcatacttaagacgcggaaatccttcctgagggagcttatcaaccaccagctccacgtcgtctagcgagtaatgtcgcttataatactgtattgccaactgctcaagctcagccgcatctgacacccatacctcatcctcatttttcaacatttcaatg

SEQ ID NO: 9624 - DNA, 465 bp, Arabidopsis thaliana landsberg
aatagttacccccacacgcttcgtcccacctgttatatcataacaattgggatggtttgcgagaatctttagattcgaagcgggtataagagtgttgtcccagtcaacaattgggagattccggaaataagatgctttaccaaaaccttcaccggcaaaatgtccactacccatttgagtcgtagtgtgtgaaccgccgggtcggttgttcacaatctcgcccccgaattggaccatgcttccatgttgctttagatgcgtgaataaaaacgctggccaataaccgactaatgcacctgacccgaattgtagccaccagtgaccgtgcttcggatcctatacgtagattatacacgcatgtgtaatgttattgttatgactaagaaaagtcaaattatttaagactttctaaagtaggagctggttgacccacgaaacattgatgtgagccatgtgaaattcttc

SEQ ID NO: 9625 - DNA, 285 bp, Arabidopsis thaliana landsberg
atattgaaatcaaactctttctagatatcctctgaaaaaatatcaatatgaatgttttcttgcatggctgattctaagattctaaccaagaaaggtctcaacacaccaaaaaaggacaacactcctttgttgcaatgcacacatcacatgtgccctgttagagtccactggcacgttaaaactaactacaaagactattggcgagtgaagatagcaatcacaaatttcaattaccggatgaatcatacactctggactttagcaattcagcatccaaatctcaac

SEQ ID NO: 9626 - DNA, 1424 bp, Arabidopsis thaliana landsberg
tattgtgaagagtacagagggacactgctgatcaagcttgtcgcaggtagtagagagatcagtttcttagactcagagagtgactatgatgaataagtgatatctagaactaaagtcaggttttagctttagatcttaaaatttatgtcgattttgtctatatctgatgctagctctctgttgttaagtaaatgttgagcaaaacttagcttccttctttttcctttccgtatttcacgttatttaagttctgaaaacactttgtctgacacagacagaatgtatatttttcgctaactcttctttaggagttgactgatatatatattatcgtgtaacttctataaattctacaaatgttgacaatgcaaaacggcataagtgcagaatttttgctactgaaagacatttgtgtataaagtcagacatagctcgagctagaaagcagacgaaagaaataaagccggtagaatctttcataaagtaaccaagacactcgttttaacacaaaagtcatcaagcacactagagctcacatcaatggatgatcagatggagaaaactagagttgttgagttacaggggaagctcaccactgtctacaatcaccactttactcttaggagttccactctgatttccttcagcttcgactttgtacaccacatccattcctgtcactaccttcccgaataccacatgtcgcccatccaacctgcaaactttctaatcagcagacggaaacaacatatcgacaattctatccataattgaaactcttaagcttagaaagtagtaacctgcccacacaattgtcaaacaacttgaaagtaaaagataagaaactggctttatgtgtttgaaattcagatgattctgtactcaccagctggttgttacagttgtgatgaaaaactgtgatccgttggtatcttgaccggcatttgccattgataagaaccctgtggaaaaaggaaaacaactaatcatgtaaaaacttcacacaggcaaagagccgatgtaaacacataatactgaagaagccctcacctggaccagtatgcttgagtttgaagttctcatcagcaaacttctcaccatagatagattctcctcccattccatttccatgtgtaaaatcgcctccttggagcataaagcttggtatgatcctatgaaatgaactccccttgtaatggagcgccttcccattcttacctattcctttctcccctgtgagtataaagtttaagtaagcttttcatatcaaggtagataaactgctgtgctggcagagaaaagttaacaaataatcgattggcataggatgagaatgagcaatatattgttttcttaccagtgcataaagctcggaaattctctacagttttggggactgtcttgccaaatagacccatgacaat

SEQ ID NO: 9627 - DNA, 1530 bp, Arabidopsis thaliana landsberg
atctagcaaatctcatgtacgtaaatatatttgccatcgctatataactcgctctaatttgtcagaaaattttgagaaatcaaagagaggaaagttagagattccaacgtacagcgacggcgttacaagcggcgcatttgtcatcgacggaggatccatgggagaaaatagcgataattacggcggtgaagagcaccagcttcgccattcttactcaactccttccgatctgtctcttcttctctctctgggcaaaagagatttttgaaaaatgtaaaaaccacgtcatcaccttgttacgttgctaggaaccagtgagatcaagatattaagccatgtcatacaccccaccctctacactttgttggagatccgaattaccgaattcggttaaggagcaaggttaccaaaattaaccaaataaaaaatgaattcggttatcggtttattcggttgttttttttggaggggttaaaaacggttgtgtttaaaatccttacaaaaatttatgtttggtttcgtttgtgcttttgagagaattatgttataatttcatgaaattcggtttattttggtctaagttggttaaaaaaatactaaaagtcaaaaaaaaaaaaagcaatattgttataatttcatgaatattcggtattttttttggttaagtttgttgggaaaatactaaaagtccacaaaagaaaagcggttaactatctaaccgaactctcagatctcaatttggttcagaaaaaccggttcagtttttaatcgcatgcctacttagaacagtacacagcttatccggtttgtccttataaaaatgcactgaaatgcttcagagtggtcttctctccaatggactaccacaatgtgtatccatgtttggaatgctttccaactaatgtcagaggtaatcaaactgcctgcatttctcactatcacgtaaaccaataggaccaaagcccaactaacagattttccaaacaaatgtgattatgttttcagagaagatcgaactcggctttgggagtttcacccttcaccaaaacttcaccaaagtttcaccctttttatttttttacaagtagagtttgcttataagactggatgttctgtaaaataacgcagttagacttaagactcccccgcactaattcattcatagagagaggctcactcgtatggatgctaaactaagacgaagaaatcatgaattagtaaacaatggaaaacagtaacaccggcccaaaagaataacatttggtgtgatctttttttctttttccgctatgcactgaacttaagtttttatctgtggctgtggggtgaaacaattttaaccatttacaaatggatactatgaattaaagacaaaacctacaaaacaaaaatactaattcacctaaggtactgatgaaaccgaaggtcgatgatcttgcctttccccttctacatgtcttggagctggaccaaacatgctcaagaacaccttcatcatccattcaaatcaatatgtcaaaacaacaacaa

SEQ ID NO: 9628 - DNA, 1451 bp, Arabidopsis thaliana landsberg
  unsure (1)..(1451): unsure at all n locations
aaagtcacaacctcatgcaaaacacacaagatatacaaaacttacagcattgagaaaaagatcataagcctctttcaccagatatgtcaaagtggttcctgtgtcaacaatagttccacgggtatttgatgcttcaaacaccgctgcatcgagtggcagcatctgtccattcacgccaatgctcagcagatttaagttatagtgaggtctgtagtacgtaatcaaaagataaacagattcatcagtatcgcatgccactcaacaattttatagaaccagttagaggcttagagcagtaaaagattgactcaatcgggaggcaataaattgttatgaatgaaactggttaactcctgtattcaatttactaaagaactacacaatacagagaatctttggttcctggcccaagtccctatctcaaatcctagtaaacatcagaatgccccagctggttctgccaactttctatttaacctgttagctctctagttaatcaactcaacgattgttacttagctgacaacacagctacaatcaactacaaaccacctccgctacatataatgcttatacattagactaaaacaaagacttatcacagtttcaggttgtgccagtataatacagttaaagaaacaatctaagagtgaaaaattaaaaagaaggattagtgagcttactgtgatggaacgagaggactgtaaaccattcctgggaccaatatctcgccaaggacaaagacaccacctccactaccatctcctttcaagcaatgagaaaacactggcggcgtaatccctcgtgatgacaactgagagacaactgacaactttcccttgccgaaaccaaagattccatccactgctttgtctgactttgtcaagtccccagattggtaggtactacagctgttgcaaatagaagaaaattatgtacaaagtttaagatctttaatatgccatatactctacatgcaaaaacatggctagtgtttgagtagaaaaagttctcacccgaaaacaatgggagcagatgagtttgcaaccaaagactctcccaaaatcgcatcaaaatagaaggtgtcagtcatgtagtaacctgaagtcccacttccatcgccatagcgaaaggagtaaccacactggttattctcagaacattgtgcagctgtcgtctgaaaaactgaagaacaaatcggatctgaacaagtaacagagccagcagtcaaggaaccaggagcatcaaagaaatgaaggtcgatctgaaatgaatttgaaatagacaaaggataagcctcttacacttgtctgtgctaatcccattatttcagtaaaaaaacttagacaaagctacttactccaagtccactagagtgagggcaantactgcaagaactacacgtaacccacaagatgtcactttcagtttcaatctgaacattgaactct

SEQ ID NO: 9629 - DNA, 776 bp, Arabidopsis thaliana landsberg
  unsure (1)..(776): unsure at all n locations
gctcttttctttgccctcaacatcctttcttgcaccttatttacttctactggatgccgatgcaacctaagtcctgagcctaggacggtcccaagtccaaaggtcccgagtcctaagtacccaagtccttcgattccaagtccttcggtcccaactccttcagtcccaagtccttcagttccaactccttcggtaccaagtcctaaccctacgcctgtcactcctccgagaacccctggttcatccggaaactgtcctatcgatgctctcagactcggtgtgtgtgcgaatgtcctaagtggtctacttaacgtgcagttgggacagccatcagctcaaccatgctgctcgctcatccaaggtttggttgaccttgacgctgcgatttgtctctgcactgcccttagggctaacgttcttggcatcaaccttaacgttcctatatctctcagtgttcttctnnnnnnnnnnnnnnnnnnnnnnnnntctgatttccaatgtgcttaagcggtatcagcggctatccatactcttcatgcgcgcagtgttctctttaaaatcattactgtttgaataaatgcatgaatggtaggttttaatgtttcagtttgaatttgtttaagtgatagaataaacatgtgagagttttatagtttcattttgtaaacgtttcccgtcttcgccatttgtatacctgtgaagcaatatatttctctattttcaacctatttaccgaaagaagttttgtaagcaacgtcttattttcagattgggac

SEQ ID NO: 9630 - DNA, 494 bp, Arabidopsis thaliana landsberg
tccttgcaacctgtactcacctgcagatatctattttattgcattttcttttaaaacctttttcaatgtttcttgtaagtagggttcttgaattatggttccttttctatattttactcaactctaactccgcatttgttataggtggattatcttagtgagaaaatgagaagtcacaacttcactgtctcatcaatgcatggagacatgcctcagaaggagagagacgccatcatgaatgagtttcggtcaggtgatagtcgtgttttgataacaacagatgtatgggcacgtgggattgatgtgcaacaagtaagtcattacttatccgctatattttgtctagataacaatgcgcggaataaattcaatctctgttattgaggtctcagattatgttccattctcttatggtaaaggtgaattgacatgacaatctttatttaacaggtttctcttggtatcaattatgatctccccacaaccgtgagctc

SEQ ID NO: 9631 - DNA, 1093 bp, Arabidopsis thaliana landsberg
atttaaagggtttgcagtctgatggtaaacgaggtaacttgacgaaacaagtcagcaatctaagccgaaaccgtctagaaaattcagttgtttcgggtatgatacttatcatttttgtcaataaattggtacttctgctactttctttgatagtactttggttggatatgttttggatcgttttaatttatgaaccctccctttttaagatattatgactgagctccattgttatatctttgttccttgagcaggaggagatatttccacaaatgaaaagtgcagtgccagcgagcaaagttcaagtcaagctgactgtaaggatgaactgccatccacttcttgtacgggtgaaggcatgccaaaccacggtactgtagctttacaggatggattgccgcggtccagggtacctagagaggtagggaagaaaagcaaagaagccttcagtaaacgccaaaggtctagcctgttggctggtgcaaaaggcttaccatcatctcaaaagggaggtcagactgcagaatccagcgacacctcaggcgtgtctgatagtgatctctctaccacgaaaaacgttaaggaggatttaaataagggtaataggttacgagcagcagtagatgctgctctgcgtaaaaagcccagctttggcaagaacagagtattggagcaatctgatgcgtcattggtagctaatgtggattctagttctgaaaagactctacgaaatcaattgccttcaaagatgcataagaatcatgtgtcacacgaaggattgcaaggagggcatccgattttatggcctacttctgatccgtacaagcagacaattgtaacaaatgagaagcagcttatattccctggtgctgatactataccttcacgattggtggaacctgaagtcagttttcccgccgtaaagcctgtcatgagagatttgcctttagttccctcacctgttatgttgagaagctcagccattccggaccatgagtttattggcagtaagtttttctttttttggtgaagaagctctcttttttttgggtgtttattacttttttttgtcgaggcataccttttatatatg

SEQ ID NO: 9632 - DNA, 1529 bp, Arabidopsis thaliana landsberg
tttaacccaatattacatggtccgctcgcattcgtttaatgttgaatgcaagaacgtattgaatttaaaactcaactaggcatttttgttgttttcgggttagttcgggttaaaatcgaaataaaaccgactttttagatcattttagcttggtttgaaaattttggttccatttggatttgagtttggttgaaaatgcaaattataatataaatatttaaattaattatatatttagtagttaactttagaaatattttgattaatatggttagattaccaatggttggctttggtttgatttcatcctttattaaacttgggttttctgcaaaacaatcattcaaatcaatcttgtttgcaagtttaccttccaagtatgaattatgcaagtcaatcctataatctcaaaagtcatccgcaataccgtcctcccgtgtagtgatgacgtggatgacgtggtactcgataactctttttaaaaacataagggttttgaaaacttaatatagttatagagaaattgggtttgagttattttggtttgatttggttgttgtgtccaccgtaacaataatcaaaattgttttatattatctttttgatcaattattggacatagactagcaccagaacatccacttcctacagcgtacgaagactcatggactgcgctaaagaatatccaagccataaacgagccgtggatcaacgactacgccgacttggacagtttattcctagtgggagatagcgcgggagctaatatctcgcaccacctcgcatttcaagccaaacaatctgaccaaaccgtgaaaatcaaaggcattggaatgatccacccatatttttggggaacacaacctatcggagcagagatcaaagacgaagcgaggaaacaaatggtggacggatggtgggaattcgtgtgcccatccgagaaaggatccgatgacccgtggattaatccgtttgcggacgggtcaccggatcttggagggttagggtgtgagagagtgatgattactgtggcggagaaagatatattgaatgagagagggaagatgtattacgaaagattggtgaagagtgagtggaaaggaaaggttgagattatgcagacgaaagagaaagatcatgtttttcatattttcgagccagattgtgatgaagctatggagatggtacgatgcttggctctctttataaaccaagttgaagcttgatattatttgttttgccaaaatttgatggcttttttaatgtttgtataatttttacaagtttgttaatgttgttgttattgtcttttcttttaaatttgtgtattacatttatatgtggttaaatttatgttttttctaagctcttcgattaatcactccgtttactccatctacgtgccaagaacaagacaaaatagatagggctaagtcatttcatgaatcacgtaagaatttaacacactcttctttgaaacctaatttactcgacagttcattaacatattttttaagggccatatactt

SEQ ID NO: 9633 - DNA, 2069 bp, Arabidopsis thaliana landsberg
ggaagacccatttcatttgctcctcatgatatcaaacttcgcctggaggttgatgttaatggtggcgagacaccgaggttaaatttggaggagtgcagtgatgagtctggtgataatatgatggacgatgttccccttgctcaacgatcttcaaatgagcactatgacgaggctacggaggatagctgcagccgcaagctcgaagctgctgtttcgaaatgggatgagactgatgctatagtcgtctctggtgccaagcttacgggaagcgaagtacttgataaagatgcagtaaaaaaaatgtttgctgtaggcacagcttctctaggacatgtaccagtgctggatgtgggccgtttttccagtgagattgctgaagctcgtctagcacttttccagaagcaggttgagatcactaagaaacatcgaggggatgcaaacgttaggtatgcctggcttcctgcaaagagggaagttttatcagcagtgatgatgcaaggacttggagttggtggagcatttatcagaaagtccatctatggtgttgggatccatttaaccgctgcagactgcccttatttcaggtatttgcctcgtattcatctgtttttttttcatgtttagatcgtatattttaccttcctctgcaataggttctttgtgtgtcaagtactaactatgaacttgtttacagtgctagatactgtgatgttgacgaaaacggagtacgttacatggttttatgccgtgtgattatggggaatatggagcttcttcgtggtgataaagctcagttcttttctggtggagaagaatatgacaatggagtcgatgacattgagagtccaaagaattacattgtctggaacatcaatatgaacacacatatattcccggaatttgttgttaggttcaagctgtctaatctccccaatgctgaaggtgattagtttgttcttttttttgttcctcacattctatcttcccccattcaaatcaactgatgacgcattgaaagggagacagcttagagatctggctgaagctcaggtctcaactgataaatttagaaaaaaaagttccatgtgtgataatgataaacctaacgacctccggtgttataacacatttgggtttcaagagacaagtctctgattcatcatccgggggtcggatgtgatactcacgccttaatgggtatttcgatccatcaaaattatgttttgtgtagtattagaagtccgatgacatacactggtttctgcaggtaatttgattgctaagcgtgataactcaggggtcactttggaaggacctaaggatcttcctcctcaattggagtcaaacgtgagtttggttacttcagtttttctttgtatgatcttattaaagaagagggactgaacaactatatgtggtgttgttgtgtttaaaaagcagggagcaagaggttcaggaagtgcaaacagtgttggttcaagcactacaagacccaaatctccatggatgccatttcctactctgtttgcagcaatctcacataaggttgtagagaacgacatgttgttgatcaatgctgactaccaacaactgagggtatagaaaaaaactgattctgagagtttgctttatgattgataattgcataagctggaatacataagaaatttgttgtgcaggataagaagatgacgagagcggagtttgtcaggaaactgcgggtgattgtaggagatgatctgctaaggtccaccataacaacccttcaaaaccaggtaagatagtagtagtagtgatattgttgttgatcataagtttacgtttgtaaacggaaatgctcaacaaaggttttttggttttaacttcagccaaagtcgaaggagattccaggaagcatcagagaccatgaagaaggtgcaggtggattgtaagtaaagtggatgatgatgatgacgaatatcaaaaggaagctgctttttatctatctacctccctctctggttctccttttgactttttctaattaaagacaattggttttgggtcgggtcgttggtagagtttacaat

SEQ ID NO: 9634 - DNA, 529 bp, Arabidopsis thaliana landsberg
tttgcgggtgggccaaaaattggaaacctcttttttcctcacaattacacttttatgtgtgatttttttttttgttaatgatgtgtgagttatttgcctacgcttttgcactcatcaacacaccaattttaatttgatagggcaaaatcatgtcttctttaataaaaaaatagcataacggctttaatttttaaggttttggttttgaatggtaaccacttaacactttaaaacagtataaacagtttgacatttaccaatcacaaaattgttaccaaaagcgttataaaaagttttattctcagcttttttgtacagtttttttatacagctctttctaacagttttgcactattccgataaaattaatagctaaaaaacttgcacagcttttagttaccaatcagatttttttattttttttattttttatggatataaatatataattttaaggttaaaaagtaaaagaagaaaaaaaagaaggccaatagagagaaagagagaatgtcaataatcaatatacatc

SEQ ID NO: 9635 - DNA, 1180 bp, Arabidopsis thaliana landsberg
accaccgtttccccacggcgaaaaggagtagcaccgtctccaccacggcgaaaaggagtagcaccgtctccatcacccatgcggaaaggagtagcaccgtctccatcacccatgtcatgatcttgtttctaattttatattacaaaaaagtgaccaaataaaggaaaatatataaatgaattaattacatagtcgtccagaaaatcaaaaattttgtgttttctttggaaaacaatattaacatttatgtgatggattcgaattctctcctttttcttggatgtccccgaaggaaccgattctctaatttatatatacttctcaacgattttggaatgtcataccaaaattgaaagagttggaaagagcgaaataaggaagatgatttgcaagaggtttggttatggttctcatatttttctttctccttggtcttcaccaatgtaagaatttgttcaagctttctttttttttttccgaatcacaaaacttaacaatagatgtacgtatacatactaaaacattttatgtccttttcttatatgtagtctatttttcacatataactataacaattcgcctatacacatatatgaatataattaaattagtttacgaactagcaatttatgtttggtatatgatctttgcaggtgacgaagatattgatcatccgaaggaatagaatattttttttttttttgaaagaatttaaaattatattcaatcaaaagccgtttgtacaatgaatgcttatgcattttgaaaaagagctgataaatttaacaaagacatttgaaaggagagcttataactgtgtggccaagtgatatctatgggtttggtcgagttgagaaccacaaccgtaagccgtcttcgtaccgacggtccccttggtgtgtgattgagctgaggcggttgcgaacgttcttgtcgaccatcacggttcccatggccacggtttccccgacctccagctagcatctcctgtaccgttattacttatttccaaggccttcattgaccaaccaaactctacactagctttttaacattgtctcctaaatggaataacttttgcaaaagaaaatacttacgcttgatacaaaatttcttcttgcggatgtctttatggtaaatatgtcaaagaatattgaagagattggagtgaattcttttg

SEQ ID NO: 9636 - DNA, 1469 bp, Arabidopsis thaliana landsberg
ttctcatgtgttctatcaatcataagttgtctaacaaaagttgaggagatactgctgtgaatattaaactgcttggatcattcatcaatcaatgaagtaattagttatcaagagttgtttaatttctcttgttatatcagccaaaatggtgctctgtttctaaatgttgaattttggcaaagttggaactgtgaagatatggatgtgactttaaagtcattcattttaggcatatcttgtgtgtgtgacctcgtgttaaagtgagagtatcttgtaaccaaataaaagtttgggtcctgatgaagccgttttatatagtgggccatttaatagtgttgtgggcttatatttttacagacgaaggccttgttcgcgattccttaataaaagattccactttatgattaaggaatcaaaatctgtacggcacttaacaactacacttttcacgtttcagttttcaacaatctctctctatccattctctatcaaattctaaaatcaaaaatggctctgcatttgagatcttctttttcatcaaaatcgactttactcaatattctcagacacaacctcggtttcggttctaggagccacgtgactcggcatatccgccaaatcctaccacatgaccccccgcttcgaggttcacagaatccaattagccgtctctgtaataccatggcggagccagagacactctctagttttgttcagcacgaatacgccaacaatcatcaggtgcatgcattgttcctccgcattttgacttttataggaagtccatagctcactgttcaatccactcttgtcgtatcattggaatctgtcattaaatcgcttttattgacatttatacatatttctgttgttgatgttatgaattacttactaaaacatgattgttatatctcaagaaattttctagtttgtgtgggttgtttttagattctcatgaacctttagatttcttattgtgttgatattctccattcattctgaagaatatatgtatgtggaccttgaatgttcaggtaatggactttccaggaggaaaggtagctttcacacctgagattcaattcatatcagaatctgataaagagcgtgttccttgctaccgtgttcttgatgacaatggccaacttatcaccaacagccagtttgttcaggtttcacaaaaaaaacaagagaaagaattaatcttttcctctttttgcgaattctaaataggccaaagaactcatctttattcttcctcttcaggttagcgaggaggttgcggtgaagatatatagcgatatggttactcttcaaattatggataacatattctacgaagctcaaagacaaggcagactttccttttacgctactgcaatcggtgaagaggccattaatattgcatcagctgctgctctcactcctcaagatgttatctttcctcaggttttttattcattcatata

SEQ ID NO: 9637 - DNA, 384 bp, Arabidopsis thaliana landsberg
actcagcacctccaagagccgggcctgtttttatgtttgcgtttacacttagtacgtattctgtcttaatgaattcaccactttaaacatgttaaacacatcagatttgttaaaagtatagtaaaagttaaacacaattgaaaagttctcttttctcgtttttttcactcatctaaacgcaaacgcagaaattacatttgaaataatccacactttacttggctaatgtttgtttggtttttttatttgttcttgcagcttgttcgggtttattgtgttacacatgactatgtatgctgctaatatttatttttggaggcagtatcgagtaaattattccttcatatttgggtttcaacaaggaacttgacttggctacaaaca

SEQ ID NO: 9638 - DNA, 1902 bp, Arabidopsis thaliana landsberg
ctttttggggggggtccaggggctcatcaatctatgaatctatgtttcagagaatggatattttgtagaatttacagggggggctactttgttgagcgagaagaaacaaagaaagagaacctaagaaactttcaaaaaacaacattgaagaaagagttgcgaagtgttaagtattcatgttttcttgaaaaatttcccacctttttccccaattccggtccctgtaaggcttgaagagagatgggatctggtgtctggtctccactgcaattctactaatgctgagaacagagctgacagcgaaggagagacttctgaatcttttatgttcttgcatgaaactactttcagatgttcgagctcgtgccaatgtagaatcacggattctagacctgatgttgttagcaatgagcatccttctagatacaacagcttcactctcctgcaaacccaacaaacaatgaaattggcaaaagatttgaactttttaaaaattatcgacaagatcttatactagtagcaatgaaattggctacaactttttaaagatcacattgttcctagagattcatatagtgctacaaaaccagaatgcagttcagttaactattatcaagcctcacccgcacaaaagggagagataaagtttttagtacccgaaagccattgccaagctgaatatatcattatccaatccccaacaatcttggaaaacaatctctctcgctgcttcacacattttaaacaaagcctttacggtattcttatctcttaactgacacttctccaactgcaatcgctcgagagcaggacaacaacaactcaaggactcatctggatcattatcgatctttttacaagaaacgagtttcagagtcttgagattctcacaatatcgaagacctccaagccaacccgactccatcttattatcacaaacagtgagttcctcaagcatttgacaacactcacctatctctttaatcccgtcaaatcctccctcacatccaacaagctcaagcttcaccagtctcttacacccttgagccaaaatcatcaatccgatatccgaaaccaaagagttatacaaaccatcgacattcccaaccaatctcaagatctgcagattctcaaacgcaccaatgccaagcaaaacactatcagaacacttgtgcaattcgagttcttgcaacctggaacactcttcagctacattcaacaaccctaattcactagtattcgtcactacgagtttccggagattagagcaaccaccagcaagtgcttttagccctctctcaactaattcaacagacaacaaattctcctcaaagaaactccaactctgataagaccctacaccaacagtaaacgaaactatcctgtggttaactaaaatacctaaatttggctgcgaaattaaacacccactgaccaaatcaacagtctccagattgggaaacctcgaaatcagccgaccagacgatagaaattcccaatccgaaaccttaaaagaccgtacaagacgaccatggagtctaaaccatctcttgcataccaaggagagatttttccgttgagaattagggattttctgaatgactctgatgagaatgaggtcaggtaagagaagcgtgaaatcaggaagtagggttttggatttggagataggaggagtcaaagactgaaactttgcggctaaatcaaggggcgaagaagacaataagtggtgatggttaacccaaagttccgaccagcttgctcgtcgcttcttcaatggcgaaactggactactctccttcttccccgtattataagacatgatacttcacattctccgtcaacgtttcttgaaggttttttctcggttttgattttcccgagaaagagctttaacggatt

SEQ ID NO: 9639 - DNA, 1782 bp, Arabidopsis thaliana landsberg
aaaacctccatgacggacattgtttaacgtggaacaaaagatagatatataaatgaagaaatccaagttttaacatactcagatctggtgactcctaagaagaaaatgtgggccactcatcgggggtgtccaagacccgaataagctccttgcaatctatctcaaaagaaacattggaatggatgatgacatgagggaacacattgccaagagaagagcttcaaactctgtgtgaaggagagataaacaatggcgaatgcactttaagccaagattagagaaatgatgatcaaaaccaacaatccatcctaaaccacataaggaggttgtgtttacccatgacccatgtacctggcatgtcaagcaatctctgataggggaacaagcgactaagtcttggataggtggtagcgaatcaataatcttttcccgggttcttgccactcggaaagatttcgcctcttagcttgcaagctgaatggtgtatgcatggtggacttctatgttaccaaagactttggaattgcatgcttttcaaataaaccatataatccaaggaaagtcctttatactttcttcgcttccgccgagttctttcgttctccacaagaggtaatctaaatttgtgtaaatcgagggtgcaaggaagacatcttggattggaggtattcaggagagagaccaaacctgataggcttgaggacatttaaaaagcacatggtttatggtctcatcacacattcacagtgagggcacaccttatttgttcgtaagtggctatcaaaaagttgttggcaggtagctagacatctcgtggcagattgccagacaaagtgtttaatttttctaaaggattgcatcatccatgaatgttcatgtagtgccttaacattgggtgactaaaaagggaggcaaaatctcctcaaaggaaagcttttgttgccctgaagccggatctgaaagtgtaattgccagatttgcagatgtacaagtctctcaaaaaggcatgacttatatgtagtctgagaatgtggggtatttctaatgtagctatcaattcttgaagttattccagctttcatgcctcaatgatcgggtctatcagcgataacgtataggttagaatctattgatgtcaacttacttgtcattgggcactctagtatggttggaatccatggatcactccaaactctggtgtcgaaccctgagccaatgtttttcctcaagcctgagagaaggagtggtctagccgcaagcttattacgccaaccataggagggtaaatatgagggcttgacgagaagggggctcgagtaacagaagtacattcctcttaggactcgcaccacaagagagtttggatatttcattagtttccacaactttttggcaaggagggctagattaagttcttctaaccatctgaagcccagtcctcctttagattgtggaaagcagaatttgtcccacacaacccaacggagacctctactctcttggttgttgctccattagaagttagaaagtgcactgttcagtttggaacgaatgtttttttggtaaaaggaaactcgacattacatacattggaaaggcttgtgccactgatttgataagaacctctttagctcccttagagagtaattttgacgaccaagtatttattcggttttttagacgatcttgtacaaaggcaaaaccttgtcccttgggtccatggatcttttcaggagattctcaaaaaatgcttatacctctttcttggtggatacctaatat

SEQ ID NO: 9640 - DNA, 560 bp, Arabidopsis thaliana landsberg
tttataattcgagttttattttgtcactaataaattagtttagttttttcaggcaaattttaaattattttgggaattttccagatttatattttcacaatttaattaaattatattgatggattgttttatatatataactatagcactaaacaactttcaacaattcttccgacgcaaaagactctcttgagaaaccctaatttcaactgaaaaaatggcagaaaccgccgatacaatcaacaccaccgtctcaacgccgcagccacaattagaaagcagatcagacgagacaagttgcctccaaaaacacagatctgacgcaacatcagaggtgacgaaagaagagaaatctggaggaatcttgttcagcgtttggccaccgtgtcagaaaagtcgcgactacgtggtgaatagtatgatcaagaccttatccacagactcgatcctctcctacaaatacggaacgattaaacctgaggaagcctccgccgtctcgaaatctatagaggaaaaggcttacgacatcgcatcaaggttcgtgtcgagtgatgggatta

SEQ ID NO: 9641 - DNA, 1807 bp, Arabidopsis thaliana landsberg
ataacagaaactccaggtcatctttctttaaatattttcagattttattttttgcattatacacccttccactctcacggatatatatttcttactttacccttactatttaatataattccatttttacccttcatcttccctctaaaatccaacacagagagatttcaacgctaaataaagagagagagagtctaaaagctcgtcgacgtcttcaatggtgaatctcaaaccaattggataaataaaacaaaacaaaaaaaacttcacaaaaaaaaaaaaaagatccaaatcacaaccatgccttcggagttaacaccagaagaacgatcggaactaaaaaactcatcgccgagttccacacataccaactcgatccaggaagctgttcatcactccacgcgcaacgaatccacgcgcctccggaactcgtctggtcaatcgtacgacgattcgacaaaccacaaacatacaaacacttcatcaaatcctgctccgtcgaacaaaacttcgagatgcgcgtcggatgcacgcgcgacgtgatcgtcatcagtggattaccggcgaacacatcaacggaaagactcgatatactcgacgacgaacggagagttaccggattcagtatcatcggaggcgaacataggctgactaattacaaatctgttacgacggtgcatcggttcgagaaagagaatcggatctggacggtggttttggaatcgtacgtcgttgatatgccggaaggaaactcggaggatgatactcgtatgtttgctgatacggttgtgaagcttaatttgcagaaacttgcgacggttgctgaagcgttggctcgtaactccggtgacggaagtggctctcaggtgacgtgaaaatgaagaaaaaaatatgatttaatttcttttattaaaactaaaaaaaaaccagaaatgttatttatgttgcttcgtataagattctcttcttcttttgtctgttctttttttttaacctcatatagtcaaatttttaccatcttcttatgttgagaatgacgtgcaaggttattttgggcatttaatgtttgtggataactatgaatctttccattttcgttaggtatattccggcgtgtaagtcaaaattttcggctatgcaacaaactctcataaaaagttacaaaaaaacttactataaagttaccaaaggtttatttgacacaaaaaaaaaaaaaaaaagtaaataaccattcgtgtaaggttttacttttctttgaatgtcaaaaaaaagaaaggttttccttttcttttccttttgttaaaaaaacatggggataagatttttttcacgtgttttttgctgttattgctttaagtatggtagatttagtgtgtgattcgtatgaaattgtaattacttttcatagatttcgcttttttatcgattacttttacataatgtccatgaacaaaactttagttttttttcccatgaacaaactttgtaacatatcggttgccaaaaaaaaaaaaaaaactttgtaacacatgaactcccgatttattaaccaaacaacaacttttttaagagtggtaaaacgataaaacaaattgtgaaggaagagatagagaagactaaaaaaaccataagtggaagtgttttaagttttaacgaagatggttttaaaagtgtgtgccgtttttcattcagattcgggttaccttttgcactatagtcaggctagtgtcccacttgacttgaatatatcaccatcatgttttatataatttattgttacaaaatttgatgtggggaatccagtata

SEQ ID NO: 9642 - DNA, 1287 bp, Arabidopsis thaliana landsberg
  unsure (1)..(1287): unsure at all n locations
tgcaaacaaaggaatctaattattagatgatctgtataacatttaattttagtaaattaagtacctaaaataacgaatttgggaaagttttctagtcattttcgacatcatgatcatgtcagaggggtttaaaactcgatttaactccgctaatttcaggaatccggtttaatgtgttcaacttccggtttactgatttcatttcggaaaataagaaggtaggaccgaatttcaaagcaaaaattatacaaataaagaagatacggtccacacgcttttagcccgtcttaattccaacaattgcaagtttaaacgagttattatagcccaatacgaaaattttaaattccatgtgactagagagcatccaaatcaaaacgctgtaaatcatcggattattagctaccgtcactcggattattattataattatcttagagattcaatatcgtcatgctaatattttatcttgataagtatatatatatgcgtgtggtatcgtcgtataagacaaaatctattaaaaggttatataagatggtttagccatcaatgaacagacaaaattgattacgagataaccttgcttccaaatatgtgacaatgagtttggatcgatggtgagcccatttcgatcaacattatagtatatgctatgacgtgcatatctatctactttgatcgataattcaatagacacagataaagtattgaagaaacattagtctcgtgagggttttgcattttggttttctgttgacattgtgattttaccaaagactgagggatcggtccaaatcaacgaaaaataatattaattttaatttctttgaataatatgaatatatcttctatatagactcctaatcaattaatatttcattttttttttaaaacaactagtactattttttgtgtgattagacatagtgaaattaccactttattagatataacattctaaaacaaattaaaatatcaaaaaatattaaataaaaatcaagacttacgaattgagtttaatctaaaatatccacgtatacataattataatctcaagcatcgactatgtggaatatacgacaagtggaaaatgacatgaaacgactttttatacagtcgcgtatgacatcaaacgcaaagtagtttgtatttcgaagaaaagggcaaaaaagaaagaaaagtcacgacgcaaactcatgttatctaaaacatataagctaatacaacaaaacattagaaaacgaataaataaacagttcatttaataatgcanatgacaatgga

SEQ ID NO: 9643 - DNA, 559 bp, Arabidopsis thaliana landsberg
atcaagattttttttaaaaaacaaccactatttttgtgtgattaaaaatagtgaaattacttgacaatgatctttcacattgttacttagatatcacattctccaaaatatatatatatatatatcaaaaatattaaataaaaatcaagacttacgaattgaagtttaatctaaaatattcacgtatataaaattatactccaaatgtggaatatataatagcatcgaatatgtggaaaatgacatgaaacgactttttgtaccgtcgcgtatgacatcaaacgcaaagttgttttgtatttcgaagaagaaaagggggaaaaagaaagaaaagtcatgactcaaaactcatgttatcaaaaacatataaagctaatacaacaaaacattagagaacgattaagaaacagttcatttaataatgcaaatgacagtgaataggattatgacacacgtcactcagttatattcataaagaagactcaatggcataataataaattcttgcccttacaaccttttctcaaaaaaaaaaaaacctaaaggaataggaagagac

SEQ ID NO: 9644 - DNA, 1045 bp, Arabidopsis thaliana landsberg
gagagataaaattatcaattcattaaatatctaaaaaactatttattagtttacaaattatttatgataaaagattgtagctgacagcttttctcataatttattaattctccccaacaaacaaaaaaaagacttcagagctctatgaacatgttagatctccaactcccgaagaaggcacgaaggttttagtggctgtccacccagaataacccaaaaataaaaaaggggaaaaagagtcaacaaacaagcaaagacacattgttgttttttttatagcaaaaacaaatagttttgtaaaccagaaaataaaaacgaagtcgaaccactttagatgtatttgtgttggatctcataagcctgtatcagttcttgtctgttccaacaaatcagattgaagatggtgaacgcaatcccaaagcctatcaaggacatttgggacgtatggagcatccgaagtaccttaatcttcagtctcagtcttcaaacatttctcattttctttgcacctcagagaaaacgctcttccaaaaaggttttactctccctcatctggtcagcttaccttcttgctgattggtcggccaatttcgccgccggacaaatctcagatagtcaaggagatgacccagaacccggggaacccaaaaataacggcgaattgatagctttgtgggttcctttcttgctcttgcatcttggtggcccagatacaatcactgcccttgcccttgaagacaatgagttatggctcaggcatttgttgggtctcttctttcaagcagctgcaaccgtttacgtgcttttgcaatcgctacccaatgctctttggaaacccattttgctcgtgttctcggctggagttatcaagtatgtcgagaggacattagctttgtatctggcgagtcttgacaagtttaaggattccatgattcagcggccagatcctgggccaaactacgctaagctcatggaggaatacacagccaagaaggatatgaagatgcctacacagattatcaagattgaggagcctgagaaagat

SEQ ID NO: 9645 - DNA, 1090 bp, Arabidopsis thaliana landsberg
  unsure (1)..(1090): unsure at all n locations
acaagaatacatacattttttaaaaaaataaaatttaagacttgttgacctgttaacatgtttgactggcctcagggtctccaagtagcctccaatggctgtccaaccagaataattcaaaccttcacacacaacaaaaagcaaaaaaaactcatagtaaaacctgaaaaaaaaagaagtcaacctctttagatgtatttgtgttggatctcataagcctctatcagttcttgtctgtttcagcaaatcagtttcaagatggtgaacgcaatcccaaagcctatcaaggacatttgggacgaatggagcattcgaagtaccttaatcttcagtctcagccttcaaacatttctcattttctttgcacctcaaagaaaacgctcatccagaaaagttttactctctttcatttggtcagcttaccttcttgctgattggtctgccaatttcgccgccggacaaatctcagatagtcaaggagatgatccagaacccggagaaccgaaaaagagcgccgagttgtttgctttctgggttcctttcttgctcttgcatctcgggggtccagatacaatcactgcccttgcccttgaagataacgagctctggctcaggcacttgttgggtcttttctttcaatcagttgcaaccgtttacgtgcttttgcagtcgttacccaatgctctttggaaacctattttgctggtgtttgcgaccggggtgatcaagtatgtcgagaggacattagctttgtacctggcgagtcttgacaagttcaaagattccatgattcagcggcctgatcctggaccaaactatgcaaagctcatggaggaatacgcagccaagaaagatatgaagatgcctacacagattatcaaggttggcgagcctgagaaagatccaagagacgatgctccggtaaagcctcctgacgggttcactccactcaatattctccagtacgcctacaagtactgtaatatcttcaaaggtcttgtggttgatctcatctntacatttcaacaacgagctgagagcaagagattctttgactcgctgaaagcagaagaagcttaagaatcttaga

SEQ ID NO: 9646 - DNA, 1677 bp, Arabidopsis thaliana landsberg
gaaagagcatgccttttttaaccctctggttgatagtagtggggtttctggcttaccatcagagggcatttgcagaccaaggaagaactgactgaaaggaggaccaagtccatatttttatatcaaataagcctttctctttctctggctgtttgagaagaaaggttgttgctttctcttgctctggctgttccaatagagaagttgttgttggtgtcacggaatcaatcatagctacatctttctttgtgctgatgctaccaaaccaagatatacttggcaacccaaaattcatctgtaaacaacaaaacagtgcatgcaatgacttcagcaatcaagtgtgatccagacaaaaagggaagatttttatcttttcaaattgggaaaatttcgaaattgcgaaagatcaatactcaaaaccctagaattgactagtaaagaagattaaatcggatctcgaaaataacagagaaggataattcgaatgagcttttgcattgagagattggaatgttcacgaacctgagcttgagagacgctacgagaagagacagacacacgttttcgttttttttttccttagcaaatgacaacctcggaatatcgttcgttactttatgtctttatctatccctaaattttattgggctcaaaatgggccgaccgaccttttttagcccacaattataaaaggaaaaaaacattattttagtgtatgtagtaattcggtcggtttgatttttatatttagatataatatccaaaaggaaacaaaaaattattttatttagtttcacttcttcagggaaattcatttgaaacttctatttaaaataaggtttaaaatttcattataaccaatctttctccgaatttagtgtataatgtcacattgtcactaaatgcacatttatataatgcaaatctcatattttcatgaacaaaaaattacaggttttgattaaaaactaatcaaaatgtgaatactgaagattttgtctacaaaacaaaaaggaagacttttactttaaactccatgacacaaaacagagctcccttatttgaaaactttacttcgtctgtctcatcagttatcttctccaagagtaaacttcacaaaccttctgactttgatgttttccccaagagtagccactgtttgcttcaccagatccttcaccagaacactgtcgtctttgatgtaaggctgctcaagcaatgcccattctccaagcctctttgagattcttccttccacaatcttctcccttatgttctctggtttcgacaaaagatcctctctttgcatctcaatctctttttctttctgctttatctcctctggaatgtcctctattgaaacatattgcacctgcacgtagacatttcaggtcagagaccaacaaccaatttatgccattgtttcagctgaggacattttcttacctgtggattagccactgcttgcattgcaagatcatcaaccaattccttgaatttttcgcttcttccgacaaagtcagtctcacagttcacttctatcagaactccaatccgagaatcgtggatgtacgaaccgattctcccttctgatgcaagccggctagatttttatcagctgatgagagacccttccttctgaggaattctgtgctttctcaagatctcctcctgtcg

SEQ ID NO: 9647 - DNA, 2005 bp, Arabidopsis thaliana landsberg
  unsure (1)..(2005): unsure at all n locations
ctctagagcaaactagttctattacaaagagctaggtgtcaacttaaaaagtcctaattaaaagaattgcattagcttcacatcctctacatgatccagaaaggtgtaaacattactctctttaaatgcttccattccttgcatttcaacctttttgattgtgtttctttcgatattgtagtagaaaacgtagaaacgcataccttttatcgaccagaagacaaattcctttgtctgagtcattccaacacaacgtaaatctgtggttttcattatatcatgcattgcaggcaatatgtatgtatgctcagaccattcttgccttttggcatcttcaagaacccacaatttaatacttcttattactccattaaaacgggaataaactgttgacggcagatacaaacttagtttcccattgtagtttatgagagatccatgatgcagtgctccgataataaatctaaactcctcagacctgacgtcaaagcaaactatcacaatatcattgttgttgaccccagcataataatatataagaccatcaatgcatatccctccatcgaaagaacgatgtggtatgcaacattggatcgttctccatgacatgtttccacttcctaagttcaaaatatgatgcatatgataattgacgactacaggagacgacttcttatgatcatcatcaggattttgaagctgaggtgacgataaaaataaataatcgctaccttttctgtaggcgaacaatagcttcgggcgagccaaagatctagtcaagaacaactcggtgaaatatggacggctaagtgtggaggcccattgcttcgatacgcaacgacatctcgctatagaattcaccgacaacctcaagaatatctcgataatgagatcaattgggatctgcaaggagtttttagttccatcctctaagcgcagagacgttttcatggccgaaataaataaaccctaagagagagagactccttgtagaagaagaaaccaatgcggtaaaacaaaggcaagtaaaagccaaaaaaagagttaatcacaatggtaaaaacatggactgagagaaagcccgtatagcccaaagtttccaagcttgtataaggcccaaccaaataacctaacgagtttaaagttcaaacgtgatgaaccgttaccgtttaagcgtttctcatttttcttccatataaatagttttagttttgtagaaaaccctaatcgacgacggccattatgataaatgacggcggagctaaaccggagacgctgcttagggttgcagaaatcggtgaaagaggaaggagtttggtggcggcacagtctcttcgtgctggacaagttatcctcagagagtctcctctccttctctactctgcttttccatttctctcctcctctgtttctccttactgcgaccattgtttccgtttgttagcttcatcggcgcatcagaaatgtcaatcttgctctctcgtctccttttgtagccctaattgcttcgcctctcatactccttggctctgcgaatctcttcgccggcttcaccaatcatcctcctctgcattctccgatcaaccttctgatcgtcaagtccaagctcgtttcctcctctctgcttacaatctcgccgctgcttctccttctgatttccagattttgctctctctccaaggtagtggcagcagcaatggagatccttcttgttctgcgggtgattctgcagctgctgggtttcttcattctcttttatcttccgtgtgtccacctcttccggtgtctatctcgccggatctcacggcggctttactgtcaaaggataaagtcaacgcctttggtctgatggaaccgtgctctgtttcgaatgagaaaagatccgggcgagcttatgggatttatccaaagacttcgctttcaatcatgattgtcttcctaatgcttggagattcgattatgtngactctgcttctgatggtaatactgatatcatcattaggat

SEQ ID NO: 9648 - DNA, 1290 bp, Arabidopsis thaliana landsberg
tttcaaatatgtaaatcaaatctcaggtacacagatttgaaggtgcggtaccatacagaccagtcgaagatattgcatactccgttgcacgatttatccaaaaaggaggttccctcgtcaattactatatggtaacaaaaataaaacagagttacatatgaatgcacatagatgttttcacttcttttttttttggcttaatgtgtgtttatatacctttttatagtatcatggaggaacaaatttcgacagaacagccggtgagttcatggcttcaagctatgactatgacgctcctctcgatgaatacggtactaaaccaaactcaaaagatataataaatatctctgaatgattagctaacctaattctgtttacttcaaaaaggcttaccaagagaaccaaagtatagtcacttgaaagcattgcataaagccatcaaacttagtgagccagctttgctttctgctgatgctaccgttacatcgcttggagctaagcaagaagtaacgatcaaagctttttttttaacttacttatgtttagatttcaaatgagaaacaaacctcatgcttttgcatgttgctttcaggcttatgtgttctggtctaaatcatcttgtgctgcgtttttatcgaacaaagatgagaactctgcagcgagagttctgttccgtggattcccatatgatttgcctccttggtcagtcagtattttacctgattgcaaaacagaggtttacaacactgcaaaggtaagacagaacaagaaacttctttgtcaagaaagctaccttcttgatatttagattgaattgaccctctgtgtttttgaataaacaggtcaatgcaccaagcgtacacaggaatatggttcctactggtactaaattctcttggggatcattcaacgaagcgactcctacagcgaatgaagctggtacgtttgcaagaaacgggcttgtggaacaaataagcatgacttgggacaaatctgactatttttggtatctaacagagtaagtataagaacatcaaaactctctttgtttttgtctcaatcttcggaaagatcctcacggttggtatggtttatgtgtattttactcagcattacaatcggttccggtgagacatttttgaagactggtgattcacctcttcttacagttatgtcagctggacatgctcttcatgtgtttgtcaatggtcagctttcaggtaatataagagaaacaatggaagcttgtctagtctctgtgttgttttagtcctgtaacttgaaaacatt

SEQ ID NO: 9649 - DNA, 1388 bp, Arabidopsis thaliana landsberg
ttcacagaactattttgttgcgtatttagtatgaagaattggataggtagattaatgcaactctgatttccctttagaagctgccttctttaaccactgacctcatcattctgtacgaaatgaaggtggagttgtgataactctggaaggtagaagctgctgatgatgatgatgtttgcaactgccgtggtggttattgcgaagataggcttccgcaactaatacctgagttgcatataatccctcccatggtatttgcagataatcctcagaaacccttgtttttttgtgttgaacattagtttggttacttaacttgctaggttgttggtgtgtttgaagcacaagtaggaaaaatgattatataggtgacggtgcttaaagaggaagagcaagtgtggagactgggggacattagagaggtgtgttgttgttagtcaacaacaatgactagctaatttgaaagagaattgcagaagtaaactaattttgaagaagactttttgcattgtttactaggcatgggacggcagtgatattcgaggtatgtacaaattatctctattttgcaagtttcagaaaacttaaaaactaatatgtattatttgatcaggaatgatgatgttggcgtgtaagtgggattgagaaaggcaatagaatgatctcttcttctttttcatccccacagttgggaatccgaatctctccatatgtttccatgcactttagaagaaataacaacaacttttccacaggttaagtttatatatacagtagtaacaagttaatgaaaacgaataatgatgtacatatgcgtttccgatataaattattgtctgccaaagtattgggataatctgagtgtgggctgaaagtaacagaacatagtatttctatagattagaagaaccggaacaagcccattggcaacagtatccggtatgattataacattgcagtagtggtatgtcttggagaatcgaggagacactcatcgagtttaaatgtgtggtggagagaataaaagtgtgcagatttacttaaagagtgaagggaaggtgctataaaaaaggatcttgttggccacgagcttcttccttttcgtcttctccgccgcaccctttgggtcaacagttaaaccctctccattacgcgtgtgagtatacacatataatattcacattatataagattatgtttcatataacgtagatcctgcctgttctatatacaacagattaaatggttttgatatgagacgttagatactttatttcatctggtcaactgccttagctagaataatttaatgagtaacaaaagcaaaatggtcctttatgttagaattgtggtgagtaacacagcagattcgatgctctcacccatca

SEQ ID NO: 9650 - DNA, 591 bp, Arabidopsis thaliana landsberg
aaagctactgccttttttttttactgaaaaaagattctattagaaatctttttgcattaaaaaatgttgattgatggagcttgagatgggaatatgaattttgtcttcttgcatattaaaaatctaacctatattttacatgaacgtaaatagatgattttatgagtggcaaaaacgaactcaccataaaaccattagtaacacatgtagtacaaacccaatattgaataggacccgtactacttttctaattatttaaaattgcaggagtggtatgtcttggagaatcgaggagacacgcatcgagtttaaatgtgtggtcggagagaataaaagtgtgtgcagatttgcttaaagagtgaagggaaggtgctataaaaaaggatcttgttggccacgagcttcttccttttcgtcttctccgccgccccctttgggtcaacagttaaaccctctccattacgcgtgtgagtatacacatataatattcacattatataagattatgtttcataacgtagatcctgcctgttctatatacaacaggttttggtatgagacgttagatactttaattcatctgggcaaatg

SEQ ID NO: 9651 - DNA, 1598 bp, Arabidopsis thaliana landsberg
cgagaatgtcacttgtctattgatcttgttctctatcctcttcaattcaaccctaccccttcccatttctcttaaaataactaaattatatgaagaaaaaacaagagagataacgacgatcttgatctaattaggaaagttttctaatgatggtaatgtgaaagagtgcttctttcactctttatttaaagaagagatattttggaaatagcggtttgaaagaaagctataacttggtattagggaaggaaataaaccagagttggtttctaggatgtgttgtcgacttctcattggtctgattagacttccattgcctaatgtcgagtctatgttttctcgtatataattttcaataagtggaacattgataaaaaaaataacaataattgattatcgacgtctagtgacgtgaaaatgggttagctagacaagtgaaatatgcacagaccacagacttcagagcttccccaagtgtcgcattcgatttgcattgacggcggatatttcttaaataattttctttcattttctaactatattattggttgttgatatatattttttgtaaataaaaatgtaataatgtaaccaagtagttatagaggttttaattgctcggcggtaagaacagtgaagtacatatagatgtttcttggtagagttgaacttcaattgacaactgtgtattttgttgagtcaatagatttcacgttggatataaagatacagcagaagaaaattaattttgaagtttgggttaattaaggaaatatccaaaatacaaattaccataaagtttttttttgtactactaagcaaattatatactcaacttttctttttgctaaaatttgtctttgatggaattctagggaataaattaagagaactacgtattatagattaatacaccatgatcaatttaagcagaccaaatgataataacttattgaacacgatttattcatgtagtacgtacgtatatccaaatatcggaataagatacgagagaaaatggttaccccatttatttatgtggagataagaagcaagcaactaaagcaattaaaagtaccaaagaagaacatttagagcaaactaaaagaatctaaagctcgtgcccttggcgacactatccgctgatctccattatcaacacttttcgtacatatgcagtacttcctcctttgtccattattaaaatttagcatatatgtttgaatcgttgccgctttcaatgttgatttttgctgcagctatagctttgagtgttgaatatctcgtcaacatattacacatttatattttttcaacttttaggatgaatttactaatgtggcataaattatcaaaaaacaaattggtaaatgatctgttattaaaatgtgattaaaataacattttgaccaatacaaaccttgcattacacatgattatgatattctattatatggtgcatgcaatatctgttaactaagatgctatttgaatgttaatttgaatgtgttatacaatccaatcgagttttttttttttttaaaaaaacaacagatttgatggtcactatgaatactcttttattcttaagaattctt

SEQ ID NO: 9652 - DNA, 2350 bp, Arabidopsis thaliana landsberg
aaattgaaatgcattttggggcacctctctacaagatttttttttagttaaaactgaaatttaactgcaaattttttaatttcaaaaaagtgatttgtataaagaaaagaaataattatcatgagccgttgctagggccaaggaaagttgagtaaatttcgtttatagtgtgattggaactatttatatattgagtagatccaaacaaaattaaaaatccatccgaacttaacattttttttgtttgtcggcaattcaaatttagtacgggtgagatagtaccgacgtgaataaaactgaaaattatcgaaacaagtatttttatttatacaacttcattcttgaaaatatatcttaccatagtaaattaactaatatatttattatgtatatcttgaaatggatatttagcaacgaaacgaattaatccaaattcaaatacaactttttgaggtgcagattggttcaagaatacacgaagtaaaaaattaaatcaacacaccgaaatagataacagatccatataccccattcccctagtaacaccatgtctagttgctatataacattgaaaagtgaaaggtagtgagcaatatggaacgagccccttaaccttgtgtcggaccaaaaatgttaacattattcgctacatttttctctcttggtcgaagccaaaatggtgaagagatcgagagtgctttcaactttctcacattcaaaggttccaaagtatatgccattttgttttgctaaactataatttaagctcactaagcactgctaaagagttaaaagaccattgagaactacaaacataacatgagaaaaatggtatgggcccatgcatgggattgacaagtcatcctcatcgtcatcatacttatctaaaaaatccaaaaacctaacaacaacaacaacaacaacaacagcaaaaaaaaaaaagagaactcaaccatattggtagtgtcatgattccctacatggtgataacgacaataacattgatatttaataaaaatcatgtggataccataaggttttaggtttttttttcatgataatgatatggtatggtgctaaaaagggttttgtgtgaatgtgatattgatcatccagccatgctccatgccatgccaaaactatggtggtgatgttgttgatgaagatgtgatattcgattccaagaaaccagttcttgttaagacagcgtttcttgttttgctgagatctcttcctttgagcgttcttccgattccttcgcacatagagaatgatgagatctgcgttcttgcaagtctttttgctactaactcatgtggaggaaccattgagccttcatcatcatcgtcaatggcccatgaatgcaagtggctgcttgtgttcttctttgaatacccataaaccttggaccagtcaggaatattcattggagcagatgactgttttgcccctccagagacctcgttgcctttaggaatgtacctcgcagaagatgaggaagaggctgagaagagattgttacttttggacattttcatttcaggaccttgagtttcactttctctcaaaactgaccacacttcttcttcttgaaactcttctcccccttccattgcctctcaacaaaaccctttaaatgtgtgcttcaactgaatgatcttcttcctcctgaatccatgaaattattattccatcattttatctaaaacccaataaagagaagagacagagtgatgggagagaaaagagagaattaaattacctgagagacgcagaggaagattgagtgaaaatgtgatattgtataaaaatgtgaaccataaacaacattaaacaatctctctttgctggcaaatgagagacagagaggtcattgattgcttcaaaggaatcaaaagcctccacaataggcagaggtttcagaaacctccaaaactgtaataatttcgtactttttttgggggtgccataactatgaattaaattttgtgaaaaataaataataattaaaagggttagatagaggagtggtagcctttggtactatttctactaagacctgccaaaattattgatagagtctgattcatgctagaagacaaaaaactatgtactatatgaaaagacttgctttatcttaaattatgcttttgcctaagccattttcaaattacactttctaatcttttttggctatagttatagatattgttaaagtttgaagaggacaatgttaattgactcgaaaaggcttatgatattatcgtccttcataagaaattacgaatcttcatatggtttttctttttctattgctatatggataaggattgatcttctgcgagaatag

SEQ ID NO: 9653 - DNA, 1020 bp, Arabidopsis thaliana landsberg
ttgtggacacgttctagacacttcttctttcaaaggtggatacaaattctttttgtatgacgatattaacgattgtttcattgagttttgttcttcaagccgatctaatcttccattagtttcgatttgatcatattgttttgtatccgaagtaattcctgcaaacatttattcaaaaaaaaattttaaacaacaaaacttgtatgctatatagtcaaaagcaacatataaacacatgatttatcccactattaacacaaaccttgtaataaatatacaaagaatgggatagaattgtcgttgtcacatatctcatgatgcacgaccaaacaaaaagaaagagtctaactttacacccgaagttagctgtttcaaaacttttttccctttcaaactaaaaacataaatgaatttcgaataggttctgtacctaccatggaccgggacatgcaacggtttgtactagtggcgtagtcgtgttataactcagtttcatttccgatagtatgcgtgtatgaattgtagacgataactaaaaaagatttaatacttaccgttagcaagatcaagcacgaaatcagccgggttaacgaaactggatccgggttgatacccaatcgaaccaaaatattccatgacccgacccgaatctccactataaataggacacccttccgataaaaccaacactttatcgaacatccgataaagcctactcgacggctgatgaatcgtcgtcaccaccgtccggccgccacgagccagcgatctcaaggtggcgactatacgagccgccgtggtagaatcaagccccgacgttggctcatcaagaagcaacaaactcggattcactagcatttcttgtccaatacttacccgtttcctttccccacccgaaattgctcggatcaacccgcctccgataacactgttacaacaccgggtcaacccaagatccgaaaccaccatctccacctgctctagtatctctttgcgggtcaactctatcggttaacggaa

SEQ ID NO: 9654 - DNA, 1196 bp, Arabidopsis thaliana landsberg
ttcattaagtgcatcctagttggtcccactagtattcacaagtatacagagcgataagcctacaaatacaacagtttgatcatgaggataagagagctccaaaagcaatgttgctgccaaacttcttgaaactaaatacctccgttcccactgaaaatgtagccttccacaaatcctcctgttatacaaaacaaacatgaaaaccaaaacaaaggttcataaaactcaaaatgttccaaaatttctgagcaaaacatcatggggacgacaagaaattataattctatgaaagaaacatcacacaaatcttcaagaaaagtttctatccaagacgctataattataacattctgcaagaacaacaaaacgtaagaaaatatctcagatctaacttcgtaatcgttaaacacacacacacaacaagtcagcgaaaggcgagtaacaaatccaaaccagaagataaggaaaatagaataccagattacgcttctcttcgaagtactcaggctcagatgcttgcgccttggtcgttttggctcgcttcttggctctaggagtcgatactttcttctccgcttccgtctttgtgcctctcttacgcttaccacgacgaagctgcggttctgaagacgacgcacctttcgcctcctccttttggctcgcactctcatcaggcttcaccgcttcttcttcctcctctttgtcttctctcgccgcttcttctttttcctcctccttgtcctctttcgcctcttcttcgttccctccctcctccgcagccttagattcaaccttcgccgcttcctcttcctgattctcgttcgcttcttcttcgttttttccctcctcctcaggcgccggagattccaccttatcctccgtttcctctgtctcctgagtaggctgtgtctcctgcgtcgtcgtggcctctaccaccgcatcatcgttcttactcgccgacgaagacgcaccagttttacggcctcctcgcgaacctcctctcgaacctcctctcttcttcgttcccttcctcattctcgagtgtaactagaccaaaaaaaaatccaaaaaacacaaagttatcagcgagaggaggagaatgtgaatcttcagctttggctagaagaagagagaaacagagggaaaaagcaacctagggtattaatggcggttaggatctgagaatttcgaaaatc

SEQ ID NO: 9655 - DNA, 595 bp, Arabidopsis thaliana landsberg
gattggaactttataagttgactaaattgagcctgagaggatgcaaaaagctacaagttctttcgacttatatcaacttggaatttcttgatgaacttgatctcacagattgcatcttgttgaaaacatttccggcgatctccacaaatattaaacgtctttatcttagggggactcagatagaagaagtttcttcgtccctcaggtcatggcctcgccttcagaatttgcaaatggtatacagcgaaaacctcagtgaattctcacatgttcttgagaggatcacggtgctggaattgagggatataaatatacgagaaatgactccatggctcaatagaatcactcgtctacgtcgattaaaactcagcggatgcggaaaactggtatcactcccacaacttccggattccctaacaattctagatgcagacaattgtggctctcttgagagactaggttgctcttttaacaatccaaatattcgacatctcgactttaccaactgcctcaaactagataaagaagcaagagaccttatcattcaagcaacggctcgtaattattccatcttaccgagtagagaagttcatga

SEQ ID NO: 9656 - DNA, 1472 bp, Arabidopsis thaliana landsberg
aaccgttagcctctacaacgactgggtacaagccaaatcaactttgttagttttgcaggtttcttttcttgttttgcaaatgtggaaaaactaatgtttgtacgtttcatgtggctctaccacagaggaaaacggcctgcaaatggagccggtaataacgtgggtgcaaaaaaggctcgtgtgcagaatcaacaacaggttgtgaacaaaagatctgagggaatctcacacggtggtggtagaggcagtcacagaggccgaggccggggccaaggtcagggaagacacagtggtggtggtggcggccgtggccgtggaagaagaggcttctggtaatttcaaaggattctccatgacactcttttttgtctgttcttgtataacagagtatgtttatccttcttgttttggctcttttaggctcctaacattcgacaaacaaattaatctcttttgcgatttctttggcttctcctttatatgacaaattctttgttttcttttctctttaactaccctttctgggaagtcaactgtcctaaactcataatgcaacagtcagaaatgattaatgccaaagtaacagtaaaaaatattaatttataaataaccccttcaaccttctctgtatttatcaacttaatgtcactccatgttatatattcgacaatgtaactctgtgtttcaacgcccatgcatccttccaatggcacaacttgttctgtccctgacttctctctttctagcctctaatctttaaatgatctcatgaaactggtgtgtaacttcctacagaatccaacgaagccaagcccagagctattaaagagacttggtgagtacgtaacatgatggtgattctgttttgtggtttctgcagatatatgaccttcttcggattatttttcaatctgcagaagcaagtgtggaaacagatcatgcttctcacattaattcctttcctcattgtgaaactttcagagctattcgattcacgatcttggagacactattgttctaatgacgctgatggctgatagtttccacttctgcaactcttttgctcttggctctttcggtatacatatgtacataactttatagctttactgaattaagttcaagattttgtgtctaatctttgacatattatgaatctctgaagcttttggatacgagtggactaaagaatagcttggataagcgaggatttagctcatgtccgaagtgaaaaagaaactgcagagagatattcgcttgaacgcattctgcaagatggacaactcactagggaaagcttgaaaaagtaaaccactgatcgattgctttgctctggttcttgctttggtttttaatagaaaactaactgactttttacaggctaaaggaatcacttgcgctgtaagtttttaaaagacgaacattctttctgttccattgctcttactgggtctcggtttttaactttcaag

SEQ ID NO: 9657 - DNA, 1223 bp, Arabidopsis thaliana landsberg
gtggattgtaaagggctagtttgtgtatttccctacaagtagcccgtgaagcttggacaatcgtttacttgggattggagacacaggccggtgaatcattataattggagacccatcgtttactttgggttgcatgatcaacaatacttttggaatacaataatctgaagtttaatctggcaatcaacaccagagaacagcaaatgccaagagcacttgttcgaagcttttcacgttttgccacttcaagactagtattccaatattaatcatatgggcttttggtagagaatcttgcgatagctaataacaagcaaattcttcttaatcaaatttgactgacataacaaaaatacgagaatagccaaaacatcattaatccaaaataagacatgcttaatgagaggttcaacaacttaattaactcccaaaataacaatggttctcaaagtaaaaatttaaaaactacaagagcttcaaagccaaacccatcgacgccttcatgtttatatcataagcatcaatcatgaagttggtgcttgattaacggtactgtagaaacgagaaaacaaaatcagaaacaacagtcttgtgtaatgatgttaacacaattcatagagtttggaatttaccttaatgaatccaatctccttagcgttgctacggaaacactgtctgcagcagttcaaaccatacttcctgatcagcccgtgcgagttcccgcacacacggctacacacacaaacaatgattgcataatacaaagtcagaatcataacttgactgccaaatataacacaactaatctcatatataaaccaaatataacaatctcatacataagctaatcactataatcagctgcacacaaacaagcattgcataatacaaagtcagaatcataatttgcctgccaaatataacacaactaatctcggatataaacaaatgccacaatctcatacataagataatcactctaatcagctacacacaatacaaaggcagaatcatagctggcctgccaaatataacacaactaaacttatatataaaccagatacaacagtctcatacataagctaatcactatcatcagctacacaaatacaagaatgtgcaaaattacaaagtcagaatcttaattgccaaatataacacaaaaactaatgtcacaaagatagaagccaagtataacaatctcatacaaatactaatctcta

SEQ ID NO: 9658 - DNA, 1128 bp, Arabidopsis thaliana landsberg
aacccatatatgttatttctaatttgaatttaaatcaatccaattcattttattttgtaaactctctgtcaataattttgatagagtgttattaggttgtaaatacgaatgttgaggtcaatataattagactacaaaaaggctagtataataagacttttattattaagatcaacaaatactacaaaagtcatcttttaaaatgcggtaaaaaaaactataacgatcaaattgccaattactaaaaggagtatcaattcctacgatgtgtagcaacaacattgtgggttgtcttcaccttttgtttgataatcacaaaatccatatgcatattgttgacttgtacactcttcgttacatggtctattaccgtaagctatctcacatggcccaatgcaatgtggctcttgctcttgctggattgctgcaaatacacaatccaataatatacatacatataaatggctattaccaattctattttttatgatataaaaatgttcaaacattgctcttcaaatgatcaaagataatttaacaataacaactaacctggcttggccaaactgttgtagctaaaatatgaaattgtcaatatccctacaaagaaaatagtcacatatgtttttctgatatccattatatatttttcactatgaactctattgaaaaaatagatttttatagttttctatatctttaataaagattctttatgaagatctctatttatagaaaactagatttttatagttttctatatctgtgatcagttcaaaaattctttatgaagatctctatttataagatttttttttcgaataaaaatatcagttttcacactatatttcatttttttcacaaccataaatgaatattctatatttttaatatgaggttggctaaaatttattaattatcgttctaaattataaacttgactaaaaataaatttaattatattaaactgaacagatgattaatctaagcatgttttagacaattataataataaccaattttaatatatttttaatttaaacaattacacaaactgattttgccatagcttttgccgatgaactggcgagatcattcataattgtgtcaataaaaactacgtaaaat

SEQ ID NO: 9659 - DNA, 872 bp, Arabidopsis thaliana landsberg
  unsure (1)..(872): unsure at all n locations
aagtagcatgtacaatgctgggatcacagtttccaacatgtcaatgagatcaaattaaatccgggacatgagaattttataattctgtaaacatgtgataaaaatgtgaacagaaaaaagaaataatgtaaatgattatttttttgggctcgttgcaatatgattgttaaattgtaattttcagatgttttgagctgacgtaaccaaaccagattgggtgggtcttttcttttctgttggatgctactgtattggatcgaatctgtccatttagagatcttctaatggacaactagattaagcagccctaggtggtaggttatgcattggaaatactgtaaactgtaaaggcaacaatgtccataactctaagaaaataatccatctaattcagaacatcaatatacccaaatccagttttagaaacaaagtaaaaacagtataaaaaaaaagccaaaatgtgatgagaagtcacatgtcatctcgagttgatattccaacaagttgctaacattaaacaacatgggatagcatatttgatattccaattcacaacatgagcatgcccggtccacaactcaagctacccaaacaatggttaagatcatcaaaagagatgagtaaaaatacaaaatattataggtttttgttattaattcattttttgtcggtcttttttttaccatatcacatgagttttaagctttaaagttaataaataataattaagcggattgttaatgaatttttagtaaaattttggttagaaaaaaaaaacgaaaacaaattttttcttggggttttgggatgaatataaaataatattcacaaagaggcgtgcngaaaattttaattatctaatatcgtcgtat

SEQ ID NO: 9660 - DNA, 728 bp, Arabidopsis thaliana landsberg
ccttatactctgtttctgcttacgtcatatattcattgattagatttactactacaaaagacatctctctttcttgcgaaatcttaaacacgtgtttttgactgacaaaccgcaaacgttccgtacagacaagaagacaggaacaattagccaaaaaaaaatataaatattaaaaaaataataatgcctcctaagatttgtatcagtcatcatcactccacaggctcttttgatcatccgagtgagatttcttctttgtccccaactttccacaaccaaacgtgtggtatcatcaatcaattagttgctaagtagagaaacagagcatttcaagactttgaagatgctactgagccgggtctaatggcatttgcatctcatctatttgttattcacaattcttctaaggctttgtctctgagccactaggaccaagagattcgtctttggtctcaacaatctccatgcccgcggttttgctccttttgttcctcctctcctgccaaaatgcgaaaatcttgtttcatttatgaatacagaaacatgtatataactatattgttacagctttagaccatcataagaatattttagtaccttgtgaaaagggtgttcatcagattcaagcatgcgcgcaacctgactcattctaggacgattctctgcttcaggatcaacacatctaagggaaaccaagagtgcacgtttcaaagcacttttactaggtc

SEQ ID NO: 9661 - DNA, 557 bp, Arabidopsis thaliana landsberg
cacttgtccgtacacatagatggttatcgttcaaaccctttcctcctattttcttagaaatctgttcccagagatgtttgttagatttggaagcgttgaaaagattgtccatttctctccgtaatgagattaaggttcgagtctcgtcttgtgcccatgtctctgctcgtttctttggtgctttgatgatctcatgatcctctcctccactgctttctccgaggatgatctggtgtggctgtagatctccgtttgatgtaacatcgtcgatcatcatgtttatgtcccgtgaaggattgttgttatcggaaacaaacatgttttctccaaggaagaaggagagatagcagaagattgccaagattaatttaaaaggcgcgtgagtctttaattatttgtcaaagcttatctttaaattacatcaaagatctctcttgtttgattattagatgaagaaccacgaccaccccaagtggcaacttttaacatatctcccattataaagataaaagtgtccaccacaataaatggcctcttttttttgtttaaaaaaaaaa

SEQ ID NO: 9662 - DNA, 1608 bp, Arabidopsis thaliana landsberg
aaagttgtgagttttaaaacctgtaaagacaattgttttcactgattgttttctgtttatgtaatgagaaagtgtgaatcttttgtttattgtgactgtaggatgtgaggaatggtggagtcaatggaacaccaatgaagatgcttttagaacaggaaatgtcgaaagaaatggaagttaagctaagttcgacaaatttggttgctaagttgatgggtcttgattcgtttcctcagacacaatctgctcctaggagttatagttcaaagcctcgtctaaagaggtcgttaagtcacggggaatataaaaatgtctatgagatatggcagaaagagggggaactaagtagtaatggtgtggagggattaagcaagaagaagatggacattgtccgtgaaaagttcttggaagcgaagcgtttggttacagacgatgaacttcgacattctaaggagtttcaagaagctatggaagttttgagttcgaataaggagttgttcctcgagtttttgcaggagtcgaataacttcttctctcatcatctccacagtttccagtccacagatccaccaacctcagagaagtctaagcggatcactattttgaagccttcaaagaccgttgctgatgaaaagtttggaaatgaaccagccattgaatcttcgagagacggaagtaagagtggcaagggtcttgattttttcaaatggccggttgaagaagaatatccgacaaagcaatcaactcgaatagttgttctgaaacctaacggtcaagtcacaaaggcttcatcatgtccaacctctccaagaggttttgaggggagagagtcaagagatgtggctaggagagtgaagagccagatacttaaggaagaaactttacaatcttctgtcttttccaacggctatatatgcgatgatagttctcttaacgactacgcagattctgaaatcatgtcaccggtttctaggcattcatgggattatataaacaagtatgatagccctttttcttcttcgccttttagcagagcctcgggttctccagagtcatcatctgtctgcagagaggccaagaaacggctttctgaaagatgggcattgatggcagcagccaatgagaatttgcaggaggccaaagttattgaaaagaaaggctctaatatttccttaggtgatatgcttgcacttccagatttaagagaagatcttataactgaagaagaagaaacaagcaatggtaatgaacaggagggtcctaaagtatctgcatcttgctttgatggtaatttcagtagagaagaaggaaagttaaagcctcctaaaggccttacacgatcaaaatctctccctgaatcatcgacaagtcttggtcacaaatccctagatagttccaacaagagtaaatcatccagagttccagaggagctgacaaagtcaaagagcttgaaatggtctctgaaaggtaaagtctcaaactttcttttctcaaggagcaagaaagccagtaaggagagatcttatgaggaatcccctgaaatcttggattctcggtgtaacaatgaatatgatgcatcagtgtctgccagaagcatgacttctcggg

SEQ ID NO: 9663 - DNA, 947 bp, Arabidopsis thaliana landsberg
gacgatttcttgaaggaatttttcccatctgtgtacgaaaggaagaagcatgcgcatgagaacaactattgcaagtatgacaaccagttcttgcagctcttcacttcctctctataccttgcggctctagtggctagcttctttgcttcggctacatgctctaagctcggacgcagacccacaatgcaactcgcttccatcttcttcttgatcggtgttggccttgccgcgggagctgttaacatatacatgttgatcattggtagaatcttgcttggattcggtgttggctttggtaatcaggtataatgtgatatgatctttttcatttcaagtttagtttgtgtttaggctgagatgctacaagatatgaattttaactgaatttctggtctggtttagtttatatgcattttagtttgtatgagatcttgaattttctggtgttcttcaatgactaaacattgtagaatgtgtctgattttcttgtaggcggtaccgcttttcttatcagagattgctcccgcgaggcttcgtggaggtctcaacattgttttccaacttatggttacaattggaatcctaattgctaacatagtcaactacttcacctcctcaattcatccttacggatggagaattgccctcggtggcgcgggaattccggctctcatcctcctctttggatcgcttctcatctgcgaaacacccactagtctcatcgaacggaacaaaaccaaggaaggaaaagaaacactcaagaagatcagaggcgttgaagatgttgatgaggagtatgaatcaatagtccatgcttgcgatatcgcaaggcaggtcaaggacccttacacgaaactgatgaaacccgcgagcaggccgcctttcgtgattggaatggtgctacagttttttcaacagttcactggaatcaacgcgattatgttcta

SEQ ID NO: 9664 - DNA, 1055 bp, Arabidopsis thaliana landsberg
cgaaagaaatatctgttctgcttgaagcgtttcgttttgtttcttacctccaggtgatggctcagaagctgaaggaagcagagatcactgagcaggactcgcttcttctggtaagctacgccgatcatcgagctttcgagtttttgtttcttaacgattcgtgaaatttctagctccttcctggtgattttcgtagatattgatctggatttcagatctcgttctcttatacttagtttttcgcttaatctgaagaatcgtgaacagtttctatgtttgttacgcgttaatcagctggagtttttagctcgtttacactgacgtctttgttttggttttcgttttgttgaaatagactagaaatttgcttcgtattgctatcttcaacataagttacatcagaggactctttcctgagaagtatttcaacgataaatcggttcctgctttaggtgagatgctaatctggaagtttctagagctctttggctctgggatctaaagaaatcaagttaaattttcgatttcggtaaatattgaaactaatatttggtggatgcttctgtagatatgaagattaagaagctaatgcctatggacgctgaatctcgccgattaattgattggatggagaaaggttttctatactaatgattttggcatttatcgcttagtttcaattgtgtactcgtttatctttgatgattttgtttcttaatatggaatctaggagtctacgatgcgcttcagaggaaatatttgaagacgctcatgttcagcatatgtgaaactgttgatggtccgatgattgaggaatactcatgtaagttctggcgaatgattgattagcttgataaaaatgtgttcgccggtgggtgatttgattaattgatgcctcatccctccctgtttaattggtgtatgctttgatgattgtgcttttttgcataatcgctttatgctaaaattcaatgctctatatatatgtaacatccattattgattgatgaagggtctgtgatattgcagtttatttcagttattcagatgtagag

SEQ ID NO: 9665 - DNA, 1180 bp, Arabidopsis thaliana landsberg
tgggatcgcacccacacagctccaagagaatcatggggatcacgaactatggttaactcttccaaaactggacttcctgatattagaatctccagagtcgcatcagcctcgtcacttgaccatatcaagatgcataatcatgacacaaggcagcgaaacagattccggatgatccaaggctacgcggcagagctgtaaggtcaccaatctctcacatgaatagagagataaaggcctctcaactaactcgtcatcatcatccacctcattatgaacattaaaatgacaaactctacgcttaatcacagcattgatccaagacttgaaacgagaagcatcgtgctcattaacctcatagatcaacttgaatctctccaagtgttgctcattttcagaacccagaaacctatttacgaaactcacaaaaacatcatcatctgggaagttattggaatccaaatccaatacaggaacatgtaaccagagatttctccatcgttttgataaaacgcttgtgcaaaccgattcttttgtggagagatctgagagaatctgacataacaaggaatcaggtaaattgcttatcctatcggagttcctttgcttctctttgacagaggtttcatcatccatgtcgtttccttaaactctgaactatatagtttgagactgaatcatgtaaataacaaactgaagaatcacgaatctgttagctaaaaaagtcaactcataaactccagaaagaatcaaacgatactgaaattacctgtagtacttaagtattatttattcccaaagagataacggcgagagaggaagaataagacgaaagcaccgtcaattttccgggaaaagggaacatagatcgtctcgcttgcttgttgacatctttgacatctctaagatgcagacaataatagtcaactcaggacattaatcacgtagttttttttccctatctttaatatttacattgattacaaattttagctagaaaaataatgtatgtcatggcgtgagtcaattaataatataaccaaagagaagttaagtttttgagatatgaaattacagtattgctaaaagttaaaacgtcttcaagaaaaagtatgtgtttataatgttgcacttcccacttgattagagccaacgaatctagtgatcttatggtgatttaatg

SEQ ID NO: 9666 - DNA, 830 bp, Arabidopsis thaliana landsberg
cgagcagcagttcagccatcacacaacctgtggaccatatgtctattgcagttgtgtactcggtggctccaaaaatgagctctggggcacgatagtatcttgaacaaatgtaagaaatattgggttctcctttcacctgtggaccatgacacgtcataatctaagcatggactaggaaaactaaaccactaagagctatagctgataaactttaccaacacttttgcactcccaaaatcacaaattttcagctgatgtgtgtgtggattcacctgcacatcacaataggtgtaaagaaaaaaataaaagattgtttaataaaaacaaggcaacatttgtttatgacaaattctagtcaattgcaggtatggtgagcctaacagctgaaacagtatggaacaagttcaatccttgtgaaatcacaagaaaataggattctaaatatttaaaccaacgaacagaccagctaaaaaccaaaactattttccgaaaagttagattttaacatcctacttgaacaaatagcaagtgaaattaactacagaacagaagcccagtaccactctgaggttgaaataaacattagcgagatgcatacataacctcattgcttaatcccaccaggcatgtaataacgaaatatcatcatgtcattactatataatgatcaaatttgtagaattaaagaacactgtctgatatttatgtacacaaatgcctttaaaatccttatgtgtggtgacaaagaccttgctatataaaaaaaattcaaacaaaagtagcttacaggaaagtgaaatctatcatcaacttcttttcagtgagaaaag

SEQ ID NO: 9667 - DNA, 1246 bp, Arabidopsis thaliana landsberg
cccaggcttgaggatctcaagctttattgtcatgaaactgcaagtttcataataattaattcggcttcccttgttaagatggacatcgacattatgtttaacttgtcttccgaacagaagtttgacccaaatgatctaccaaagagaaatatgatccgtaattttctcctcgggatctctggtgtcaaagaaatggaaatctcttcgcataccctcgaggtaacatctgctggattctcttatgttcatgcttaagtttttcatgtgagaacttgtattacctctcaaatgcgtttattacctatgctctgtttctgtttttcttgcaggtcatctataattactcaagatgtgaacgattacccgtattccgtaacttatcttccttgcatgctgacttcgacgactacaggtgggaaatgttgccagtctttctggagagctgcccgaaactgaaatctctctctgtggttaggatttattactgaaaccataaacttactctcttattaaagcaaatactgaaagtatcacatactcaacttgtttcgtacacttggtcttacttgcagggatttagtaaaactccaggggaggagccaattagtattttacctggacctcagtgcaacctaccagctctcgagtttgttgacatactaaagccaatggtagagaaggaaacagaattgaaactaatgagttactttctggagaagtcaacaatcctcaagaaactaacactacgcttgggtgatttcagaggaaatgaagaatctgccttgctcaagaaactccttaccattccaagactctctagctcatgccaagttgtagttctctgatcctcatagtcatagactctttaagtacttagttaatctgaattctttgctctttttcgtcttcttcgtttgggatgatttttgatgtcatgtgaaccttaagaaggtcatatgttttggttaaaatttagtaatcttttctttcgactcaggtaagatgcttcaattgaaccaaaaatgaaaactctttaccaatacagctaagatggttaggtaaaaactaaactataaacttctggccagttaagagtccatctctatttgtttacgagcttttcaactattcatgtatgaatggtgagtgactccttctaggctctaatgagctttacaaaccgaaggctcctagctcgcttgcaaatctaaaaatcggtttcgaaatcctgatatatgcttgtacc

SEQ ID NO: 9668 - DNA, 1906 bp, Arabidopsis thaliana landsberg
taactagatgactgccaacccggtttagatgcttaggtaaacttatcaaactgaattctaatgcttgcttaactctagtaattttagatggacacacaaaaccaatattggttggcatagctagtcaattataactagagtcggggaactgtacattaaaatttgtagttgtagaacggtgcaataacagtcttgattaattgctagatctactattagtctatttttttgaaaatttctctaaatctaacattttaatcatctgaatttacttcaatcaaatctgctttcctgtccttttaagttttaatttacttaattttgatttatcttaatttcgaaacatttaacattttgtgttaacaaaaaaaacttttgtagaattcaacatacatcagtaaaaacttaattttgatttatcttagatgtaatttgacacacatcagtaaaaaaaaaacaataatatctgattacaaatgtaaaaatttctgatatattgaataataataataaaaataataaaaagctttgaaaaagttttatcttttaaagagttgagcgatcaaattatcacagaccgctagttttttttgccactctcttcgtctctctcttgtagcaatgccgcttcttcatccacagtcgttgcggcatccttctttcgagattcagacccaaagaagaagcaattccacaacaagattgcttctttctcacaagtttctccattctcaagcttccattatctcaatctccaggacaagaatcctcaaacgggtctctcagaatctctctgtagctaaagctgcttcagctcaaggttataaagtttgttcctttgtctccgcctgaaaaattgttaacgttatacgcgaaggagactaagcaagttctgatatttttttaacttatgcattttggaaaacagctagtagtagtgttggtgagagtgttgctcaaacatcagaaaaagatgtgttgaaggctctgtctcagattattgatcctgattttgggacagatattgtttcttgtggttttgtgaaagatttggggattaatgaagctttgggtgaggtaataataatactttatccttcaccaatttgttctgttttagattgtttgttcaaggctgctgaaacatgtttggtctcttgttgtaggtttcgttccgtttggagctgacaacacccgcatgtccagtcaaagacatggtaaatgacattaccattcactattcttttatcatattactactgatagaacttcatcccattaggaggattttggagctatatcattggttatataagcaatgaatcagttcttttagtgtatctttgatggatggattacgactcttttgtagtttgagaacaaggcaaatgaggtagttgcagcccttccatgggtgaagaaggtaaatgtgacaatgtcagcacaaccagccaagcccatttttgcagggcagcttccctttggattatcaagaatttcgaacatcatcgctgtttctagttgcaaggtacatatatcttccaatgaatttctttttacaaagctcttgatgtttctttttgaactgaagtttcttctcaaatttaagttaataatatgggatgtgctctgctgtgtaaatacgaatgctacatactcttctgccaaagtagtcttagtgatgtgatatcaataagatgtcctgtgttctttgtttattgtctcgttcaagtttttttggaaaagatagaaacggaacagtagctggtatttcctctttgtgacatagaaagtaatctgtctgtatctttctttctagcgtcccttttagttcatgacacgctgttgttagatgaacatttcagggtggtgttgggaaatcaacagtagctgtaaatcttgctta

SEQ ID NO: 9669 - DNA, 761 bp, Arabidopsis thaliana landsberg
tggtgggttctgacctttcttgatcggatacgaagcctccatagcgataccacactttcctgttggcgcttcaatgttacgtgccatctttatgtatccgctctctccccatctgtttccccatgagtttctcacaatccagtagtcctttccgttctcggttccgtaacccacagccacaacaccgtggtctaactccgtcccacaaagtccatcaaatacaccctgaagacaaaatatccaaccaacattttaacatcttgaaatcaagatagtgcaaatggttgtctagtaacaattaggttatttcataccgaagaatagagctggaaagcgcgaccacccgcttcaatggcgacactaataggctggtgagccaaagctttctttagagacgcctcgctgttctcagggacatcttcatatgaatcaatggtaacaaccttagcatttttctgcaaaacataacaaaacagagtaaatttcaaattcaaagccattgttgagtttcattttataaactaaatacactaaactaaccctgttctggtcacaacgaccatcagcagccttgtaaggataatccgcttcggtatcaataccaccatttttgataataaactcaaacgcatagtccattaaaccaccattacatccttggttataagatgtgtcacaatcaaccaattcttgttcagacaaagatattaaatctcctgtcacaatcttgtttattccttccactgctccaatagttgaga

SEQ ID NO: 9670 - DNA, 537 bp, Arabidopsis thaliana landsberg
ccatttgttctgagttagttactttaacaatgatgaaactgaatgaaacttagggagaggttttatatgtacagaaaacctcagcagcagaatcagcaatttttaaatctgaacaacaacaacataaaatgcttttgatgaattctcaatgtttttgtcttcctcttcttacgcaatgtgctttctgctctttgcccagaacggtattgcgggtgtacgctttaaagccttcacgctaaacggactgttcttgctctgccaaatcacaacatttcaaaatcagtaaacatttccatcaaaaatgctctttgataccaatagatatatgaagaaactaaccatcaaacaggttccgcggttaacgtcacaaaccgggtactcatgaggacagcaacttgagttatcatcgcagcaagtagcagcttcgagcgggcaacatccccatccgaagcagtacttaccatacttgtagagacaacaacaagtgttgctctcagggcaagagaaatatttgtcacatgtggttggtggcttaaa

SEQ ID NO: 9671 - DNA, 2433 bp, Arabidopsis thaliana landsberg
aattttatccccattcacgtccatatccgcagtctccacaccttccaaatgatgtgtaagagtcatggtacaaaatctttgtggtaaggggacaggatattttgtttttcattaaaactacttttacttagacatcgtctaatatatgttttctaattttatttcgtagcaagatttcaattggaagtcaaaacatacgaatcgcgtacgtgccgagttcttgagccaaacaatggcctcctatacaaaaacaatttgtacgagtggaagcaaaactggatagaagtgaagaagctgccaaaggatttaaacggtgaagtttggaaaggcttcatttaatattggagtatgtaggagacacagttcctttcacacacaaactcaaagaatatgaaggacaacaacgatatggcggtaccaacacacaacacgggtgcaatgacatttgagagccgtgaaaggaaaatggtatgttttcccttacttattttatgtttcatttttacttaatactaaaattgtgtgttctacgttatgatcccccgccatgtcgaggatgaactcattttcaataaaaaatttgtattataattttcttttattgtctttatatattagattattgtgataaggaatataaatatttggaatattttataagttatattaatcttcatgttatatagtaaatatttgtcaaagaaacttttacgaataaaaatgtaagaaagaagatttagaaatttctttttcttaatttagctacaatattatgtattttaatctcgtgtcaactaatgaatatttctttatagaggataattctctttcctatagaagttctagtttaccaagtcttctatacaagtcaaacatctttttcttaatttaatagttcttctgtggagaagtcacaatgacaagtccaaacgtcagaagtttaaacaaaaacttatgcattgaataaaacgcgcttcagagttaaagaacctttgttcatctatacaagcaccgcgtggatttgtaaaaaacaaattccagtttttgttttgtttcgttgtgatataactcatcagtcgtttgaattctatgaattaaaaatacttctaatgatttatataaaaataatatttcttttgtattgcaaattatatccatcacgcgcaagatgacacactcgagcaatgacttggtcctgccaaaacccaaaaatttctcctgatttgcaaaatctttttaaaatctgaactcgtagatgcccttttcgtactgtgtgatgaatgttctctgcaattgaaagaactaacggatacactcttggagaagctgatttttaatctctagtgtacgattttttaagctttctaatattgaagttgaagaattgcatatagacaactaaaatattatcttattaaattaaaaggtcagtagaaaaaaccaaccgaaaaatgatgtgtatgcataattactcgcaatggctaaacttacataattaccacatttattgagaagaaacaactaccacaaaccataaatattgtagcatcatttacaaatatacatgctttgcaaatatgtgagatggaaaaataaaaaaataattacgtgatatatacacacatgtgtatccatccctccacatacatgttttacaaaagtagtgtaactatagtttcaattaaatttgacaatacccttatctcccttttcaccttgtgatccgaaacccaacaatcaccgatcttctaatttttaacgcaagaatattatttgcgactagtttaaattgcatgtgatactaaaacgagagtaatgttccacataaagataaaagacttgaaattatcaaaatacatgggatcgtggctagggcttattggctggtgggatgatccaacggatccaggtgcctgctgtgaagtactgccttcgagatgaatctttcactctcattatcttttgaccccaaaccgcttctcgtgtttcttccccaatatttaaagaataacaacaagaactaattaattttgaatattgtaaccaaaagaaaattcataaagttttgtgaggtttagaaaacttacttgtctttggaaatatgtatggtatatgtgccacaattctggttgacgttgcagagaacattagaaataccaaagtaattaaccaaatcaccgcgttgttcattttttttcgttaatctgtattatgaatattttaacgtaaatctggtaatacatatacatatatagggaggaatgagctcaggttacgtatgttagtattacttttcctctctgattttgaaaatattaattatcttaattaattaatgattatcatccctattgtgattgacaatttatataaatattaaatacaataaaaacaagaacacacgtatttttaatgcaaaattagcggatttag

SEQ ID NO: 9672 - DNA, 626 bp, Arabidopsis thaliana landsberg
  unsure (1)..(626): unsure at all n locations
ggttccatccaacgcaggatccgccgatagttttcctaagacttctctagtatatcgaaaagctgaggccctagaattagtccagcctgcacataaaatttatatatattatgttatttttgtaaaactatcttcatgcacgcattatcttctatgcgccttaaacaatttacgtgcatgtcaagttacatgtctacttttgtagttctaatagatacaaatcttaacttttgtatcttttagatacatgtttttgcccatgcaaaaaatctttatttttgtagttctacttttctcttatgtgtttgtcaagttaaatatagaaagctgcttacaatcatatatgaaacgatctgggaaacaccgatgcatctgaggaacatatgagacatgacaatgcagaagaatatcaatattatttgaatctccagaagaggcaacgagtacccgaaaaccacatcaggcgactttaggttctccaaaaatccttgagaagatatgttgaagaatgatatccggcaatgcccaatgtaagtagtcgtgttcatgaatataagtccaagaaattagcanaacttggggatgaaaataccgtctttgtgtgataaagtttcaagtctttgaat

SEQ ID NO: 9673 - DNA, 914 bp, Arabidopsis thaliana landsberg
acgatgactacgacccactggaaactgaaagaataccacattgagaaaacaaaataagcacataactttagggcacagagaaaggcttcccattaatcagactgagacagatcttcttgtagatagatatatattaataagacacttaaactaaccacacagtcctttaatttgcttgatcattcacttactacatcttatagatagatattacaacgtatcaagtgattatcataataaaagacactgcagcaataagccatataagtaacatggattcaatgatatgtacaattcggctttaacaaggaagaatcccaaaagtaaactaatgacaataacaggacaatgtttggcttagatttccagaacacacacacagagaggacaagtagatgctcccattaaggctcagtatcaattggtagtactctattgtatacaaattactctagaatctagatagatagcactgtttttcttcatacgcaactacaagaagtgcacacagagaaatcaagcttgtgtgtatcaaccgtatagaacatgcaagctaccatatcacagtcataaaatgagacacaccaaaaataatgctacttggcatagagtcatagagacaataaaagtccagtatcaagcacacattgtaactttaatgaagaaacacagagtaaaacatatttccagaaatcagagaggaagcaatttcccaaaaatgcattaaacacagaacgaaatacaaatctggttcccaattcacaattgaacataatgaaaaaaacctaacgcacattcaaactccgagccactcgattctcaaaaaaggagctagggtttgagggatacataaataacagcacgagaagagcgagagatggatttcttcttaacactgtcttggtttgcagctg

SEQ ID NO: 9674 - DNA, 548 bp, Arabidopsis thaliana landsberg
ggttgttgcaggagatcctgcaaatgatgcattaccttatctatttttaagccaactcttacaaaatgggaaagagaaatcaggtgtatattgtttcttgacattgatcttagtttgtcttggtttgtctcatcttatgactatgatgtggtagcttgcatgttgtatacggttgatacacacaagcttgatttctctgtgtgcacttcttgtagttgcgtatgaagaagaacagtgctatctatctagattctagagtaatttatatacaatgatagagtactaccaattgatactgagccttaatgggagcatctacttgtcttgtgttgttttctttttctcttcaatcattgttctgttatcgtcattagtgtaccttccttgttaaagccgcattgtagatatcactgaatccatgtttcttatatatatggctttattgctgcagtgtcttttattatgataataatcacttgatacgtggtaatatctatctataggatgttttcacttcttgtctaatgtctacttactatttattacgt

SEQ ID NO: 9675 - DNA, 1271 bp, Arabidopsis thaliana landsberg
aaactaaaaggaaatctatcacaacggtaacaaaagattcacttaaccgtcttactttttttaaaatcatttttatatacaacaccaataaataaacaactactgtttgatattgcatatatccattataaattccaccaccataacttcgtatggattaaggctttttttttcttctgccaattggttgtaatccatatctctacaacttcgagaggatgattttattaaacgtaacttcattgttatatatgcaaacatgatatttgaatacttttcgagtaaacaccattcatttttttttcattaatctaaaaacgcattatcgtaatgtatcacaaatctgccctacattacacaataatgaaaattatcagtgtctaaataaaccaaacaaaaattacaaaaaatatatattactacacttgacatttagcaaacatagttagatacacagtaaacaacaacagacaaattttaattgtgatgcagccgaagaaacacgtggaaaacaaggtggcactaccatttctcatttctgtcttcaaatatcaccccttgttgttattatcataaataaaagtaaacacctttaagctttaacgcaacagttgaagcagctgaagattcttctcctcctctgttccaaagtcatttacaaacaagattaagtatgttttatccaaaaaaaagaacaacattatttatgtcacttcacatggtaggtacaaaataaaggattatgctttactcagattgaaagaaagaatccattataataactttgtagggtaatgtactactataagtttactctgttttaaaatatagttttacatattcttttcaatattttatcatcaatataaaacatactctatgcattcatgtgattccttaaccatatgatcacaatcatatccaatcaagatccaaatcaacttaaactcaaaatctgaagttgtgaagtttggtggggtatgtaaaattaatttcatgtgtagtcataaacagcaataagcaaccaacttgaccaaacattgaaggaccacattttacccaattgctagaagaatccatataatgcttacaatattagattctcaaacctaaccaacccaagaaggtccacatcaaatgaacaattcacaaacattatcatcctattcatcaagaaaatatgaatcttacaatggatattcaaagtgttaacatgtaaatgcaatcaaaaacataagtttcaaaagtttggttttggtatgagcatgaac

SEQ ID NO: 9676 - DNA, 557 bp, Arabidopsis thaliana landsberg
agtcccttcaaacttctgcgtgacatttctgaccttctcaaggttactttcaagctccttcaattctacaggctcacggaagctctttctagcctagacacaaacacaagaaaatatatcgccatttattcattctgctcaaaaatcttagtaatgttggaagtaattgaccacaagttcagtttattacttgtttgattgtgttcttcaaatgcatctcagcactaaacagttctcgtttgctttctacagacgctgagatctctatgtacactctacaaagttccaatgatgctcttgcaaacttcttgaaacgctctttgtctttccacacttctaacccctgaaagcataccaatatgttatcaaaagctactcaaatatccaaaaaaaaagaagtagctttacaaactagtcaatcattaccagatatgatcgcacttgttttaaaagtgcctcgctacatatcgtaagatctccattgattctactccatcttgcgtataatccccagttttcaaatgtactttctgttttgaccaatctataaagaaaga

SEQ ID NO: 9677 - DNA, 934 bp, Arabidopsis thaliana landsberg
tttctggtttgacctatacctaggctaatcgtttatttgccttttgtagttgtaaactatttctgattcacatagaaaattaatagataataaccctactttgtcgagaaccatgataccctgaaaaactttcctttatttgctttcttatttcattgcattagtcattgggaaacacaaaatcaaaactcctaagattagttttgtcttatccatatcttcttctatgaattcaatatctctagctatcactctctgtcggatcaatctttaaatattactactaattcatgtgcatttccagttaacgtgtggtctctaaagtaaaaccttgagacaaaattaatcgcatatcagataacacacccatgtaagtagaagacgttttgttctcgtcaacaattaattaagcaaattgaagtgtccataacatagtgaatagcgaggagtttccagtcatatgatgggaagccctatataagttataacatctccatatatcttaccaaaaaccttcttttgattactacctccacatatcttttcagcaaccatcatgtgaatcaccttttattgcttaggtgagaactcgagaaatagaggcattagaagattttgtgtgtgctacgtaagcctaagctaatccaagacctatggtagatggacctcggtctccatgcaagctttgaaaccatattcgaacagaccgatcattctatttagtccaccattcaggatagccatgtaaatgcgagcaatacacattcttgtgaccaaatttgccacattgagaacagagaatctgatctctgttttacttgttccttgttaaaacatatattttggtcggaaaacaaaaccagtggaatcaccactcaaatcacgatgtgttgacattagatcaataacaagtaacaaaataaactgagtcttc

SEQ ID NO: 9678 - DNA, 1412 bp, Arabidopsis thaliana landsberg
  unsure (1)..(1412): unsure at all n locations
caaacaattgtataaaaccaaagcaggtctttttaagtaaagtgttaagagtagtcagtgagatagcaatagcagaaaaaggatgtgaacttatgtacgataataatacataaatgtacaatattatcattcccttggactaccagtactttgataattctaataaatattgtgtaatatagtagtctgttcttgttttttggtagcaatactataaaaacctaaaaacaattgaagcacctttttggctgtcaatatgtcataacacgggatcgaatacatttgaataaaccatatgaaaaagtgagaaaccaaaactcttagctatataatttccagccttccttcgttttccatttcaattgtaatttttgtcacagtcattaaacaaaacgcttttatgacgatatcaacggttatagcattcatgtccatgttcctagtatttgttatgtctggtccgatagtggtggagggacgtgcttttttcgtgttcggtgactcgctcgtcgacagtggcaacaacaactatctggtgacaactgcacgtgccgactctccaccgtatggaatcgattttccaactcggagaccaaccggccggttttccaacggtcttaacattccagatcttatcagttacgtttggttactaatctcataaaccggtttagagtaatcttgattcagatgagtatacaaatatttagtcataagaagctatttatttaccaaaaagacataataataaactggttaaatattggttaggtgaggcaatcggtaacgaagagccaccgttaccttaccttagtccagagctaaggggccggagtcttcttaacggtgctaattatcgcctccgctggtatcggaattctcaatgataccggatttcaattcgtaagtatatatantaaccgagtctgacatcaaatgaaaaatttcatattagtttccggttatttattagatataaattttggcatgcagatcaacattataagaatgtaccaacaactcgattacttccaacaataccaacaacgtgtgagtcgcttgattgggaaaccgcaaactcagcggctcgtgagtcaagcgcttgtattaatcacggtcggtggaaacgattttgtgaacaactatttcttgtttccatattccgctagatcacgccaattcactctaccggattacgcccgactcctaatttctgaatacaaaaaaatactattggtaagtggtaacagtcttattataatttgcttcattattgtaagaccaaaattgaattggaatgatgatatagtcttaggcagttgaactcatatgatttcaagaactttcactctcttgcaatgatttgactatttgagtattgttgcaaacaatttaattgtgtgttattgtag

SEQ ID NO: 9679 - DNA, 1516 bp, Arabidopsis thaliana landsberg
cgtcctgtgttctcaaacagatagatctttatggtttatagtttatggatacatgcatgttatataattggatgatttggatccgtggttagatttaattctaatcacggggttttcacctgtcaacaagacttgaaaacgaattatactttctaatacagcatgcatgagctatatagctgcgtatagatattttcttctttctagcattcatggttcacggaaattatattacataattaagttggcttttcaaaagagtaatgtcaagtttatgtgactttaaaaaatgaaaacaaagagtaaaaaaaaacaaaagggttgtgaagtttaacatttattaaagcaaaaaataacttaattgaaaaaaataacttttaaatcttttttttaaaaagttttttaaaatcttaaaagcctacaccaatcatataaacgacatgcaaatttctagaaaaataatatataagcaacaatatattctctatctaatcactacattcatccttttatataaccctaaattttgtactgattattttaattgccatcaaatattgtatagatagttttagaaatacatatcactatatcagttaaaacctacacacatatgtaataccatcaaatctaaaagtaatacggttgtagaaataaatatccacttaaaaacaaaggagataatatacaaatatatagaaatatatagaaatattgaaaatattatcattggtaaatatttatgatgtaacaaaaattactaacatatatagattttcaaaatagataaaatactctatcacatgacaagtagctcagggcaaaaaagagtcggaaccgaaaatacgacccgaaccaaacagaaaaagagatttgaatccaaaccaaaatcgataaaataatctaagtggacccaacctctagacccgaagaactggaaccagaaatacctaaaattacaattataaacgtagttttttgggtacctcatatatttttgggtaatttagatatatctgaatatattaggataagtattttgtgtaataaaaatagatttggatatatctaaatacaattacaattctattcggattttgtttttgttacttaagaatattttcaaataaaaagtacccaatccgaatcgataccaacaaagttttggttctaaaccggtttttattctagataccagtaccgattcaaacccgaaaggacccaaaccgaaaccggaccaaaatttttaaaatatctcaatggaaccaaattttatttctggtctcagtaccttttcaaaaaaagcattgtcccatcaagtataaaacaatcttttattaaaaatgcacatcatagaaaacattaccatttcgttaatgaacttttcaaaaaattgcgtaggagcggaaaggtacacatgtagaattggaagtggattcagaattagtggttggttttcgtaccacggggatcggagactcacatccgttatctttcttgatacgtctctgccata

SEQ ID NO: 9680 - DNA, 1218 bp, Arabidopsis thaliana landsberg
taacggaaaacaaatactattactaaagaaagaaagaaaaaaacatgttatagtatcccttaaaatctacggatacatgtggattaatttggatctggattctggcatccaaaaatattgacccaccttttgcttcttcccgcgaaatgctggacttgaaagcaagcgtgtcggaaataattctgaaaattcctatcgtttcgttctaaaaaagtcaataaaatatgggctgtgttaacatgtaattgcattattgctctataattgtaagtataatatatttttttaagttggtttatatttcttcgaaatatgaatgtgacttatttgagttgaccttataactatctctaaaagggccttatccgtttcataaaaacttttattatatttaatttggagtgtgtcgtacattcgtaagtatctttaaatctatatgccgacaaaaaaaaaaatcttaatctgtatggctatatttgtctttatgaatttataatatatatcttatttttgtttgtttgtacacaagcaaatacattttaaacattggtttcctttttttatttctgaagtttcaactcttgttcattgcgttgaaaggtaaattgctatctgatattttgtgtgttttcaagagtaatacatacctatgataatattaaagctgattctatgtatgcgtagatgggatccaaatggcatatacatactaccagattatatgatgaaaaccgtcttttcaagcttgcttgggatgttttcgaatagagcaaaaaagaactatcttagctagtctacaagatgtaattgatgagtaatagtatcttagctagtacctcactaataacggtcgacataaagagattatcatagacataacatctttttgtatatatgctcctaaacattaagcagttcaaactatactcaaaggccaaccttagctatgcagagtgggcacaaggagacatcgtgcctacattcgatgagtacttggagattggtggtgttgaggtgtcaatgtatgtaactgtttcatgcagttttcttgggttggtacaaactgctagaagaaaaagttatgagtggcttaaatccagacggccaagtcagtgaacgaagtgtacttgacctcacccaagataatatcaggcgatatcttatcacgggccactaatgctggaaaaatgatagatgtgacctacaggaccggtgaag

SEQ ID NO: 9681 - DNA, 716 bp, Arabidopsis thaliana landsberg
agttgaccttggagttctaacgagtttcaagtagcacaacccggagctacatttgtgaggtgataggttatatttggtatctgattgtaacatcgtaggactatatgctgactgaataatatcttcttccaattcaatgtcgaattctctagtctcattgcccctcaaagcttggatttcggcaaagtgaaagtacacgttaaccttgtcactgtcgtcatctagagacacgtaaaatctcaatggcaagctggcattttcgggcgtgattcccatcctacttacagcttctggtacttgaaagggactcgaggatctcacgttgagggtggtgttcacatccgtttcaaattcattatatcggtcccatttgcgatcaaaaatatcatcaggatacctaaaaccatttttggagtagccatgcaaaagtaaatgaatcatgttagattgtttttttttataaaagagttgctaaagttgagtttacataccgtataaaaccggtagaattgctactataggcccgccggtagatgaggtctaaggggccgaattgagtcaaatatgaatcatttcttagtggccgtagttccaaggttgatatcattggtatagttgatcctgttttgacaagacaaatctgcaataagttcgacgttgtcatgtaaatgatctcacgatcttttccgaattccaaatcaaccgcaatccacagg

SEQ ID NO: 9682 - DNA, 817 bp, Arabidopsis thaliana landsberg
attgggaccatccatggatatttccatgcaaccaacgctacaaaagaggggaaattttgctttggcaatcagaacaccgttaatggtgaacacgctaatagaaccttctgaactactccatgccattataaccccatccgatgaaatgcagagagaatctgccttcacaccaactaatcgtctgatcagccgtccttttctaatggaatgcaatagaacatctgaggactcagaagacgaaacaacgactccttggtctgagctgacacaacaacaaactaattctcttcgatggcctcggagcacttgtataggcccttcaaggcgacattttttgcctttgtttgccaacgtattggccagattcgtgttgcttgtggaggaaggcgctccagagccagttgatggctcagacacgcttgttcgagaagtaaacgccttgtgaattctccatagcaaaacagtactgtcccgtgaacccgtcacaaggaagttgttgtctggagaaagagccagacatgtaacaggggcacagtgcccaaaagctgtttccagagtttttgccccatcagatgagactagcttgatactattatccgcatgtccacctataattaaacacatgagtcccataaatatatattaccaacaaacttgggatcgtataattgcttgcttattacctgtgattatttccccatcgctagtaatagcaatcacggacgaacttctgattcctgatgaggcaaatgcttgtgcctgaggaaattgccagtcaccatttccagaactagctggacccttgaacatgcgcatc

SEQ ID NO: 9683 - DNA, 1325 bp, Arabidopsis thaliana landsberg
atcatcatctgcaaattcatttaaaggatcactcaaaagtgtaagataaaaagagcttggattctgtgcaacattcatatgtaataataaggtcttgttcagggcaagaaagatgcgtgttttttaaatgaaatgttgcagaactcgtaaaaccagaattaactaaccacagaaccaccaaagttgagagacagtcattaacaccgtgttataaacagatagtgaggcttgcctagacaccgtgttcacaagagagattataattacctcagccggaaagaagacagtggaacaagatttcatgagtccatatctcctggaactgattgtgacttgtcaagagaacctttgttctttgaatcgacagaatcattgaccttctgttggggatcttcattagattcaatcatgtgttttttgtcagatgacttacgcttagaatatgtaaccagtttaattactctctctggcttatctgcagactctccataacctttatcatgagaaggttttgtaagatttgtaaacttgtcatgagccaccactggcttgctggttagacatttcgatgaactgctacagtctgcattaaccccaccattcacagtctcaagatcagaatcagcaacgcagctagtattatgtctgaacttcatggtagaatcatcaatatcttcactgggctctgaataattaagtttgctagtcgaaggttccaagttctcagcaccatcggtggctatgtctctattaccgtctgtcatacattcagctgcatcgttccctgtgatttcagttaccactctatccagtttctcatcatatgtaatttctaattccactgcagcatcaccagtggtgctacagtcatctatgcttattctgccaacacaagcctcttctgcagctttttcggtcctagattctgtagaatttccagaatcaggcacatacagatcacaacctggctgcggttccagattaatagcttcaggagtgttagattttagctttgcatcagttccgatagcttcatatgtacctcttgttctgctgcaagactccggttttccaactgtatcagataaatctttactaatctctgcagtttcggaatggtcagcttctttagaaccattttcagtcttatctgaaaaatcaaccatatctctatcaccagatgctggagttccaaaagctgcaacttcatcagttatagattctgagtacttggaatcaacatcatctttttcatcaacttccatctgttcagagagatccatggacttatattccacattttcagaagatattaaattatcttt

SEQ ID NO: 9684 - DNA, 1588 bp, Arabidopsis thaliana landsberg
  unsure (1)..(1588): unsure at all n locations
aggaaaataattaaaagtgcaaataattacatatttagtaatacacaatattattaattaaataaaacattgggttatcggttggcaacataactgaatggtttgagtccaaacttgggtttggtttgggttggtttgagtttggttaagtcgatttggtttggttcggtttggttaaaacgcccacctacctatagtgagaaaaaaagatatttatgttgataagtggaatgagaaattgtgtcaaaggatttatgaaggttagtgaatgttgcaactttcttgtagatccaaatataaaactagagaatgttttcaagaatcaagatttgtggcttttacaaatttgaacaactcaaaaacttcttgcattctagctacaataatttgagggtttaagacagatttagagccataccagagactagactctttactgttccatggttaatactcctacatacgtttcctacatcgttttcctaatgtctacattattgttgttctatttacaaagtacatttgcaacaccaggttggttatccatagatggttagacctcttgagaataattgcataccgcatttttatttcgcgtatatccaacccggactttatctccatcgcgtcatagaattcaatgcggctggaatattcttgaagcaacattcaaatataattagaggaccgtccaattggtatatgataacacttcatttccaaaggacaaatcataccattatatccaccttaggatcatggactcatggtgccagatattttgcatcaatgccaagcagaatgaaagattttcctccacaagagatttgagtttataaatatttggtgagatttaacaaaataaaataaaaaatatatatatatatatttggtgagataagtcttaacttgctacattcaaagaaacaaattaaaccaaaaaccaaacactaaaagaatagtaaatcgtcaatttcatattagatgagctaataaagcatcacagcaataaattttgtctatctccatcacttacacccttttttttgtagataatgtaaattcttcctcaagatctgaagaatcataaatcacatagttttagtcaatgctacaatacacacgactaaaagaaaaattacaaaattttattgatagaatttaaaatataccactagacactagacttttgtcttttcattagtcattaccgcttgatatttttactatcttacgcatgttatgaaagattataaagcttaggttttaggtagcaaaaaagggttaggaaaaagaaaaccttactatttattatcccaaaatgtcaaactaattcctctaactgtggtaaaaggttataaaatcaaatcctctggattgatataagtaatttttaaatcgttattccgtcagatcacaagttaatgatgaacttttcagggttcaatacatggcgattttagccatggatccccaacgggatcatgagattacggtccaactgaccggtttggaccttgttttaatatattgaacaaaacacaatanatatcattcacacgaatgattacattttaaaaaaaaaaaa

SEQ ID NO: 9685 - DNA, 1188 bp, Arabidopsis thaliana landsberg
aagaagcatagacatactgataacaaactgtagtttgcattcgccttcaccgtctctaagtgcaatggtgatcaacaaattccatatgagaagcaatatcaagagctttaacctgtctgggatgggttgtgcggctgggattctatcagtcaatttggctaatgatttgctacaggctcaccgaggctcattggctcttattgttagcaccgaagcgctgaacacacattggtacattggcaaagacagatctatgcttcttactaattgtctcttccgaatgggagcagctgcagttttgatgtctagcaatgatcatgacagagacaatgcaaagtatgagctcttgcatgttgttagaaaaaataaagcgaaagatgatcgagcttaccgatgtatctatcaagacatagactctgatgaaaagcaaggggtgtcgataaccaaagatgtaatcagcgttgctggggatatgctgaagatgaatctaacttcactgggacctctggtattaccttacttagagcaattccaatatgtgatacaacacattctttgcaagaaactaaagatctatgagtcgaattcttcttatacaccaaacttcaagacagcgtttgagcatttctgcattcatacaggaggaagagctgtaattcaagcaatggagatgaacctgaaactgacaaaagtagacatcgagccatcaaagatgactcttcataggtttgggaatacttcttcgtcatccatttggtacgctctctcttacttggaagcaaaaaggagaatgaaaaaaggcgatagggtcttgcagattgcatttggaagtgggttcaagtgtaacagtgcggtgtggagatgcatccgaaaagtggagcccaacacagaaaacaaatggctcgactttatcgactcatatcctgtagacgtacctgactctacaaatatcagaccaggctagcatgtgcaagcaatataacattgaagatagaactcaggagggttctgagttattagttcaattcattctcaatgaacacaaagactgcttttcacaggttttgtaatggtgtttgggctcattttcaccctctattaagacactggaaattgatatttacttttcacatgattcatgtgtataatctaacttgtacaatagcatttgaaattttgaaataatat

SEQ ID NO: 9686 - DNA, 594 bp, Arabidopsis thaliana landsberg
tatatagatgccaaaggcaacccttgtggccttggatcgcttgtggagacgctgaacaaaagaaaaaggaacgagtgttatgcaagctcttctacatcaaccattgtggatctttaagatcagctgcagaagaagatatctgaacatgaagctcaaaatgcaaaacttgatgaggatcactagcaatatcaatctcggatggagaagcttctcctcttcatgaaggaaaaagatcctgagttggctgcgtttttgtctactgattctacagaaccagaaccacccctccgaccaaccaccataggcacccagctaaacaagccagctccaagcacattttcaaccaccacatgtaccccagaagacaccggattaggcaccactccattagcctccacttcagctactttgtctaatacttcttctaaccattgaacttgattttctaatgaatttttgaaaaactttgtcttttgttgaaaactatttaggatgataatataatgtatgagtgaatgattttatgaatgttaacttgtttcatgtttttaatcctctttatttagtactaatagcttctcaattcaaaatcta

SEQ ID NO: 9687 - DNA, 793 bp, Arabidopsis thaliana landsberg
tttttgtctactgattctacagaaccaaaaccacccctctaaccaaccaccacaggcacccagctttactttccaactccaagcacatttccaaccagccacatgcaccccagaagacaccggattaggcaccactacattagtctccacttcagctactttgtctaatagttcttctaaccattgaacttgattttctaatggttttttgaaaaactttatcttttgttgaaaacaatttaagatgataatataatgtatgagtgaatgattttatgaatgttaacttgtttcatgtttttaatcctctttatttagtactaatagcttctcaattcaaaatctaatcaggttaggtaacagacagtacaacaaagagtcccaaatcacttgagaccaacaattttcgtctcaaaactgtcttaagtaagcggcgttgctttttagtcggatatctacaactttctaaagtagtcacaaaccagtcgcttatgtgcgactgaaaactgcgatcagataatagtcgtaaataagcgaccatgttgcgactaatttatttagcgaccgttttttagcgactgtttttttcagtcgttatatagtcgtaaaaccttggtttgcgactgatttgagaccaatttgggggttgcacatagttggttgattttaattttggataactacgcggtttgttaatcttagtacaacttgttaatatagttatttgaagtatccgttaggtataacttggtacgtagatgtactacccagattttgttctctctcatctttt

SEQ ID NO: 9688 - DNA, 1255 bp, Arabidopsis thaliana landsberg
tcgtctatttatgcggacgatagaccttatttagttatataaaaattgagacattgattttgaaaataatctatgcatctatactgaactgtaaatgattgttttcccgtactaatttgttttttggagataataaattttgccttttaactttagatatatacagctctaggtaaatccctatataaaagggatgaagaagtgaaaagatccacaagcagcaacaaaagtattgaatttctcttaaaatcccgatgaatttcaggagcatcctatatgataagggtccgctcaccacacttgtgttgcagacaaatgcttatatccaatacaacaatcttggagttgttacccacatacaattattttgaagtttttgaaaaccgacggtactccacacatgttctctatttcaatccacaaagtatgggattctgcaagcgttatacaattggaacaaaagcatacttgcaagtagctagagtttagggataatatcttctttgctttagtgcatttacgaacaaagtgatataacgttacagtatttcattttggtcttatccgtcttatcttagtgcttgccacgctaaccatatttgctttgcttaagatcatattgatagttagctttgttccccaagttaactctcatatgtttcaagtcgaaatgctttagcagcctcttgggggtcatcctgtaactcaagatgaagagctacatcgtcaaatgtttttagattaacatcaaacgggtcagcctgcaatgggtattagttttagatggaccgcaacaggccggcccgctaggactgcgggcaaaggaactatgtccaggaccgcccagctaagcctaacgggtttgcaggctggcccgcgggcttaatttttattttgaatttaaaataatataatttttaatattattgtaaatattacaattctaaaaattaaatttcttcatattatctcatagtttatatattgtaattttataattaagtaaaattatttatcttaacaaattatttatttattataatttgaatatttgtagcatgcgggtcaaatctgctaaaacccgcaatccgtttggaccggcccgcgaggtccgctactttatgggcatgtaatatagtgtccagacccgctccgccatggtactatatgggtcaagcgaggcccacttgactcctctgtccatatggtcataactttaaaataataagggaatcacttgatttggtcattagat

SEQ ID NO: 9689 - DNA, 929 bp, Arabidopsis thaliana landsberg
gggtagacagatgtgttaatctcaagatttggagaaactctcaaaggaggaatctctgtgactcgaatgaaagagaaatggactatagacgatgttgcattcgacgtgcctggtctctccgttgattgttttattcctcctaaagagatgaagatggattttcaccaccaagatgctcaaaaacatttaccaaactacaatacatgatcgaggcaaaactgtaaaattagaaaaatgtaacagagtggggtgtttttgactcaatttaaaagttgtggggttattttaaaactatatatatagttctaccacaactactttgttccttcttcgttgtgaaagcaaataacagagagcaacaaaaaaatgtcgcgattggctttaaatcgttatagccgttgtttttcgcggcttaagacattgacgacgcctctgtttttctcttcctctgctgcgtcgaatcgagatggtgactatcagataggaccgcccccgatccgagtcggactcactgagtcagcgggtcgggctgtttttgcaacgcgtaaaattggtgccggagatcttatacacacggccaagcccgtcgtagcttgcccttctcttttaaagctcgactctgtttgctatctttgcctaaagaaactcatgggttctgctaaatttgaagatcgtggagtttcttattgcagtcaagagtgtcaagagaattcaaaggtcgtgattttttggtctttgatgtatgattctcttataattctattggtaatgtattatccctgcttacaaggtgttcgacgaaatgctttaatggaaaaaacacatcactttcttttttttattcatctagagataaatcattaccctatatgtgtacttttgagttcatgatatatatgttttgatgatttacaggggcttttggactg

SEQ ID NO: 9690 - DNA, 1338 bp, Arabidopsis thaliana landsberg
aggttacaaataatttcagtgaggataacatattgggcagagggggtttcggtgtcgtgtatgtctgttttattacacgatggaacaaagactgctgttaagaggatggaatgtgcagcaatgggtaataaaggaatgagcgagtttcaggctgagatagcggtacttactaaggtcaggcatagacatttggttgctctattgggttactgtgtgaacgggaacgagaggttgcttgtctatgagtacatgccacagggaaatcttggacagcatttgtttgagtggagtgaactcggttactctcctttgacatggaaacagagagtgagcattgctttagacgtggcaagaggtgtggaatatctccatagcttggctcaacaaagcttcatccacagagatttaaagccctctaacatccttctaggagatgacatgagagccaaggttgctgattttggattggtcaagaacgcacctgatggtaaatactctgttgaaacaagattagcaggcacattcggttatctagcaccagaatacgccggtaagttcattcttctcatctctactaatgttaatttcacaatgtgcttagtctgtgttatcttactatgcaaagagtttatacattctgccattacggctgcattggttgcactggatattgatattataatatatggttgcagctactggaagagtaacgacgaaagtggatgtgtatgcatttggtgtggttctcatggaaatactaactggaagaaaagctttagatgattcattaccagacgagagatcacatctagtcacatggttcagaagaatcctaatcaacaaagaaaacatcccaaaggcactcgaccaaaccttagaagcagacgaggaaacaatggagagcatttacagagttgctgagctagctggacactgcacagcccgcgaacctcaacaaagacccgacatgggccacgcagtaaacgtgctaggtccacttgtagagaagtggaaaccgtcgtgccaagaagaagaagagagtttcggaatcgatgtgaacatgagtttacctcaagctctacaaagatggcaaaacgaaggaacatcgtcatcaacaatgttccatggagacttctcttattctcagacacagtctagtattcctcctaaagcctctggctttcctaatactttcgattcagctgatggtcggtgacaccaaactttgtgtcgatctgtgacaaatcgttgttactaagtttttttctttcattttggctttggctttttttcttcttttatggtatgatgattatatttatatattgtaagcacata

SEQ ID NO: 9691 - DNA, 1618 bp, Arabidopsis thaliana landsberg
  unsure (1)..(1618): unsure at all n locations
tcaagtaaatgcactcaccagatggataacatcgatgctgacttcgtgagattccactccttcaaaggtaaccaagaggacatttccagggacatctccaggactctgattgttaacaatctcatggcgattagagtactgaatatagacagttttcccacgaatctgtgcgggctctgaagatgaagcataatacgaaaccattgatatagcttgattcaagtcagcctgtaaaatcaaatgaatggttcatcaatagaaatcgccaaaacgaaagnnnnnnnnnnnnnnnnnnnnagctataaaacttgagaaacctattcgatactacaattcgagaaaagctcgattctagggtttgatgtttggcgctgcaattccaatttctctttatcctttcctaaaccaaatcccgggagctagaaattgggggactgtaagaacaaaaacaatttcaattaagctcacaaattcgacgaaagcttgattgcgattggcgccgacattgctcttggtattgacgatcttgccgaatcgtttgcaaaggtcgatgagctcctcttcgacgcattcccatggaagattccgcagatgaaccaccttcgacggcgtctgtgtataacggaactgagtttggcctgagctcgacatctccggcaaggcgttagatacttgtttcagatttagtaaacgaacgatcacacacacagcaaagccggcggaggaagtagctcgattcgatgctctttgtgatcggaaccaaaaccatacagctaaaatatcacgaatatttgctaatcacccctacaatttgtatcttctccatatttgacccttaatcttctaaggccgtaactactagtccaagtgtctatacaaggaagtatattaaaaaatgaaaaacaaaaaagacctaaataaaagggccttataacgtatattactagaaaacgccgagggtgatttgttttgggcctataacgtacattagaatttggatccaaatcattcaaagcccacaattgataaagcccatgaattaactgtccaataatgccctctcgcccatcctctctctaagtgcatccaagtcaaatttccatctcctctttattatggtttctttaagttttttttttaaatggttttgttttcattcctacagatttgaaaacatttttaatttttaattcaagtttttctaaaaaattcgtttcaattttaactttaaaaaataattttaatactaaattataaatgatggaaacactaatcagagtttagatcttgtcatttgacctagttatttgatcgttacaaaattcacaaattcaatttgtttttcatttttgtatagatttagcattgtagtttctaatttctatcttaaaatttaaaattgttatttccgatatttaaataaagtttaaattttgacattcatgtatttgttataaaaataattaagtcaaattgttttatttgccaagattttctattgttgaccccttcagagaaatactatcattaaaccccaaaaaagcaaaacacttttcatgtgatcacagagaatcgggacttcaaaggtcacaagttagaggtcctacataactacttc

SEQ ID NO: 9692 - DNA, 662 bp, Arabidopsis thaliana landsberg
attggaatagtatatctaagtaaaaattactcgtagaagtttgcttgatcacaattttttatatatttatctgtttgaagcacaacacactaccgcatgtattgccacacccatctaaaaccatcaatctcaacaattttcatcaaaaacaaccaattcccacagagaaatacccattgattaaaaaaaatcagtgaaagaagctcacactcgaaatcgtaaaatcaagtaaatgcactcaccagatggataacatccatgctgacttcgtgagattccactccttcaaaggtaaccaacacgacatttccagggacatctccaggactctgattgttaacaatctcatggccattagagtacctgaatatagacagctttcccacgaatctccccggcctctgaagatgaaccataatacgaaaccattgatatagcttgattcaagtcaccctgtaaaatcaaatgaatggttcattaatagaaatcgtcaaaacgaaagcttgaacagtcaaccatcatagctataaaacttgacaaacctattccatactacaatttgcagaaaaagctccatttctaaggctttgcatgtttcgggcccttgcaaatattccaatatctcctcttttattcccttttccctaaaaccccaaaaatcc

SEQ ID NO: 9693 - DNA, 1671 bp, Arabidopsis thaliana landsberg
tggtcattacatctgctgtttgtgatgacttgaaaaccagacttatgggagctactaagcagcttcaagatgttctaactacgagatcagaggttggatttgcagatttgtcaaccttttattgatttgtatctgcctattatcctacaatggacagtgttttattgagatatgtcttgtcttcctgcagaacatgaaggctcatgaaaaccggaaacaactcttttccacaaaaaatgcagtagatagtccgcctcagaataatgcaaaatctgtacctgagcctcctccttggtcaagttcattaaatccttccgggaatttacaacaaccactgtgagttttgttcaagaactacttcctatgtaatagttattcttatctaattaggttttgtctcctgtaaccgatcagattacctccattaaatactggagctccaccaggtagccagtaggtatgtcctaattcccattacttacaactcttgattgtgtttgttcaccgttatgcttgaaggtcaaaaagatgtataaaacataatgttttttttatgtcatgctaaaacagacgcagatccgcgatcgagaatgctccttcacatcaaatggagatgtccttgttgcagcaaacagtcccaaggcaggagaactatagccaaagtcgagcggttgcacttcacagtgttgaatcaagaataacagagctcagtggaatattcccgcagctagcaacaatggtcacacaacaaggagagctagcaatcaggttcgttaacgttttcttacccacaacccgacattttccgagttgttgggaacgacatctaacacctgttagttttatggaacagaatcgatgacaatatggatgaatcgttagttaatgtaaagggagcacgtagctctcttctgcagcatctcactcgaatttcgtcaaatagatggctcatgatgaagatctttgctgttatcatcttgttcctcattgttttcctcttctttgtggcttaaaacaataccatttcatctcttgtccctgggggtatcaaatctatacatatgttaagcttgtaagcttctagggctccttttttttgtgtggatagtggagtgtcaaaaagtttaattttttgcaagattcagttgtattttaccaggaaacttctgatgtaatagcatttaactcaagtaaaaattcaaagcaaacaaagtaattattattcagaataagatataatcacacataatatgtttcatactaaacatcataaggagcacagtaatcaacgtatatgagtttgggacttagaaatcaaactcactgaagcatcaacaaaaatgctcagaagttagtaagtaccatagctatgtctcagaacaatccaaccaagtttcttggatttgagtttactaacttggtgcttcagtctctctctgacatggatggtttatgcagcagctgcatcaaacctcttcatcatgtcacaatgtggcgtttcgcggatatatccccattgttgtctctgaagctcatggcgacaattctggccaagtatagacaagtaatctctatcaacttgctcttcaaccctctgtctctagaagctacttatcgggtattcctgctcgaacttggctgatctcacaaagtaattgacacccctatgag

SEQ ID NO: 9694 - DNA, 821 bp, Arabidopsis thaliana landsberg
gaagctgcaatatccatcgatccggggaaggcttcttatcgtagcaacaaaagcgcggctttaacggcattggggagaattctcgaggcggtatttgagtgtagagaagcaatcagaatcgatcctcattaccatagagcacaccatcggttggctaacttgtacctcaggtaatctcatcaaaaccttaccttgtgactcaagtactatcatcatttttctgaaatccacagattttaaaccaataggttaggagaggtggagaattcaatatatcatttcaagcatgcgggtccagaagctgaccaagaagacatttcaaaggctaaaatggttcaaacacatctcaacaaatgtacagaggctaagagattacgagattggaacactttgatcaaagaaacagaaaacaccataactacaggcgctgatgcagctcctcaagtatatgcattgcaagcagaggcctttttgaagacatacagacatcaagaggccgacgatgctttttctagatgcccggttttcgatggggaaatgagcacaaagtattacggaccgatcggttacgctggtttcttggtcgtttgggctcaagttcacatggcatccggcaggtttgttctctttgagtccctacaagctaacaattgtaggtgatatctgacctaaaccgggttatttaaacaggattcgtagaggctgttgaggctattcaacgagctggcacgttgaatggtaacaacagggaagtgagtatgggtctcccgcgtgcgcaggcggttacagcagcgcgatcacgaggaaacgatttctttaaa

SEQ ID NO: 9695 - DNA, 951 bp, Arabidopsis thaliana landsberg
  unsure (1)..(951): unsure at all n locations
actcgcagcaagctgaacaaaaggaaatctcttgttggtataagtatggaaaaggtttagtttcacatgaatttagtttctaaactctagtttgcttaccaatgagagcggctgctttgcnnnnnnnnnnnnnnnnnnnccacagatcgaacagcatatcctttcttgagcagatcccacactccatctgtattgtaaacttgagcttcgactaatcctgggacttcttgcgtcccttctgatgattgcttaacctccaacctttatcaacacagcacatagtgttattttgctttttaacaagaaagatagaaactgtaaggcgatttattctactaccaaataatataatggaagacctactttttagggggctggtttgagttatctaccaagaggtcccttatcttctcattataaacttccaacatgctaactgatagctcaaacttcatgagatgacttttgctttctgaacagcgaaatagttcttctaaggtcctatagttcactcctctattctctggtgttccctccatggtaaatgtcttgccagttcccgtttggccataggcaaatatgcagacattatacccatccagcaccgaagtaactataggttttgtctgtgcaaaaacagtctctgcaaaagaaggtacagtcagataagaagactcgttggtgtagtgttcaaagagcaaaggtttagcgaaataaagttgcaaaggtagcgtctcaattaccttggccatcgtcaggcttaaagacatggtcaaattaaaatgcttcttggaggaatcagatgaaagtatctggagctcgttttcctgtgttgtatcaaactcagctacagaagcacaaccattggctatttcagcttggtttagaggtatgcatctgcaaaagactctgatatttcccttgagttcgatcacttcattggataatcgt

SEQ ID NO: 9696 - DNA, 445 bp, Arabidopsis thaliana landsberg
aaacacgttgctggcttacagttatttctaattatctcgttgaaaaatcaaggtccaatgggtggtaatatggcccaacggaaaactaatgggccgtacgcattatcgtaaaccagcttgttctgtttcctcaaattaataaatcagcgaaatgttggaaagtttcacctaattcactcctaagctctgttataaattctcttctagacagcatcttccaacaacccacaccacacaacattcttcattctctccgaaaacaacaaccaaatgggagaagcggcggagcaagcacgtggcttccacgtgaccaccaccaggaagcaagtcatcacggcggctcttcccctccaggaccactggctcccactctcgaacctcgacctcctccttcctcctctcaacgttcacgtttgcttttgctacaagaaaccacttcacttta

SEQ ID NO: 9697 - DNA, 1217 bp, Arabidopsis thaliana landsberg
ataactaacataggccttgttgccataagaagtaaacgaaatacatgtgagttagttagctatacaccaacaaaatccactatagttaaagtatcagagcttacctctggtttaatgatggccatttcaccttctgacattgatttatagacccagtcttcgggtataacgcttgtagagtatatatcttattacactgtcaagctctccaataaattggacagtgccctctataaaaagttgttatttttaagtcttcaaggttccaaatactgcacagaaggaggattatttcaggtctatgagcatcgagacatcaatctcaatcaatttccggaaacttaacactaaactgggtacaagagaagaaacaatgtattgatcataaatttgaaatcaaacttggtaaacactcagaaagctcgagattgaatctggcatctaatcaaaaatgcatcaaccaggtccacacgaactaagagagtctagattagtaagttcagaatcgattcaactttttctctttttgatggaaagtaagtttctctcgaatgtgaagaggcacctcaatcatgaattcgtaaaaccctaagcccagaaatgaagagagaggtgctaaataccaaaaatgaaacaaaagacagaggtgccgaaacttaaattgatacaatggagactgaaattaaaagaggaatagagtgaataccaacagcgagagagagagacatagataacattcaaatgatcaaacgatacaatcgaacaagtagcacacgcatagagagatacatataatggagaaacacgacgatgagaaagcaatagataagaagaatacaagcgtgtcgtaccttacgaccggaggagaagcaatgagtgacgatggtggaagaaagatttgaatctggcgggggataacggcgacggcggcggcagaaacagaccaagagagagagagagagacaggagcggataagagagagaaagaagggcttaataatattttgggttttctttttaataattaagtttttctcgcgcaaaaaaaaaaaaaagacaagagagaaaatggagtgggttataattgccacgtgtacgagccgcgatggctcatggctcgagatgatgaaaatagaatctcagggttcgttggtggctgatgaagtcggtgaggctcttctagatggctatttctgtgaacctttctgtcttcactt

SEQ ID NO: 9698 - DNA, 489 bp, Arabidopsis thaliana landsberg
catgtcaccacaacaagagacaggaattgagtaaagaaaaggcttttggtttactctcttcacagaaaatgctaaccttaaagctggattgttgacacaaggcgtgcaaaaccaaccttgagtacaactgtaactcgaatagataatctgcaaaaccgaaacgagtgtgattcataatctcattacaaaccaaaaaaacagctaattaatgaaacttagacaagaatgaagattctgatatatagcaaccttatttgtaacagggccttgagctagatacggtttctcattgcgaagatggtggaacccatatgcaacttgagcatccatacctaaacaacacaagaaaataccaaattacttcaaaaggtttaactttgtagaaatttattaagaacaatgaaagataaagttacttcatgtatccaaattccaaacctatgctgaagtagttgtagaacactccttcataagactttgctttaggag

SEQ ID NO: 9699 - DNA, 1356 bp, Arabidopsis thaliana landsberg
ccatattcatacactaactaacttttgatgcggagcgtatttaccgcgtattttgacgaggcgcgaagagttattatagctctcttctcttctatctaattcactctctttattggctttcgatgagtagcgaatttaccgcgtattttttggtgaaactgtaatgtcagaaagttatcacgcttctacactaatatgtaacaaaatatggggtttaaaatgttattcaataaaaaggaaatcttatgttgatgggccataataaggcccatttatacatggtactaaaacctctgatggataaaccttgtgtgctgttgatcggaaaggaaaagtaaaaaagagagatctgagaaatgggaaatgagacgaagaccaacggtggtcctgcaagtatggccggaggcggaggattcagagctaaaatggaacattacgtttacagtggtgaaaagaagcacgtcttggtcgggatcggaatcgtcaccatcatcttcggagttccttggtatttgatgactcaaggtccgatctctctctcatcgtttaataattgtataaccaaatcccttcttggggattgaaagggtaattggtagaagatgatattggaggattttgattgcaattagattctgattttggttttcttgcaaaatgagaaacatgacatagtgagtaaatggtttctcagtatatatggaaatggatcacattgtttcattctaacattcccataggacctgaatctgtatatctcttacatctgcttttggttacatcctatagtgttgactctgtttgggctaattggttgaagttctttggtttcttttagggtcaaagcatcaatctcaccaagattacatggacaaggccgataaagctcgaaaagcacgcctctcatcgtcttcatcagctaacaagtagtctgtctgaaggattgagtcatttgcacactgttatctcatactcattttcccacacaagttaaaacttagtcaaaatctgagtcttttttgtgatttagattcaaaatcattctcattttcatgcaccatgtttggttatccgttttttaataaaaagatcaaagattctatcacatttggattgacaatgcctatgataaaaattcccaagattccattgtgtaaaggaaacaaatcattaatatctgtaagcaacataacaatataagttgatgtctactttctggggagcacattcatgtctctcttcttatagaggcatgagtcttctgtacttgaagaaccagacgaatgccgaaaatatcacaaagccacatactccagtaattatgagtacccatctgaatgcaccctgctgattgaa

SEQ ID NO: 9700 - DNA, 1999 bp, Arabidopsis thaliana landsberg
gtagttaaatttattttatgcttgttgattgtaccacttatatagattctctattaagttgattaattagttgaatatgtccgcttcaattttttatgtcaaagattaaatttaacgcggtgaaactatttgaccaaaactcaaagtaaaaaaacaagaattacctcacgcgctttaatctccccacttccaagtttccggcggccgtcaacaccacctctaccgccgccaagctcgccagacctctccatatagatacctaaaatcttctcagctatggccgaagcatcattattattctcttccataagcttcgtgatctgagaacgaggcaacctcaacctcacactcgtatgtccaggcccaagctcaggcccaaacccatctccaccgtcagatcttccgattgtgacgtcagaaaccgttctccgagacaacatcaacatatctaaccgctcctttgcgccaacgtggataccagacatcactctccggtacggtagcttattttctgtatccaccgccgtcgtctccggtggaagcttaggaagctcgacgagaaaataagtctttttcggcttcaaggtttggttcggttcaagcggcttagagcgaactccaaagtgtttaacggcttgagaatctaacaaaacgtaaccgggataatccgcggtgacttctctcgccgtcaccggagttttaattcggaaagtttcgccgtcgatcttcattactttagctctttttctcttcacagtaatgctgtttcccatttttttttcttcgctttgcttttttttttttttgttgatttgattggataatgtgaaaatgtgttataaagtggctatgttactatttatatatgttgaggaggtttggttgaaaatgttatttttttgaattttagtgtgtgtgaagctgggaaatattacagagattccttctaattttaattaaagtcgttaacgttgaaaaaaatcattcataatgttttaaaagaataaagtttaatatgtcggtccatggcaaattcgcattacctttcttttgatttgattacatttttttgtttgtttgttatggtgttttcaagatgaaaaaattagcatatatattaaaatctgaatgactgtaactaccgcgcgtgatttatggttgtgcttatttttccaggttttatgttgttatatactcatgtagccgtattatatgtaagaaatataattaagtcaaacgattttatgaagaaaatttatattcatacaagaactacaaatatggttgtttctgtttcaacctccacctaacatgagttaattcagttccaaattagaccaatcattgcctcactctaaatattggattaaccgtgtcatagaatctaatcgatataactacgacgaatcagaaaataacatataaaagacatatatatatcgagagacatacaaaacttttttttgtgtggttactcgaaacttggaacaagggagcggtcaagaccatatttatgtgtatctcaaattgatatattggctctaacaatgatgcttttcttaaaatcagttcttatctagaagaaaaacatcacatgcaaaaagcaaatgcaaattagtagaaaaacctcacatgcgcatgcacatgtaaaaaagccagttagggtcctaaattctgcatgagatcattgtttccatgtatcaaaatctatttttgaatcccaattttgacataatggtacaaaaacgatgaaaagcttttaaaagtgaaaatattttcgtaagaattaattaaactaacatttggtaagtatgaaattatacgatcagaaccaactttggagcttgaaagagggtatactcgtgactaagttattaaaagcaaaaacatacacggggtccgtgttggtgtgcatgctagtggtcaaacaaagcatccgacatatactaacccttggtgggtaaactcaaatgacaaaactaacctatctatgagctga

SEQ ID NO: 9701 - DNA, 1475 bp, Arabidopsis thaliana landsberg
  unsure (1)..(1475): unsure at all n locations
aaagctccgcttcatttcttgtctagttgcaagtcttctcgtctttctttgttttccagagctcagacgtttgtcatcgctggagggggagttacctgcaacgaaaaccgagatcgaattgtatccgttagattgcctgcggttgggttcaacggttcatttccacctttcaccatcagtcgtctctcttctctcaagtttctaagccttagaaagaaccatttcaccggagacttcccttctgatttcacaaatctcaagagcttgactcatctctacctacaacataaccacctctcgggnnnnnnnnnnnnnnnnnnnnnnnnnnnnnnnaatcttaaggttcttgatctgtctaacaatggattcaacggaagcatcccaacctctctttcaggattgaccagccttcaagtcttgaatcttgcaaacaattcattctcaggggaaattacaaatcttcatcttccaaaactgagtcaaatcaacttctccaacaacaagctcgtcggtacaataccaaagtctcttcaaagattccaaagttcagctttttctggcaacaaccttaccgagaggaagaaacaacgcaagactcctttcgggttaagccaacttgctttcttgctgattctgtctgcagcttgcgttttgtgtgtttccggattttcattcataatgatcacttgtttcgggaaggctagaatctccgggaagttgcgaaagagagactcgtcttctcctccaggaaactggacatctagagatgataacactgaagaaggcgggaagatcatcttctttggtggaagaaaccacttatttgatttagatgatttgctaagctcatctgcagaagttttgggtaagggtgcttttggtacaacctataaggtaacaatggaggacatgagcacggtcgtcgtaaaacgattgaaggaagtttttgttggaagacgagagtttgagcaacaaatggagatcattggtacgatcagacatgaaaatgtagctgagctaaaggcttactactactccaaagacgataagctcgcggtttatagctattatagtcatggaagcctcttcgaaatgctgcacggttagttattttcattgctctcattctgatgataaatcgaaactataaggttccattttctttgcaggaaacagaggaaggtatcatcgagtaccgttagattgggatgctagactgcgaatagcaaccggtgcagcgagagggctagctaaaatccatgaagggaagttcatacatggaaacatcaaatcctcaaacatcttcttagactcacaatactatggctgcattggagatgttggcttgacgacaatcatgagatcacttcatcaaacaacttgccttacttctggctaccatgcacctgaaataacagacacaagaagaagcacacagttttcggatgtatacagctttcgtgtgggtattactg

SEQ ID NO: 9702 - DNA, 1666 bp, Arabidopsis thaliana landsberg
tgagaaatcttactatttagtcttctcttacttgagaaaatactactataggtcattttatttagaattttaatttacttacgcatctttttattgtaaaacttagtataaacttgcattattactagatatttgtaggcttgtgatttgcatagtgctgctgatatatgttattattcatattcaaactggatgcagaacgtgagttatatagaagaagaaaagaaaaaaaaattacatgtatagtattattattagttttgtcaactaattttgtaaaaatataatgtataataatttaaaatagatatatagtatatggcttgcgaatacaatattctaagaagaacccacgttctataataaacaaaacggatacgaaccatctttcctatagaaaaagaagaagagaattagtcacttttaagcgctgcagaacaacaattgattaattctgcttgtgatgtgttttttttttttttttggttgctactaaattatcttgctaaacccgagctaattatatatcaaagaatcaatgttctactaaagtactttatattcacttttattgtcaagagggcataaggcgcataacgtagaacaatcaatctaggtaatggtcctttgttctatactgagatagtgagatctacccatgtatactcctttaaatatcgtaaaacggagtggaccctttttgatgataagtttggagaaagttaatgatccattaatgtgataagactagctgataattatcaaaatgtcaaattagttgatactactactttatattttcaaaaattattgataagtactccactttgttgccttatgtcgaatttggtgaatcactaattagaactacgctttttctaacatggacaaaaaaatataccagaaaaagacaactagacactgataatttattgatttagaatgagtaatgtattagtaaaaaatttttttgatatatcatcttcatacaaatgatatcaaacttttaatttacaaaaattgtttgggaaacaaacgataatcctgaaaacacttaccaattgcatcaacccattcaaataattattgacttattcatcttaatttattgaactgactaaactcgatccgacccattaatgcatgacctcatatcggaccgtgactggttgtcttaatttttaactgcacccatatagtaacacctaagctccctcaacgtggacgcatgtggcctgaaccatggtgggaccaatctcagtaggaaagtaggaaatggatcggaaccgtccatcctcatggcatgtgggacccaggaaccgtcgttttcatcggcgtaacctggcgagtcagggctcggtgcaatgtacttgaaccggacacgttagcttggtccgcacgtgcacagacaaaagtcacgtgcggtcaaaaggtcagagcatgaaagtgaaagccaagctgtgtgaccacgtggaggcggtcggatcatcggtacttggtcaataccttatccaatcacagtactcctcccgaatctatctaacttactttcgcgtcttttgcccgtatttctaatgcttaaaagcaaaaacgtacaaaaagtcttttgtttgcggtatcttaatcataaactggtccaattttttctatcgatcgaaaacggaat

SEQ ID NO: 9703 - DNA, 2244 bp, Arabidopsis thaliana landsberg
ggcattcgtattgcgagacaatgtataacaaggaacttacagaaaccagcccatgcccaagccacaacaaggaagttcatgctctatcattggtctcacctcaaccactgtataatctaaaacaacaataaccagaatcattactctcacatcaacaaaaatctaccctcagtatctgatcaaattgatatagaaaagaaagaagatttttccagaaatgattaccaggaacaacaactgggaatccttgagcataattcacaccaccaccatgacctaacaattccaatcaccaaataatcacaaatcacaaagtaattatccaaaattaacaagagggatagagagattttaaaaccttggagattttggtaagcatgtccaggaaacgtagtaatcggatgctgtggttgcataaattgcggtggtggagcaggagtaggaaaattcgcaacgccttgaaacgttccgtaatagtattgatgttgctgattcacggtggagtctctaggttttgctgcctcttcgtccataattgagatccgattaacctaaattttgcttccacaccggcgtaacgcagatatcagagaattatctagctcctcagctgcgtttaccgatggagaacggcgaatttatcggctaggcagagacgaggagaaaagagacttggcgaagaaagagacgacgatgagggaaggagtcaaaagacacgggatagctgacccggatactatccaatttaaattccgggtcgccccaatttccatatttttatcaaaatgggcttgatgatactttaatatgaccgtagcaaaagcctgttaacacttcaatgaatatgattatggtcaatgttttgcttcctccatcaactgtttatttgtccaagtttgcaactctttatggttattgagatttttttttttttttctttggtagctaatcctttgttagatgattggggggtgaatggatcatacaaaacatgaagctatcctaggtcattcttttgcaggcattgtgatgaaatattctttagctatttagtgtaatataatgggttttttctcagtctcatatctctcgtcctcataaattgctattccacgtcctttgatacagatataaaaaatgtgtacaatgtagaccctgcaagctctgtttctccgtcgatagtgtgatgacaacaacagaacaatgctattccaagtagagcagacgatgacttggagaagcagtcctccaaattgatgagtccacacatctttggcctctgcaagctctgtttctccttcaatgacaacacagtaggattctagcacgatggtaatctatattaattatacactcaaaagacagattcgaatgcaatttggtttaaactgataggacgacagtttctctttaaccaatgtggcatttggctttcaacttttctgtaaagagtgtaaatggaatacctatctaactatataaagttatttacgtatactcatcttcctttacaatataccttaaataacatcaaggttaaagaggaagaaaacaccattaacatgaggatgcaaccaacttctgtttttttttcctctaaagttcataacacataaagaacaagcactatagctgaatctaatcaatcacacaaccaacaaacattggctgctctataaagttgcagtaagaaaacattcatatatattaacactaaaaaaacaaacctaaactggatgttacatcctcacgaagaagaaaactttttcatttttggagtgaaaactatccgagaaacaaacattgagattgttaaatcaagaagaactagtagatgagtgaatcagaaagaagctgatttgaaaagtcattcagactgagtatccggaagattctggcatagcaaaagataaagctgcaccaagaaacattccaaggataatacagactgctcttaagtacctgctatatgtcatcatcttcatcatctactattcccagaatcaaaacaaacatatgattaactcttatcctattacttctaaatcatagatccaaaatatgaaatgttcatggaagcgaataagggaccaaaaaaaaaagagattctataagcttcaacatctatctactcatgatacttccggagataattccggattaaaaaattaagaagttcattatggaaatcggagacgacgacgacggcggtggagagagaagaagcaaagagtagaaattaaa

SEQ ID NO: 9704 - DNA, 1165 bp, Arabidopsis thaliana landsberg
ttttgtagtgacttgaccaattgtctttgcagcaatagctagcgatcacatcacaaatatttgtatttgtcatataattaaattaaaaatttacaaaagtgtcaaagtaattatattatcaaaataaaaacgacaaatgcaattagttgtactatcaaatcttatactgtaaagagaagtgaagaaaaaaaaacattgagcaaaacattcctcaaaaatatttgtgagtcacaaattgtgaccaagcataacattttcacttaagtctgttaatattttttaccaataaataaaaatcaattaaaaatgttttttaaaactaaatactattaaattgtattaaaatgatttatttaattaaaaatgattaaatagaataaatgaagtgataaatctatctttataaaggaaaaaaaacaagaataatggaaagggttaaataactttttttctttacacaacatttgtattaagtgaagattaatattttcttgtgaaatctattagtctttaaccaaataataaaacaatcatacaaagtctatcaattaatgtcctctaaagtttgatgtctctttcttattggcagatttactctccgacggatggatccacattcacttaatagttaatttacatctattcattttataaaatttaatactgcaaaaacatacaagatttttgaacataaatatgaaggaaattaatagattcaaccagttaaaactacaacaaacactaagtaaaaaatctacccaaaatttaaacaaaatgtattataaatagaggttgatttcttgaaacataatataagagtcataagattaagaacagaaaagaaaacaaagtttgcttttgtaggattctaagacgatcaaagatggcaaaatggagtgcaatattagtgatactgatggtggtggttgctgtggtgccagtagaagcaaaatggagtgaaaaagattctagtgatgacgaccaatgttatcgagagtgtataaagtcttgtaggaaacacgacgacggcgattgctttgaaatgtgcagagcgatgtgcccaattaccgctcaccatagttcaaaacggtactaaataatttctctaccctttttctaataaatattttttaactaattgtgtttttttgtgttatacgtatac

SEQ ID NO: 9705 - DNA, 841 bp, Arabidopsis thaliana landsberg
  unsure (1)..(841): unsure at all n locations
acaagacatattaatcttcattaataaaatcctacaaatacaaactttgttttatataaaaaaacaattatgattcttatagttatgtgtacacaaatcaacctctatttatagtacaaattgttttataacttttgagaagattatttacttagtgtttgctgtagttttaatttgtttaatctatcaatttccttcatattttatgttcaaaattttgtatatttttgcagtaataaattttataaatatgaatagatgtatattgttgtgaatgtagattcatcccttggaaagtaaatctcatgccaataagaaagagacaccacactttagaggacattaattgataggtttcctatgatgaattttattcattggttaaagacattaatagattttacaagaatttattaatcttcatttaataaaaacattgtgaaatgaattgtgtaattcactatgtttttcctttttctttataaaaatactagataaaaccgtctaaataggcgagtataaaaaataaatgtaaattttgtcgatatttgaattcaaaatagtatttaaaaatttaataattttaaattttacatattctataactatctatttcatcataatacatagcattttaattttatacattccatcttattaatggtatttgaattttaattcttatattttagaatatataaaatattactccgacgaagaaggtgatcttaccttaaagcacgctttcggttaattcttcatataaanatatattcaaaacatcttcttcacttcagattcaatgaaaagggtttcgacattgatgatataaagatatggg

SEQ ID NO: 9706 - DNA, 1148 bp, Arabidopsis thaliana landsberg
gcgacattcacgataaccatatcggaatcaacaataattcggttaattcaacggtatctaagaaggccggttattggtatcaatcttttatctttggaaaaaaccggtggttgttcaaggaattgaagctaagtggaaacggatacagggcttggattgagtacgagaacgggaaagtgacagtcacgatcggacgttcacaagaaaaaccgaagaggccattgatcgaagcacgagtcgatctttctaaggtttttctcgagaaaatgtatgtcggttttgccggttcaatgggacgtggcgtcgagcgtcacgagatcttggactggagttttgagaacagtgccaaagactaataaaccggtttgcttcagctttgtttatgtcaaagttgttactggttttgcagcttcgttttctgtcgtgaatctcgtgatgctaaggctagtgatagttgaaggctaataaatgcttatgttatggcctaacgtgccatgtatctactttcagatttctagaaagatttacaataaaggatccatttccatagtaagaactattagatatcgtaatcttctatgagacggtaaattgctgaaaaaccagtaaggcatgtgcctatgtaggcttcaacatagatcctttcctgcaacgatctatgtcaagaattaactacaaatattcgtcatttgaaacatattctcacacaatacgtttcattgagtgaaactcggtatacaaacttaatcacaccatgaaaatagactactctccacacacaaaaaaaatgtaccagtaaggaaatttgaacacatacgtatgacatccaaccatatcatgatacttctttatcatcaagtcgggtaagccctatttcgcctgatttggctctcatctcaaaatttctccgacctttttctggacgagtcgtctcgtcttctttccctttttgtaacctcattgcaagtttgcaacaacaaaaacaatccaatgattacttcattgcatggtttaaacaaaaacaatccaataatatatatacatattttatcaataaagtatatttataagttaggttgatttttttaatatattttttttttatttttttattttatattatttactaagacattctattttggttt

SEQ ID NO: 9707 - DNA, 1314 bp, Arabidopsis thaliana landsberg
aatcaaagcttgataagaaagaatagagcttttggtacagctgtttagttggagagctgtgcttccaacgacctggctgggcattttgaaagcatatcagagacacaaggagatgcaactacagttttgcagaccgaaaaaagtagttttaaaccaagtatatctaagcgtaaatctgttccaagctacaaaagccagagaaagcatcacaaggtaaagaaaaaaccccacaatgcatagaagtttctgagtcccatctatctcaaacatacttacctgtctcgttttacgtttgcagcttcaggccaccaaaagtgatctgcaacaacaaacaaagaaagcaaagaaggccaaaaccacacccacaagctgcaaaacaggaaacgaatgcgaagaaacctcacataagctaaatagcagcacctaagataagcattacctgtaaatctttgcatttaaatcacaaaagtttgttctttcgaatcagataacaactttctgtaaattatttagggattcaaatcaaaccagtaatagtaagggataagaaactggaaaccccagaaatacataacaatgatagtatcacaatcttctgaatctaagaagatatgtatctcaaatttgataatacaagctggaacagagagccaacaacaaaaacaaacttagatcctatcaatatcctcatcctcaaactcaatgtaatcttcaccaacaacatcatcatcatcatcaagatcaccaacaataccttcgttaagacgagtattctccggaagctcaccatacgccttaagaagcctagcctcatcagacatatacttgagtataacatcagctttatcatcctggtaatctcttagaccaacaagtatgatgtcaccagcagcaatccaaaccttcttatgcatcttaccacggatatggcaaagacgcttaacaccgtcaatgcacataacgtcgcatcgaccgttaccgagcatacgaagaacttgtgcgtattcttgtccatcttctttgaatataagctctcgcttttcgtcatcagcttcgttctttcctctcttcctgttctttcctccctttcctttgttcttcggcatcgtctctgtatcaaattcgatacagaatcagattctgatcttataatggcgtgaaggttacaaaagtttgaagaattgattcgttttttttttcaatttcagacaaaaaaatggcaaattcgagaatcaaaattcagatcaaaacaattccggtaacgagaaacaattagatcgaaacataattgggtaatttcaattcaggggaaac

SEQ ID NO: 9708 - DNA, 546 bp, Arabidopsis thaliana landsberg
tgatgttttatcaccagaagtcatacgtctcacaaattggaaatacaagccggaattataaaaaaacaaacaaagccttagatcctatcgatatcttcgtcctcaaactcaacatagtcatcatcattattatcatcatcatcctcaagatcaccaacaattccttcattaagacgagtattctctggaagctcaccataagccttaagaagcctagcctcatcagacatgtacttaaggatcacatccgctttgtcatcttggtaatccctcaaaccaacaagcacaatatcacctgctgcaatccaaaccttcttatgcatcttaccacggatatggcaaagacgcttggttccatcgatacacatagcttcacatcttccatttccaagcatacgaaggacttgtgcgtattcttgtccatcttctttgaatataagctctctcttttcgtcatctgcttcgttctttcctctcttcctggtctttcctccctttcccttgttcttcggcatagtatctccataccaatcatacagatgttca

SEQ ID NO: 9709 - DNA, 1070 bp, Arabidopsis thaliana landsberg
gatcataactcttcttattattcaaaaaactatccaaacgggttgttatttttcggttaatctctccgttacatttccttccatcgttaacggcagtctcaattccgttaactctgttattcgtcctctgtttcagtttggtaatcgcctctctgctgaaatgaaaaattctctcccgtagaggttggtcggcgtcgaaagtgacacgtggaccaccgggagggactggaagaacgaccgcagaatcgaagacggtgtggcgggagaaatctggaaggtgtttgatcttacaagcaccgctagtgacgtcagcaaaggtgttgaagaagtgccagaaggaagttccgtcagtaacggaatgattcacggtacatccgatgaagacaccgtcgtggagctccgtcacttgaacggcggcgagaggcttatgatgaccgttgtaactaacgagacgctcgaagacgaaaaactcacggaaaagcagaggaacgtcttcacctggtaagagaacatcagagagtttgacgtgtttagcggaagcggcgacgaaatcaactccggcgtcgttgcagacaatggaaatgtgaccggcgggagtggtggagaaacggccggctaaagcagggaagagggaaagagtggaggagagagaacggcggagagaggagacaaggtcgtcgaaggagaaggaaggaggagggctggtgaggaggacgcctttttgaatgtaatgacatgagagcatagggaggtcggagacggagagacggagatcggagacggtggacttcttctccggatagacgatacattttgaaatttcagttaccgaacaagaaggcattttatttggacaaaaatgttttaaagaggatatggattttgggagttatgggtttaacttgcccgtattggtgatgagtaggagttatgggggggataggggtttatatagtggtcggatcaatggttggattcatgaacttgagttgttactattcttgtctttttattttagttgttttctatatttcttttttttttcttttttctttagctatgaagcttat

SEQ ID NO: 9710 - DNA, 501 bp, Arabidopsis thaliana landsberg
  unsure (1)..(501): unsure at all n locations
ggaccaaagctaggtgttatagaaaagcattcctacttcctgtgtatagaaaccattctccatggngctttttaatacaaatattcttcagagataactacagactgagctccatagtctgcttctccagcaatgcaagaaacatgtggcaagtgaaccccccactgccgacaccctactcgattctcccaggattctccaactaaaacacctttgttcctgacaggatcatgttcagctggtataggaccaaagtgatcaaatggtacggtaacatatatccttgcagcattctcctccccgattttagcacgcttggttctaaagccattctctgggccgtcttggttgcttgtaaaaggaaaaaaatttgcagtaccaacaccagcagttttagcaacttttacataacggataacagacacacgagacgagttaccacgaggattggcagccattttgtcaggaattgtggtacgacatgtagcacaaatttgattc

SEQ ID NO: 9711 - DNA, 1550 bp, Arabidopsis thaliana landsberg
tcttagatcgttactatacccgaatttcctgagcatagtccatagtgtttggattcttgttttttcgattaaacgtgtgtttagaaacaagaaaccatccaatgtgagtcctctttcattaactccttgtggaaacgtgacttgcataacgtttttcatttgtttaatttcacaaggcaccaatggtgtatcgaagcattttttctgtttaaaaaaaaaaccttttaaaactgtctgataaaagcactcaagaagaacaatatgaaagagagggaataagaagaaacctgaagctcgtttaactcctcgtcactaagaataccatccatgttatggtcagagagtaagaagatacgtttcaaggcagcgatacagcgaggcttcagtacattgttttcttgatcaaacacaggtcctactgggtcaataaccgctttttgtgcatagtagagaacatctttagcctgaaaattgaaaatgaaaactagccagattcatcacaaagatccaactttcagttcttagaatgcgtaaagttaagatctcaagcaaagcaaagggacctgatctagcctctgagcagaccactggatagatgtctcgacctctcgatattgtttcatcagagctgatgttatttgttcaatgctgaagtgattataagcctctttgttatcaacttcataacctgccactatgataggaactctcacctgttcaataaaagagtgacaagacaaactttttaataagaaatattacaatacttcaggggattgcaaatagtttactgcttgcaaggagaagaaagaaaaagaaaagaagcaaattattaacctctaattgtcgaaacagaggaagccagtatttactcaaacggtcaagagtctccggtctatcaaatgcagatgtcaaaacaattgcatctgcttgcctaacttccttaactacctttcccttgtcttccggtctgcagatttaatcaacagagacatcaatagtgtaaagattcgatttctaaccaagagcgcgtggctcagtggtttgtttcgcacgggttgaggactcggcatgtgtgtcaaaagccaaggatcgagttccaccttctagacaaattgtcgtacttccctcttggctaataatgtatacaccttaaatggaaaaaatatccggcttttctataaaacctcggggattagatcggtttcggcctaggattaaccccggttatcgacaaaatattaaactattaataacaataaattcaattatctttgccttatccacaaaaccttatcagaaaattctatgcataacctttttgatgtcaatgtatagtgtatagaatcaggagaaacatttaccttgaagaagtgtcgataacagtagcgggaatacggtcagggaagaattcagaaggtaaattggtgtaaggtaacagagaagggatgtttggatggaaagtatttcttgctgtagccataatcaagcttgattttccactgcccttttcaccaaccacaacgattcttatcggtttaggcgagcca

SEQ ID NO: 9712 - DNA, 1257 bp, Arabidopsis thaliana landsberg
gagggtaattcactgcaactactaaactcgtcaaaacccgagtgagaaagcagttcgctaaagtcttgtttcgactcaacacaaggttaaatcttatcctcctgagagacttcaagttttgatatctgacataatgttcttagcttcggatgagtgagacagtgaattatcattttcagtacgcgctaattcccctgtaatcggtctgtgaagtctttagtgaccacctagagcttgaaaacacccaaaactcttgccgcatattttgcatctataactgcagctactcacaggtcttttctgcaacttactattcaaaggaagcagttcgccgaagtcttgtttcaactcaacacaatctaagatcttctcctccactcttgatggtcctgatgaatcaaatagtgaattatcatctttatgatactcccttttatgcgctaatttccctttaatcggtctatgaagtctttggtgaccacctaaagcttgataacactcaaaactcttgccacatatttgacatctatgacttgacttactctgcaatttacttctcagagcaacaacatcactgcaagtagtagacttttccatacccgagttagaaaccatttccctgaagtctagcatcgactcaacacaatctttaagctgatctaaatccatggaatcatcatcattaccatgagtcaaatcaaagtcataaacttgtttagaaaacataaccaaactcatcgcagcttcattcatctcatgatcctcaatctcagtcataaaatatggttcttttattgacattgaaaccgaacaaagatccccaaatccttagcaaatcctattcatcatcaaatacgtttaaacccataagaatcattacaagaaagtctgaaatttgtaaaaagttctaagctattttgagaacatagaggacgaatcataagaagagagaaatataaaggtcgcaatttgttaaagatgagagctttgattagcttaccagagtaaaaacccttacttgagtttaggtattatcgcctgaatcgctgagagtgtggagtctcgctttcgcttagctttttactcatagagagactgatgagaacaattacttgttgcggaaggtataaagactatttgtaaagagatagttatcttctacactcgcgtttacatttatctttgtgctccctctaatcactattattttttaatatttttttggagagtatcctttggacttctaatctacattga

SEQ ID NO: 9713 - DNA, 679 bp, Arabidopsis thaliana landsberg
gtactcgctaattccctcttagtcgatctgtgaagtttcgtgtggccacctagacctcgataacacccaaaaatcttgccacatactttgcattcatagcaggagctactactctcaggtcttttctgcaacttactcttccgaggatatacttcactgaactcttgtttcgactcaaacacaatctaacatcttctcctcttgggagacttcaaattttgatggttttgaaatagcatctaaggactcaaacaatgaattatcaactttagtatactcccttttacgcactagtttctctttaatcgatctgtgaattctttggtgaccacctagagcttgataacactcaaaactcttgccacatattttgcatttgtgacttgatttactctgcagattacttctcagagcaataacaccactgcaagtagtagacttttcgaaacccgattgagaaaccatttccctcaagtctagtaacaactcaacaccatctaaatccatggaatcatcatcatgaggagacaattcaaagccatactttttctgaaaacaaaaccaagctcattgcagcttcttcttccatctcatgctccacaatagtctcagtcataaaagaagtttcttttagtgacactgaaaccgaacaaagacccccaaatccttagcaaaccga

SEQ ID NO: 9714 - DNA, 942 bp, Arabidopsis thaliana landsberg
tctgtaaaaaaaaatgttttaagttaaatatctggaaaaaaaaaaattatctctaaaatagggtgcatacttgaaaaagaaaagcccaattattttcgatgaaattgattgttaatgaaggtgacatgttcattaagcacattgctacagaatatgcttccgcctcaaccctttgaccaagtccattctcactcaagatatttcttggctttttataattattttgtttaacctctccgcaacaccagtctatgatgtggcgtgtatgcctatgttttacgccttactattcctttttctttacaaaacttgttacgttctgaattggtgtgtatatcatacaaaaccagattgtacagaaatggatcaacacatgatggtataggcgtatagccaaagagaagcattcttccttgggtaacacgttaatggaaaaggagaaacgaatttccatgatttgttacttcttgaattcaatctatctaccagaagactacctacccatgtagttacattcccaaccgtactagaccagcaactccaatccagacgtgatcataaccgagaaagctcaccaacaccacgcaacaccaatttttcatgtacaaatgatgtgggcttgagaatacatcagcacacaacatattttaagacttttgatcgaaagacaattgtccactgtcgggctaaatcaagagatggtcgaatgagtctacccaaaccgtaccacgaacctatgaaactacccaatggccaaactactcgttgatttgagatgggcatgaatattcatcaaaaaatcacctattttatgaggaatgatccaaggaatccatcccaggttcgagctggtttaggagatgactaagcaggcctcaaaatgggtaaaaataagcttgttcccatgacccaattaatccaaagaagaagaagccggggaac

SEQ ID NO: 9715 - DNA, 1093 bp, Arabidopsis thaliana landsberg
  unsure (1)..(1093): unsure at all n locations
tgttatgactccttggtgtttgttagaataaattttagagggtataatgagatcttaggatctaacaaacgatctttttgaaattcatttgtttttccagcttcttaattatcaacggatttttgcgcgtaaactctatttgattttactaaacaactatttcaaagcaaaatactctataacgatttgaatgtgccacaactttcatgttcaacccgtcaattcgttattacaatatttttagatttagcatgcataattttttttaggtagtagttatttacttttatatgtgaacatctctctttttttgtgcaccaacttttctaattcaaactagaaagatatatcagaattgagcatattagaacagacccgaatagcagatttgaaacataaagtccacgagctagcggaaataaaacatagagacacaagcttgaacaaggttgatagggtaccaagaagagtcgaaacaaactaacatgaacattgtcttgttagaaaacgcattcaacacacaataatcaattggtaagaagatagtcaccaaacagtgtgacgttaagacgagtattgaagaggtggttctaggttggaagcaaacatgaactttctcaaccgcatgcaatgataaaccggagaagtatccggtgatcaaacttcgccggaactggacggaatccgaaccaagaaaagtagttctagatcggaagtaaactgaccctgccacagatgcagtatttgttacactatggttcatttaaagtagagataatttggttaccttttagagattagaaaaaaaaagtttttgttcaaagtattttttttcttgaaacaaagagagaagtaaaaacagcaattaaaaaatattcttttctacagactacgattttgtatatggaaataattttatatcagacaacaagtgttttgactgaaggaaaaacataacagagaatataaaatttgtgaatacaacatgttcatgaaatatataccataanaaattgtgaatccaacatgtacagaaattaatgaaatatataccatannaaattatatgcatgtattaantctcaatacacat

SEQ ID NO: 9716 - DNA, 1429 bp, Arabidopsis thaliana landsberg
  unsure (1)..(1429): unsure at all n locations
agcatatgatcaagactggatcaaactgcaagattggtgtcataacactcctagcgaagagaaacttctagtgatcatgtcttctctgcttcaagtacaataagagagtcttgcttttacgagatagtgaacgaagcaggaatcaatcttttcaagttcccagaactcgttgcggagaaaaaaccatcgccagagaggatcttcaggctgatggatctctatgcagcaatctctgaccttagaccagacatagaactgatattccactttgactcagtagctgctgttaaaactctggtcctctcatcgctgaagaaactcaaggactcaatctacacaagtctcatggaatttgagtcaacaatacaaaaggattcttctaaagcactaactgcaggaggagggattcacaagctgactagatcaaccatgagtttcatatcatctctttctgaatacagccgtgtgttatcagagattcttgcagagcatccacttaagaaaaacacacgtatgctagaatcttatttcacagctccaatcttagaagatgaacacaacaaccacgcagtctcggtccatctagcttggctcatcttggttttcctatgcaaactagatatcaaagcagagagttacaaggatgtttccctctcttacctcttcctagtgaacaacattcagtttgtggttgataccgttcgttcaacacacctcaggaacctcctcggagacgactggctcacaaagcacgaagcaaaactcagaagctacgctgcaaactacgagatcgcagcgtgggccaatgtatacatatctttaccagagaaaacaagtagcagactatcaccagaggaagccaaaacacatttcaagaggtttcacgcggtattcgaagaagcttatatgaaacaatcatcatgtgtgataacagatgcaaaacttaggaaagagctaaaagtttccatagcaaagaaaatagtaccggaatacagagagttttacggtaagtacttgccaacgctgagtaaggagagaaacatagagatgctggtgagctttaagcctgataacttggagaactatctctcggatttgttccatggaacaccaatacttagtggctcttcttcttcttcttcctctttgtcttcttcatcttgtatctcacttggatgtgtaagaaactaaagttcacagttagaacatttgcttagtatcttcatcacttacattaagtggattatgtgaaatattaaatatgtaagcccacttatatttgttgcacatcttttcattaagtntagtgattaactgaatcaaacagttatgaaacaactaagaaaagaaactcaagaaagtaaaatctaataaattggataaacctgcaaatctactacaaaaatcgaactttaactatctaagtaac

SEQ ID NO: 9717 - DNA, 1800 bp, Arabidopsis thaliana landsberg
  unsure (1)..(1800): unsure at all n locations
ccactactattcatcattagactgcatactaccaagaaaccagtcgaataacaacatgaatagtagtttttctctgtgtggcgttctaatcgtgacaacccatttacattacagacccggtgtcgcgtatacttggctcggctgcattaccgaaaactaaagaaagcagccatcacgacacaatgtgcatggagaggaaaagttgcgcggaaagaactcaaaaatcttaagatggtgagatgtggtttctttcttcgttttgttttgcttcttttgtctgatcatcttactacttggttaaaatcaactattttctgaagttgacttcttaagatattgttttgcatgaaaactaacacaatttctgttattcatttaacacaggctgctcgagaaacaggagctcttcaagaagccaaaaacaagctagagaagcaagttgaggaactgacatggagattacagttagaaaaacgaatgagggtgagttttctctttcctcgtcaaattgacctctgatttcctgtgnnnnnnnnnnnnnnnnnnnnnnnngctaaactaccctctcttcatttctcaacgctgcagactgacctggaagaggccaaaaagcaagaaaatgcaaaatatgagtcttctttagaggaaatacaaaataagttcaaagaaaccgaggcattactcattaaagagcgtgaagctgccaagacagtttccgaggtgctccctattattaaggaggttcctgtagttgaccaggaattaatggagaaactcacaaatgaaaatgaaaagttgaaggtgggtctcgattttggatctgtagcttgccatagttaatggttaatactgtttacagaatcttccaccgaatgaaaaactatgcttaaaaggtgcctctttattgtttatcttatgcaggggatggtgagttctcttgagataaagatagatgagacagcaaaagaacttcatgaaacagccaggattagtcaggatagactaaagcaagcgttggcggcagaatctaaagtagcgaagttgaagactgcgatgcagaggtactgtttgcatgactctatctattagcagtggcagtaatatattacttatcttgttcagacaataagctgatgtttcatttgcaggcttgaagagaagatttcagacatggaagctgagaaacaaattatgcttcagcaaacaatcttaaacactcctgtgaaatctgtagcagggcatcctccaactgcaactattaaggtagaattgtttctaagatactgaaacatatggtcttttgtgttaccttctacttgtgcttgatgttaaactttttggtcctgtttgcagaatctggaaaatggccaccgtacaaacttggaaaaccagttcaatgtagggtagctcttccaaaactactatcttgatctcttggatttctcatatccttttcttttgcattttctgttggtttgttcatctgagaagtatactttttcaggaagttgaggtcaatggaaatgctgggaaatctgctgcagaacgtcaacttgtactggccaatcactttatactatatatgcaaacagttttaacaagtaactctgttaatctgattttctctgccggtgcaggagaatgttgatactctcatcgactgtgttaaggaaaacattggtttcagtcatgggaaacctattgctgcatttacaatattcaagtatcttcttcactggcagtgctttgaatcagagaaggctagtgcgtttgatcgtcttattgcgatgattggatcgc

SEQ ID NO: 9718 - DNA, 1197 bp, Arabidopsis thaliana landsberg
taatgaaaaagatgattagatgatgttttgacggttgaaattggctataggttatatattttagatttgttcagattgataaatacagtctaaaaaccactttgaataaatattaggattgggccaagcccataacacaatattgggtcagattttagtacatattatgggcctatgttagcaagatatcaccgagtacgttagcacttagcagcaacttagattctaaagtctaaactaaacaaaatcgtaaataaactgagaaaaagcctccgtctcctcctctctctctattcatcagcctcaacctctctttcgtcgtcgactcagtttccgatttagggttacccaatcttcgccatgtatcgcacggcagcttcacgagccagggctcttaaggtacatccttattcctttttacaattttacccttttatcctgttcctggaagattctggaacgatttggtccgattcagtgaattaacagatctggattcaaattctttcgtttgtagttacttctataggttacaatgatctcttctctgattggttaaagtcaatccattggtttagattataactcatctgattttcgatttaagagaaatgatttcgattatgattcttcttattgtcctttgattgataccatagaaatgattggtttcttattatgtgatgtattgtgattgtgtgttatatagggagttcttactcgtagtttgagaccagcgcgttatgctagttctagtgctgttgcggagacgagttcgtcaacgccggcttacttgagctggttgagtggtgggtctcgtgctgcgcttacttcattggatatgcctctacaaggtgtttctcttcctccgccgcttgctgataaagtcgagccgagcaaacttcagatcactactcttccaaatggtcttaagatagcctcagagacgactccggtaaatagaagaacgaattttaatgtctgatttcactcctgaaaatgtgaactgaagaaagttaatgttgtgtgcagaatccggcagcttcgattggtttatatgttgattgccggtctatttatgaggcgccttatttccatggagctacacatttgcttgaaagaatggctttcaagagcacgttgaacagaactcattttcgtcttgtgagggaaattgaggctattggaggcaacaca

SEQ ID NO: 9719 - DNA, 2095 bp, Arabidopsis thaliana landsberg
tggatacttttctgtctttattttacaaatggattggaaactgaaaacgtacggtcttaatcgatcccagcttttgcttatttgtatttttatttctagttcaataattgccctatatgtactacgcaaatttgtattgattctgtcttttgaattctattttttggggtactttgtcatccatatttgaaatattagtagacttttcatgatcagtgaatctatttccccctactttgaaaaatcgaaactttgatttcagaaaaaaaaagctgtgatacgcagtggcggagctacagcttcaggaggggggtcacttgaccccatgacttttacaaaaaaaaatttaatagcttaattatttggtatttagtatataatctgggttcaaatattaaattgacccccttactcgaaattcaaatcctatttttgccccactcaattaccatattttgtgtaaatcaatctcattattcttcttctattaatttcctgaaccctatattaatttttggtaactggttttattattcccctaaaaatacatgaatttagatagacaaaacaattaaataatgtgggtactaatctttacatttagataaacaaatgaattttttgagtaacaaaaaagatgtatatcatttttcaccagatttttagtaaacttttaaatagaaaaatgatgaataacatatgactactcgtgtattttccacaaagattttttttcggaaaaacaacaataatttacgaaattgtgatattattttttgttctattttttatctataaaaaatatttttttaaaaaaaatccttgttttaattttctcagaaacgtgggaccacaatattttccaaagggttcagagtttatcgggccgaatatatgtcataggcccataggctaaaacaataagggtagttatgtaaaatccgctcacacacactcctcaaaagccctaatcgtttatcataattcctcaatcccgtcttcaagtatcgccgacgccgcagcacaaaggaggagaagaaggatcaaaggcgcgacaacaatggcgacaggtaaaacagtgaaggatgtctctccacacgagttcgtcaaggcttacgctgcccatctcaagcgttccggcaaggtaacgaatcgtgattcttagcttttggtccgcatcgtttgtccctaatctagtattttgattgatgtttgggattacgattacctcatgaaactgcaatgatcactgcttgattgaaacttgaatttggccttactctagagcattttgaatcgtaactacaaatctcaataaagtctaaacagtgatttgctagtgtcatttcagtgaagataggtttctgcttttgattccaatgttgttccttccatgtagattgagctgcctctgtggacagacatcgtcaagactggtaaacttaaggagcttgctccatatgaccctgactggtactacatcagagctggtatgtatatataacatctggtcaaatcttctacatattggatttagcattgtctttatctgttctatttagcttccatggctaggaaggtttacctgaggggtggtcttggagttggtgccttccgtaggatctatggaggaagcaagaggaacggaagccgtcctcctcatttctgcaagagcagtggtggtgttgctcgtcacattcttcagcaactccagaccatgaacattgttgaccttgacaccaaggggtaagtatattgtctctagtttagatttctcattggcctaaattaagttaatacactggtacaaagaaattgtaggaaaataaaaattgtataacacaagttagacacttggattcgattttcgcttaagaaatctgctgaaactgtaattgtgacctattaaaactcactagatgaagtgtgtataaatggttttagaatgtactactgcgtcatttactaatatacctatggaagcaattgttcatcttcgctagctaatgattacatgttctgatgtaaccagtggaaggaagatcacatcaagtggtcagagagatctcgaccaagtcgctgaaggatcgcaact

SEQ ID NO: 9720 - DNA, 1059 bp, Arabidopsis thaliana landsberg
ggataaaagttcctaccttaaatgaagataacttaattgaaaacataggagcactcaaactcacgttccataagcagaaacactaataggacatacctggatgatgccagaacttttcgttggtcacttctcgtagaagacgctccacagacgtatcttggtattgggtactatttgttgcttgcttcttgaacgaagtaaatttcttgttaccaaacttggagtcggcagaggtttgactgcacaagggaacttgtctatttgacgaatgaccactcttcagctgccgtgaatttattggctgcttccatgaaccctgccttgacacagatgtcgatgtcgcctcagcagaaggtcctgcctccccattcatcctcctagttttaccagcggagccggattgtgattcaccattagattctaacttaggttcagatgtttctggatgtataccaccattaggaatgtcaattggtttctgatcccggtatacaacatgccctggaaccccgcctgcttgctcagcagttggagggcctgcacgagattctctaactgtgcgtgtgacgacaggttgtgggaaattctgtcttctaggtgttgttgtcttaataggaccagcttgcctgacatcgtccaggttgagaaacatggtctgcctgtggcgtttctttcccaacattgtctctttctgatgatccatctttcttttgacagtagtatttgcgcatttgattgcatgacttgcttcaactcctttagtttctctcggcctcaccgttaaaccctgttcttgaggactatctatagatccactatctttaccactactttctgaaatatgattgacgtttttcttctgaagagccgagtctgagttgatatctaatcctagagtgccattatctttctctgtaactgtagaataatcagaactactatgtacattatcattggcaggaacctccgactccgtccattccccttcttctctctcaggtgcccaacatcatttggaactttcaatgatgtaacgtttgcttcctcaagagaacctcg

SEQ ID NO: 9721 - DNA, 1282 bp, Arabidopsis thaliana landsberg
ttaagttcaatccgtagtcatctctgaccagtactaaaacacgacatatttataacatttcttcgtgattatgacaactgatttagccacaattgtttaaggttaattggcaacagatttataactttcaactgcaatggtgatttagccactgaaagtagtggaaaattagctatgataaatacatggccaaaccactagaaccgacaacatatatatataaccaaataccgttaaaatatcttaaaaagtgatatgatccgaaaacgtaattatatgaaatcacaatacaacattaatctcgagtctcttgagtcttgacaattatagtttcttctccatcacttgtcaaaaagtactttggcttatgggccttttcctttgcgcgatttagagggcggcagatatataggggcggtgggagggcgagggtaatcataatccacacgctgttcttgtccttgacctgcttattaacaatatatatgtcattcaccataagcttttaactatctacatatgatttcttcttcacataaaacataacttttaacttttctttaacatatgattatataatgaaacatgatctaaaaacaatacatctacaaatccagacaaagatttttcatgaggaaaaaacagattaatcttcacagttttacataagaagaaaatgatgaagatataaagatgagagactgatagaaagtcattggatatgtaagcttcttctttcagaaaaaccaatatataggaaagaaaaagatcgaatatgtactaacgtttgttgcgtgtggcgtcggcgactccaacttgaaaggatatcaataagaacagaagaagcaaagagagaagaaaaacaactaaatttgatgcttttgtagccattgcttaaaataagttgtcgatcaaagtctcccacaaattcaatatataacgaagaccagctcctctgttatttaagaaaatgaagcctcgttgaaagttgtagtactcacgggtcccttgtacccactcacctactatatccactcaacgcacttactttcacttttacttacgtccgcaaaagaattatgcccatttttttcaatttttctatagactatataagaagacttcattgtatcgaatacaatctatgttacaaattaggcattagattattgagaaaattgttaagtatatgtatgtgtgcctgttattgaaaaacaaggtatatttcatccattggtaacatgactctacagcgtaaaaataagaccaaaactcttatcaa

SEQ ID NO: 9722 - DNA, 1022 bp, Arabidopsis thaliana landsberg
agtttccatattccacagagagacttcatatgcttcttatagttgaaaacttatccatgatccaagattggaatgtgcaactaagacatcctatagcacgactctacgacatagaaaatcgtaggcattagagaattggtcatcattacctgaagaaaaagtcccccaatagtaagcttctttatgttttgcaacttaaccaccgtctgtcgcaccatgtattgaaacgattcagtctccatttcacatgtgaaatagtcaagtacatgttttgaaagaccgagattagcttcggttaaagatgagacatccactaaagtagatggtcgctgatagttttccaatctcaaataacgaatgtgtggcgctacaatcctctctggtgtccaacggtctccaagtatctccagtcttctcaaacttagtgacttgctcagatcaagatcattgagtctatcacagagattcaatgtcaagctttcgagcaatgaacaaccagagagaattttggcaattgaatcatcagacaccttgcaacgattcaacgacaagttccttaacgatgaccaagagacaacgcacttgggattcagaatgcaataaaccaaagtcaaactaagctgcttcagagaggaattgatgaagaatgtatctcggaatctataatgagatgtgaatctgagagatacattctcagccttgcgtgacagagcgagattaatccaggtatcaatctcaggtacggtgacatctctgcttatagtaacatcgaaactcttgattttgggagtcgagtagctacttagggttttgtttagcgaatcaggatctactctattgcaaacaattgagatagaaggtgtctcgtaccatacatgcttccatcgtttggataagacggaggttctgatcgcgagcttggtaggtgtattggcgaggatatggtggaggatttcgtcgggtagagactgatgagtcgaacagctgcggtcgttcatatcgcgggagagacagagtgtatg

SEQ ID NO: 9723 - DNA, 500 bp, Arabidopsis thaliana landsberg
atcctgaaactgctcatcgagcacaaaagacttattcattcagacgtaaactgacaagtggtctagctttatagagaactcaagagaggagattctctagctaagtaaatagattaacttacggcatgcgatcttgcgattgtcattggctaaaaccttcacaagctctccctgaaatcagaaagtagcaacatgaaaaaactgaaaagcaatcggtagaaaacaacagtgtatgcacatctaacacaactgtactttccatatcaagattccagtataccacaaaatcataatcctagctttccacagagaagaacaagtctaacacatgatctcattcatataaaaagatattaaacctttcggttccggtcatccaaaggctgaacttcaatagcaagacataaaccaacatcatcagcagtgacaagagaatttggcttctttgctcctgcattagaacttagttaacaaccacattctctatttccatattaaga

SEQ ID NO: 9724 - DNA, 1434 bp, Arabidopsis thaliana landsberg
atgccacatcgataataagataggacatagcagaaatatgggcccatgaaacttgataaaaacaaagataaaattgtaatggtttcttacctcaagaatgtaacgagcaacccataattgatcacctgcaccaataccaacagtaggactgatttgaaactcccattgtccaggcatgacttcaccattggcaccaccaatactcaaaccggagtatagacaagctttatagtgagcatcgacaatgtcacgaccaaaagctttgtctgcacctactgcacaatagtacggtccctgtttcatcaaaacacacaaaaagcaatatttccgagataagaaacttgttcttggtaataagagttagtgtatgaattttatcataagtgtacctgaggaccaggaaagccaccaagaggccaacctagtggccacttcacatcttttttaagtaatgtgtattcttgctctatcccaaacctattatataacacatcaaagtatcaaaatgagtcctagactgaatcaactaaactgaaatatattccaaaacagtgcttatgttaaacaacttttaatatatgttacaatatattttgaattggtcaaactagggtatttttgttctacaccataacaaactgaaaaaattcgattatagttcatttgaatttttctataggctatgtatttagcttaccaaggctcttcagccttcacattgggatgatcgaagatttttacggccttgtgcctattgttggtcggaattggatctccggccggtctgtaagcatcacacatcacctgatatattcaagaacattgattttaaagacccactaatcaataaaacagatgaatcttttgctcaaaattttatgtgggctaaccagaatgttgttccccttcctgaatgggtccttaaatattgcctgaggactttttttttccaattcattccaaaaaaatgaaattattttaaagatacttttgatatcactttacttataaatgttatgaataggggatgaaaaagattactaaagaatgacttcactatcatctccggcagcttgatcggtgctagatccatcgtagttccattttggaagctttgttggatcacttactggtcctggtaatgtctattaacaaacagaatttaaatttttgtttggttattatagaaactagagagacataatgtgatggtattattaccctggctttgcttctaatatccattccagagccaccgatcctgttctcatgaaaaaacagaacaaaacaatgttgtttaaagagacatgcaagatcacaagtgtgtaacatcaagaatctatatgacatgcatcgagttatagacagacttttctatagatttaagtgacaaaaagatgattaagggatcgaaccatatgtattcagcgatga

SEQ ID NO: 9725 - DNA, 1083 bp, Arabidopsis thaliana landsberg
atcacccatgcctccttctccaataacttcgtggagtcggcactatctaagtaggtctaatagagatgtgagattcccattctatcgtcgaattcctcaaggtgctgttgaaccgacctatgtgtggaacaggttaacagttgatggggatggaccatcctttcagcctgaaggccgagatttcgtttctggatctgttctattcccggaggattttatgtccagtgcttcccaacaggattgcgagcagctacttcattggcatgatctggttagttttgacttttatcatctacttaagtttctatatgtatttaggttttgaatcaacgttcggcgtatttgctatatagatttagagcttctaggccgtgtttactcacccaaaacttaagggttttattaaaaacacaataatcatagaattctgtatacgtgatgagatttggaatcagttcgctaagtatttagggtttaggtatttagagcttcttaggccgtgttttggctgtctatacctaatttcagttaaaagccctaattcggactatttgatatatgtatttaggttttgaatcaacatgcagcgtataaaaacatcatcaagagctactgattcagttgcaagacatggagagaggcatgaggcggttgttagctcactcgaaggattgggttaggtttgaattcgacaaatttgggtgcatgtctgactcacttagggcatattgtgagaaccatgatggtgtagctgcaccttggaatccgagtcacccaaaaccatcggcactgatgctgaagttgttccagacgaagagaagtagatataaagatggtgatataatatcattagttttcatatatgtggtgtctttattgatttcatttgatatgtttttggtggaacttgtttgcggatcatatttctacttctgtttagtttaataattttgtttgcggaactcgttttatatgatttcgttgaatagtttgtgttggtttccctgaaagttctttctcttggttataatttacgaaatattgaatgacttataacagtttgccatgattgataacagaagc

SEQ ID NO: 9726 - DNA, 1170 bp, Arabidopsis thaliana landsberg
ccagcttataaaccgagacccttcgtcggaacttttagagccaccattcccacacgttatgttcacattgtagatgtaaggaggccctccgtatccgtgacatgccattaagggtttctcaaagcctgcacaaaacaattgagtagatgatcataattaaccatggaaacaaaacatagatttggtttttcaggttcctaagtatggttaaggtttgattcagatcagatagaccggattaaaatacctaatcatgtttgatgcatgacacaaaaatgcttaacgaagttacacatacatgaaggatttatgatgacataagatcttaaccgataaacagacactaatggtgtttacttatatgcatcaaagcttaccataattgttggagtttgcgatgagatcgtacttgatggcataaatgtcgacatagacaatgttggcctctttcagttccgtcctcagatcccgacacatatgatccagtccttcgttaaacagttttgcagctgcgttataagttgctagacaaccatgcttatcaaaacctttgctatgaaccattgaaagtttctgaggcagacaacctaatggtcctgtgttgtgaacccaaaatttcctccctccttcatcatacaatatctgcaaaacaaatttaacaaaagatttcaactctctcccaatatcaagacttattgtttagcacactctagcatgttttattcagaataaacccacaaactctagttcttacctttatggcacttttgatctcggaaataacgtttggaataagcttgacgacccgggagtaagaaaggcctttggagaatgaatccgcaatatcattctgtccgatatcgatcatgtacaatgcgtttctgaatccactttcgcctatcatcatctctttcaaaggatctgcaaaacataatgcaagggtcctttagtgaattacctatttttttgctaaagagttaattacgatcagatagatacctgaagtagaagcaagctcgagtgctcgggatttgaaatggaggaactgcatgagctgaatgttgagagcaaaaggaacatatctgggaagagtggaagatccaacaattgcgaaattggcaccgttttggaactttgatccaaccaatgagtctaagtatgggttcaata

SEQ ID NO: 9727 - DNA, 858 bp, Arabidopsis thaliana landsberg
gtgtaaaagaaagcttcatttgaagttcgcatttggcactgatacttacacatagttcttatatcagatggattacatactccacatttcacatttgacttcgactaaagatctgaatcagatttaaaggaaaaaagagtggtattgaataggcacaagagttccgactagtgaaatctcataaaatcaaatctaacaatgttcccatatggaggtgatataaaacacctgaggtttaaattacatacgggagatcagaagagggacagaagcaggagcttcctcttccatctcatgttcgagctctccatagcgctcaagcacacgcatcctgcagtcttcagctgccagcactccggttgaataagcaccgtgaactgatcccgggtagctcgagctagtggcttcccccgcaaagaatagattatccaatggcactctcagtctctcatagaggtcgtgaggtttgttcacaatgtcatagctatatgatcccattgaattgatgtctgatccccaccttgataccaaataatttatctgccaacagaaaaccccattagagcttgtacattggcaaaacaatatagcaactcaggtgaaagaaaaggtagtttggagcagtaccggtgaagaggcatctggaagaattttctgtagttgcgaaaaggcaaaatttgcagctgcttcatcggactttttctcgatgtctctagcgagctgaccagccggcatgtaaacaaggacaggatggcttgtggctttatgcaggttcaagaaataactgcatccgtaggaagtttctgcaacgacttctaaaaactctacgtttggtcaaaagacgtttgcaaaattcaa

SEQ ID NO: 9728 - DNA, 1622 bp, Arabidopsis thaliana landsberg
gggcatcttttgactcaattgtatcttatggcattttgaatttaaggttggcaagagtttgcaccgggggatggggtacacttaggagcagcggcatcagaaatccctcagccccttttggatcagctaaaacccggtggacgaatggtgattccactaggaacctattttcaagagctcaaggtaatcgacaaaaacgaggatggttcaatcaaggtacataccgaaacttcagtccggtatgtgcccctcactagccgtgtcgaacagttaggaggattttgacaacaacaacaaagagaaaactctacatcccacgtcttagtgtacatataaaaggttgtgtaatgttttgtaatatgttttgatgggtaataaagaaaatatgtttacaaaagcttgaactcaagtttggtttcacatactcgctacattggaattgtaagtgagaacatttctaatcataactcacaatattaacactcactgagctatcaaaatcaacgccttgttcgttcctcagccacgttcactttaattgctctgccttccaaattctgcaaacacagagagcaatgaataaaagaaatggtaaagtcacaagaagataaccataaacgcatggaggagtgaggagtgatttcttttacctgtccatcaagagcagcaatggcaacgttaacttcattctcattcgacatttgaacaaacccaaacccacgtgaacgacctgtctctctatcagaaaccactcgggcatcaactactttcccatgctcgctaaataatcgttccaaacgaccactatccacatcccatggcaggttcccaacatagatcctaaacgcagcatcatatacacgaggttgtcgttcaggtcttgatcctcttggagctgctctgtttactgtcaaacgcctcccattcacttcctacagttgtataccaatcaacttcaacatctataatcactatccaaatgacccagaagattgagaaacaagaaaatgattgcttacaaaactattgaacttctcaacagctttctctgcttcttcaactgtactcattgttacaaacccaaatccacgactttgatcagtgtccctattgtatataacctgcaaaaaccagatttcaaagcagacccatgaaacataatcattcctttaagccaaataaactataaaaccagatttcaaagcagacccatgaaacaaaatcattccttcaagacaaatcaaactatgaattcgaaacactaaactaactttctcaagaagtaacaatgccacagaaaaatttagttccaattttctcaaccatttggattcaaatgtcaaaaagcacaaattagcaatatatacctctgaaatctcaacagtaccagcttgttcaaagagcatagctaaagcttgactatcaacatcgtacggcaagtttccgacgaataatttagcctcttccggtggctccgggaatccaacaccgtcttcagactcgaaactctcatctacagtgactgaagtacctccgatgcttccatcctcaccttcttcttcctcaacccaattcgaagtttgggaaacgaaagtaacaacaggagatgagttcaaaaagtt

SEQ ID NO: 9729 - DNA, 1402 bp, Arabidopsis thaliana landsberg
catccttgtggtttgttatttgtgtatcaatacacatagggttttttttctttatagttattactcatctagtttccacgaaatacaaaaatatttatttttaaaaattgtaggtgaaataatgacggaacagttgctgcttcatggaactcttgaagtgaagatttataggatcgataagttgcatcaacgttcaagattcaatttatgcggcaaggtaatatataatttcaacactatctactaataagagatgttagacgaaggttacttgtaaaataagactcaaaaatgattcataggggaacaaggagccaacaggtaaaaagactcaatctcaaatcaaaagactaacggactcatgcacaagtttgtttggaggacatctatacgtaactattgacctagacaggtcaagagtggctcgaaccatgatgagacgtcatcctaaatggttacaatccttccacgtctacaccgcacattcaatctctaaaatcgtattcacagttaaagaagatgaaccggtcggtgctagtttgatagggcgagcttatttacctgtaaccgaagtcatcaccggacaacctatagaccgatggcttgatatcttagacgagaataggagaccaatccaaggtggttccaaactccatgtacgtgtgaagttcactcatgtgacacaggacgtgaattggaacaaaggaataatattaccttccttcaatggagttcctaacgcttatttcaaccaaagagaaggttgcaaagttacactataccaagacgctcacgttcttaacgaataccctgatgttaccctcacgggaggacaagtgatatacaagcatcatcggtgttgggaagagattttcgatgcaatatgggaagcaaaacatttgatatacatcgctggttggtccgtaaacaccgacgtaacattggttagagatcctaaacggacgagaccgggaggagacctaaagttaggggaattgctgaagaagaaagcagaagaaaacgtaaccgtgctgatgcttgtgtgggacgatagaacgtctcacgaagtgtttaagagagacggtttgatgatgactcatgatcaagaaacttacgattacttcaagaacacgaaagtgcgttgcgttctctgtccgcggaatccggataatggtgatagcattgtgcaagggttcgaggtcgctactatgtttactcatcatcaaaaaacgattgtggtggacagtaagtggacgggtcattaaccaagagaaggatagtgagttttcttggaggtattgatctttgtgatgggagatacgacactgtagagcatcctttgtttggtactctgaatagtgttcatgctaatgactttcaccagcccgaacttgatggtgca

SEQ ID NO: 9730 - DNA, 1065 bp, Arabidopsis thaliana landsberg
agaaaggattcaggtctcaccggcggaggcggaggaagtcggtcctttggagccagaggtacgccggagcttatgaagacgtacctgcatctccgtgaacagttgcatcctatggcattccaattccttagcgaatctcattctctgcttctccaattcaaccatttccttcctcttcttctcctcgactctctcgtatatctgtccaagcctctcaattgcgtcggcaacttccttgtagccttgcttcttctcaattttcctctcccgcttcttgttactcccgctacgaccgctcgatctagaccttgaaccttccgagtcatcttcagacgccggacacgccgccgccgctgcggctgccgcgaatgcgttgagattcccgcgaaatccgagtaaatcgtcaccggcgtgaggtataatcgccggcgatgtcgccggacgtctggggatcgccgatcgtggagcgaccggaactggattaatggacatcggaagtgatagcctctggtgcgggatgttatcagttgaatcaggattactagacgtcggaaagctttcccggagaaggtcatcgagagcggagaagaaaggccaagggctgatgtaggcaccgggattggattccgaaaccctagccttctcgactttgtacttcttcttcagagtatcgatccggtttttacactgaacgtcggtgcgatacggctgcgatttggcggcggaaacgtttcgaccggtgttgtagtgacggtcgttaacggcgttagccacctcttgccagtgtttctgacggagattacctcggctgaggtcgacgtagcgattaccccaggcttggatgagcgtgaaggtcgcttcctcgctccagcaatcttcacgagaaagcgtcgccggcgaaggtcgggaagatcccggcgaaaaggaatcgttgacggtgtccattataaggtgaacgacggcgagttagatcgaagaagatgaacggtgaggatgagataaacggaggtgaacggtgacagtgacggtaacggaattgaagagaaacgaagttcttttttttaa

SEQ ID NO: 9731 - DNA, 1802 bp, Arabidopsis thaliana landsberg
cggaaggtaacaggctttatgctgaacccaacatgccctttatgttttcttgtcatggtattggtatagaacttgtctatagaagtatcttatagtgggctattatggataaacaaagttgattacttgttattagcataaattgtgtcttattagattgcaacaaatatacctcttttcctcatcacgcagcctgcctctgttgctgtttcctgtagtagtcttgtagtcagggaatggcacgtgaccattctcgatgctttcgatgtcacgaactagaaggtcatactgtctcttagcttcttctggtgttttaccaccaacagctctagcaacattgtgccaacggtccggagtgtcttggtcatagactgctagagcacgctcaaaggctttgttctgcttaacagtccatgagccagagccataagaagacattgagcctgatgccattgtttagtaactaaagttgatgatgtttggttttgtgtagtaataaacctagaaaagaaagagattctgaggaaatgatatgttgcacagatgtcgcagagtccttgctctttataaagaggttttggtgtggggtagggccagttgttaaaagatatctttgccaaaacaaagagaattttaagtctttgtctctatagctagaaaagaatatgagcaaatttttttgtggagatcagtatcaaagatccaaactaatcaaccaaagattgcgtttttccatccatatttggcatatgatgctccctagacacacttttctataaatgttataactaatatgtttacttttctttcccaattagtggttatgacgtcattctctagattaagcttcttgtcaaaaagaaacagtttaggtaataaatagttaggaaaatctctctacctatggtacttaattcatggaacagtctggtctctaatcagagcacaaagctcacgtgctcgcggaaaattacaagtctttggttgaaagttagggacaagtctctattgacagatgattttcattgactaatcagatttccttcttatcaaaaatctcagtgattttgaaacattgtgaggattaatttgtatccacaaacacaaagttggagcttttcgtgtgttcaccataagtcatatattctcttgtataagaagaattcttaaagaaaagtgggggcagagctttaccttgagattctctgccatgaaaaccatatcaatttatctagctgtattgatgatctttccgtacaatcatcgacatttttctgtgttttcttgttgttgaaaaaaataaacgtcaacattgtttacctacctttttttttccttggcttgttgggtccatctccttgaagttaggcaactgtgtttttcttggtcatatattgtctaatgtagattcttggttgttaatttgttaaataatcacttttcttggtggatattcaaattgtttcttctgttctttagtgtctgcattattgaatatgggcgggaaccaaaagttgtcgtattacaaaatacaaacattaatgtttcacatgaacactttaattaccttgtttggtaagaatccagggttgggatgggcaaatagattattgtcatataactaaattaggttgctaaataatgcacaataggactaataatatacatacttggcaaaaagacaacatgcataaatggtccacttgttgtttggttttatctcagaaagtgagcattttgtttcattctttaaaagatttgaagattttcttttcatgcaacaaaagttgttcattaatgat

SEQ ID NO: 9732 - DNA, 1144 bp, Arabidopsis thaliana landsberg
  unsure (1)..(1144): unsure at all n locations
atagcaaaatacatgtatttttttctgtgtcataacttgatcctcattttgttacatttttgtcaaattctcaactaaatgcttcaagaaccagcaacgaacttgttgttattgatggtgaagctactgcaattttaccaaaccttgacatgttgcagaaaagtccttccgaataacataattttgtaagttttttttctaacacttcaatcgagatgttattcatttttccatttcaaaatttcaataatatttaaattttaaaccccaacggaaatcctaaaaaacaaataattatttttcaaaaaaaatctaaactacttactgtaaatcctctaacagaattttcattagtcttttaaattcaaaacataaaacttttttctcaaacgagagaagaaagaaaacgagagagcaaaaatggaaaaaagaggtttcacttttacatcaatcctcgttcactctctgtggatcactcttactggaatcctcttgtttagtctctccaccaccaaaaaccacaactttggttacgtcaaattcttttctgtaaccggaaccttacttataaccttgccttggataatccaacttttggtcacctctgtggtaatatttcttcataagaccaaaggttacaacttcatgtggattgttcagtcaccaaaatccaaagagaatcatcatcacacgaatgtcgcaacaactactaccactgcttcttcttgttcatctcctctttcgtctctccaggttctgaagaaaggtgatgtagatgagtacgagattaggattgtgattggtgctgatggtcctaaaagtccaaaggatggatcttctgcaaagcctttggagatgctcaaggagattgaacaaggaagaaataacaccaaacttctcacnnnnnnnnnnnnnnnnnnnnnnnnnnnnnnnnnnctgttctatgttctgttttttttgtgtttgtgtttttttcatttctgctggtatgaatctcgtagtgcttacaaatttttctttgtacgtttcattagcttaaaatgaagttgattgcagtcacacataaccctttatattgtttcaatcacagattcacattatattgtttcaatacagacgttactcaaccaatatacacagatga

SEQ ID NO: 9733 - DNA, 512 bp, Arabidopsis thaliana landsberg
cccaagaatctgttcattcaatcaacatagaaaatcatcagtagctatatattaacctagaacattataaaaaaagggaaaaaaaatcagaaaacattgaacctgagtagtgatgacaagaatccaactagccaagaaactaatcttccttttataaaaagccatgatgatatcaacaataccaacagcgtaagcagtaccagatccaaatccagcaccagcattagcaaacatagagatcaacacatgttccttgacgttaaagggacccggattaaaagaaaactcccacgaaccaatcttatacttggtctcaggcaaaaccctagccataagcttccctaaaggcaacgtaaccacttgaacagagatcatagtgatcatcagaggctgggttctgtatccgaagaaagtgttgagaaacgagaggagaatacaagagagaagccctaaaaaccccatccgaaacgtccacactggtagagaaggatcgtcttggttgatacagtaag

SEQ ID NO: 9734 - DNA, 1011 bp, Arabidopsis thaliana landsberg
aacgcagcagctaccgatttaatcattacttctttaccccctctagataagaattttgccgaacgattaattctgtcttgttagcgctctctcacaaaagaagatatcttagttttggagcctcctaggcttttcagtaatcctaaataagagcccatgccccctaaattagtgatctctagagttctcataagttcgtctttcagtgaatcttctttcttgtgtccgaattgaaccgatgtttttgtaaaatttattcgttggccaaaacctcttcatacctttttaatattcctaaaacgacagcgcactgctcttttttgtcattctgtaaaagaaaaagctatcatccgagaataattagtgagagatctagagacttgcttgtgttactttcattcctgtaaaagttttttttatttttgctttccgaatattggcaacaaaaacttctgtacattataaataaataaggtgataacgatctctttgccttaagcctctttcagagactatcaaactttcgaggctgtccattagttagaatcttatatcgaaccgatgtgacactttacattatccaaaaaaaactatttatcgcaaaaaccaattttctttagtaaatgttcaataaaaagccactctattcgaccataagctttactcatgtctaaaactatgccattgtgggttacagtaaaaaatgttccccattccatgttctcctggaatggtttaagctttcttaccagtccagtgggaaatccaattagacttcatcctgaaacagagttatgcactaagtttgatgaagcaaaagtatttgttgaagttaatctttcgcaagaggttccaaagtgtttcaggttcagtatagaggatgaagaagatgttaatgtggagttcgactatccttggttgcctgctaaatgctcttgttgtaataaatggggtcatctcgtggatgtttgagtgagtaagccgaagtctgcattgaaggagagagtcatg

SEQ ID NO: 9735 - DNA, 1836 bp, Arabidopsis thaliana landsberg
agaaagatgacccttttgaaaagttcgtggaatggaaaaagatggtagagaattattctgacattaaagtcaagaaactaagaacagatgatggtcttgagtactgcaatcactattttgagaagttttgcaaagatgaaggaattgtaaggcacaagacttgtgcttacacaccgcaacagaatgggattgtagagagacttaatagaaccatcatggataaagtaaggagtatgctgagtgaaagtggaatggataagaaattctgggcagaagcagcatccactgcagtatatctcatcaacagatcaccttctacagcactgtgatttgacttgccagaagaaaaatggactggtgctttaccagacctaaaaggtttaagaaagtttgggtgtttggtttacattcatgctgatcagggtaagctgaatccaagagcgaagaaagatgtgtttacaagctatcttgaaggagttaaaggatacaaagtttgggttttagaagaaaagaaatgtgttattagcaggaatgtgattttcagagaagagatcatgtacaaagacctgaagcatgattcacacacaagtatgattgaaaatgacttagaaaacatcagacttaaccctcctgttgttacttgtgatcatgaaattacagatcaaggtggagctactgtgacagatacatatcaagatgattctgcacaagacgctaactcacatgttataacacaaactcaagtctcaaatgaaaatcagtctaaatcagaagaagaagacttgagtgactatcagctagtcagagatagagctgtgaagataaacccgaggtataatgaatcaaacttggttggtttctcgtttttcacagaagatggagaacaggcagaaccaaattcatattaggcagcactaagagatcctgaatgggataaatggaatgaagccatgaaagaagagatgatgttaatgggaaagaatcatacattggatcttgtagaaaaaccagaaggtgtcaagaccataggctgcagatggatctttaccagaaagacatgaatacaaggagtggaagctccaacatataaagcacgactggtagcaaagggattcacacagaaagagggaattgattacacagaaatcttctcaccagttgtgaaacatgtctccataaggtacattgtgtcaatggtagcacattttgatatggaattgcatcagatggatgtaaaaactgcattcctacacggattcttagatgaagacatctacatggctcagcctgaaggttttgaggataagaaaaatcctgagaaggtatgttacctgaaacgctctttgtatggtcttaagcagtcacctaggcagtggaacctcagatttgatgaattcatgaaaggaataggttttgtcaggagtgcttttgacagttgtgtttactataagaagctaggcaagacatacacctacttactcttgtatgtagatgacatgttaattgcttcagtagacaagtctattgttcaggaattgaagctactactgagtaaagaatttgaaatgaaagacttgggagatgctaagaagattctaggtatggaaataactagagatcgagaagctggaattttgtctttgtcacaggaagcttatgtgaagaaggtcctgcgttcaacacacatggatcaatctaagcctgtgtcaactccaattggagttcattttaagctgagagcagcaacagaagaagagtacaagaaccaatttgaaagaatgaggttttgaccatatgctaacacagttggaagcataatgtattctatgataggca

SEQ ID NO: 9736 - DNA, 1312 bp, Arabidopsis thaliana landsberg
tcccttactattttgtgcaaagatagtaaaaatagctttgtagcaacaacacaattaaagattttatactcttaacaaaatcgtcgaaaatctaaatcttaaatcctgtaaccttacttaagccttataaactaaatcctaaatccttagccctaaccattgatctaaaacataaaaatgcagaaattaaatgtcacctgcaatgccttttctgcttctctttctatccatagaatcgcatgatccgatgttgcattcgatgataatactatatgctcaaatctaccatcaacgggaatcgcggttctcacttcgggaggaaaccttccacatctaaatacaaaaaataatcagaggaaaaacaaacaaaaattgctaagaaatgccacactaacttcattattacctgcaaaatttccgctcaacgatatgataaattcgaccaggagcataaagccttctaggatctcttagtttccgaccttccggtataaatgtatccctcagacaaactagaaacaacaagcacggcaagctgtccgaacaacgaatacaaaatgttgaactatacctataacaaattcattccaacaagagcattttcgaagttcgacacttaccagaatacagacttgaatatatcctctaatggtgtcgctgttctcggtaaaaaatcatcctattattccacaaacactaagttttgttaaaattcttagtaaaataccttactctataaaaattctctctatagacagatacctttcttaacaactaaacaacttccaaaactagtacaaaatttagcagaatattctgaccaaactcaagaagcaaaatgaaaaattcaattcgtcgattcattgtataaagcaaaagcatattctgaacttacgaaacaggattatgacaatgcttggtcaacaatgaaccaaccaccaccatccaacaagacagttacaaatataatccaaattttatatcaaaactataaatatattcaactctttacataaccaaaaaaattagttgtcagaaatcaatctctaaccccaaaaacaactaaaccataacacccttaacttaaatacaagtgatttaacatttctaatatattattctttgttaaaaaatcaatttttgtaaaaatcttttaactaacattgagatcattaaaacatggttaaatttttttacctgcaaaatgacggaggagatgacgtcagcatacttaacggcgagattaagcgacatacatctcgccggagccaaagcaaaacatcgaaccttattcctcggaatatcaccaatc

SEQ ID NO: 9737 - DNA, 474 bp, Arabidopsis thaliana landsberg
  unsure (1)..(474): unsure at all n locations
caggtaagagaacccggtacaaaccggttatgtacataaccaatactaatctatactaaaccatgcattcctctaatattccccctcaagatggagtgtatatgttaattacacccatcttgcgaatgagacttaagaactgaataggaaaaagaggagttagagcatcagccaattgatgttcagtcgccacatggagagtcttgacatcgccctttagaactctttccctgacaagatgacaagcaaggtctnnnnnnnnnnnnnnnnnnnnnnnnnnnnnnnnnnnnnnnnnnnnnnnnnnnnnnnnnnnnnnnnnnnnnnnnnnnnnnnnnnnnnnnnnnnnnnnnnnnnnnnnnnnnnnnnnnnnnnnnnnnnnnnnnnnnnnnnnnnnnnnnnnnnnnnnnnnnnnnnnnnnnnnnnnnnnnnnnnnnnnnnnnnnnnnnnnnnncaattcccgcagtttaaaacgag

SEQ ID NO: 9738 - DNA, 1162 bp, Arabidopsis thaliana landsberg
cagtcggattcttggactttgtcgccggaagtatgatcccgttttgtttggagagggcttgggaaggaatgggagtggagatgattacagagaaaaagtttccagaatataacaaatgggtgaagaagctgaaggaggttgagatcgttgttgattgtattcctctaagagagaaacatattgaacacatgaacaatatggcagagaaaattagatctgcttaattcagaagataatgcatctttcatagctttggttccatattttatttaatttactactgtaatgaaagataaatcaaggacaaaccttcgtgattcagaaaataattagaaaacaaatcctttgaaaaagggtaaaaaaatacgtagacaatatccagcagaaccaaattaacataatcctagatttggtccaacaaaccctagctaatccgggtatagaaggcgagttgcacctgattcgattataaaatcagcgttctttggatcggtcctaaacttcatctcatgagagcagttggtgcactggatctgaaacctaaagattttaatcccaaggtacgtctcgccaatgacgtcttctacacggctagtgaatttggtgcccttactcatgatattatcacaattgttgcattgaagtctcatcggaaggcttaagtcggcgttgcgtgctgccgtagcttcagaacacaagaacacgcgagaaaaaagatatttgatctgtctttccctaagacctatatttataagaaaaaatctcttcgtgatttccttttttcttggcccaataaattagagttttttctttttatattagttttgcatttataatttttatgaaaaaataagggaaaggtggaagaaaatattaaaactaatataaaagaaaaggaaaaagtctaatttgacaaacattcacgcttttggatataatttgactacacaaatcctaaacttaaaatctatatatttatcagaatgattataaaatatcaatatttgttgatgtaaaaaaccatcatgacttaaaataaaaaatagaaaacaaaatatttgggggtgggagggtaaggcgaggaaacggttacccgcagacactaatctagttttaacagaaccacctacgaaccaaacccaaccttcctggtttagttttt

SEQ ID NO: 9739 - DNA, 517 bp, Arabidopsis thaliana landsberg
  unsure (1)..(517): unsure at all n locations
tcattaaaataaattaatacacaatcatgtaatagaagatgctgattgtgaagattcttgtatttgtttattatcatatcattagctattttgtagcatttattgttcacaccgacgaattaaaggaagttggaaaatgacttgtaaaacttttgtctggtagggttttgnnnnnnnnnnnnnnnnnnnnnataagcttttctgtgatgattttcaagattctcgaaactcttttgatggcttcttcctttttgttttaaaatccgtgtccttatttataacaaatctaccaacttgttcatcactcattcaactactcccttcattacttttttctattacagaactaaagnnnnnnnnnnnnnnnnnnntgtctcatcattcatcaaggcatatttgatcctttttggctttggttttttgtttctacaaatcgctaaagtttttgtttttgttttcttcttttgtgcaattcagtgctacggagtgcaaggattgtatttgtgtgtgaacatcg

SEQ ID NO: 9740 - DNA, 870 bp, Arabidopsis thaliana landsberg
tatcattttaggatcgaaagaatataagcaatttacaagactacaaagtgtgtataaagtaaaatgtcacgaggctagaagaaagtaggatagtattctaagcattataaaacatgggtcatgcttattcattattatgtcttaaggataagtaaaagatacatagtatatactatatactgatcatgtctgtccccaaaacacatgccaacaaagtaaaacacactcaatatacttctctctctctctttcttcttgatcacttctctctgcgaaacctaaatacttcattcatcttaattagaatcgttgggtcctcttcacatgggctctataccatttatcttcatcctccttctttttcatgtacataaatctaaatctcagaccattgaatcagcacattttcttgatcttatgatcagagattacaccattagaaacttcaacatacatttcaagacaggcgcgatccagaaagttcatcttccttcgaatttctcctccattgatatcgccacggctaagtttagatgtgggagtttgagaagacacggtgcaagaattggagagtttcacttaggtccgggcttgaccgtggagccatgtgttgagagagtgatcctggtgagacagaacttggtgtttaactggtctccttatatttactcaaccggttataacttaaccggttacaaataccgaattgcgtctcctgttcttggttcatgggcttacaattcaaatccggacggtgtcgctgtgaatccttatgagatcaacggaatgtacacggatcaacattctattatgatcaagttcttaagcagagaggcatgtgcatgccctaatcttatcacgaagaagaac

SEQ ID NO: 9741 - DNA, 582 bp, Arabidopsis thaliana landsberg
  unsure (1)..(582): unsure at all n locations
nnnnnnnnnnnnnnnnnnnnnnnnnnnccacgcgtccggcgtttataaaaacagagccaaaccaaaccccaccgtccccgaaacggttcgttttgcccttcttcggaaccctgccttccgcgccgctgctgctgctccggtcgccgtcggcgattctccggtaaccgaacaccaccgatccgtcaggagcctcggatctcggatctgagcgaaacgaatcgaaacgaaacgaaacgatgccgnnnnnnnnnnnnnnnnnnnnnnnnnnnnnnnnnnnnnnnnagtgcaagcctctgccggaagccgatgtgaaggcgctgtgcgatcaggcgagagcgattctcgtggaggagtggaacgttcagccggtgaagtgccccgtcaccatctgcggcgacattcacggccagttctacgatctcatcgagctctttcggataggaggaaacgctcccgatactaattacctctttatgggcgattatgtagatcgtgggtactattcagtggagactggcacgcttttggtggccttgaaagttcgttatagagatagaattacaatccttaggggaaatcatg

SEQ ID NO: 9742 - DNA, 1006 bp, Arabidopsis thaliana landsberg
tccctattttttgacgggctggatctgatcataactgtgtacacataaactgggccgatgaaggttatttaaaataatgggcccaatgtataattattttcccaggctagcccaataagttatgttaccagatctcttagcgacttccactgaacttgatacagttgataacttgatatagttgataacttgatatagctgcgaagagtgaaccgaagaacatctaatgtaaattgattaaataaatcaaaaccaattattagtctcgcaaatcttacgaattatgacactgaaatgttaactcacattgggagaagaagaagaaggcacaatttttgtcacaccatttgtctctaaatcttacactacaatccaacatctcagatgggttctgatttaaatctttttttacatttatagatccaaagaatactcaatatatggaccattgcctcactgtttacagacaacacaagttgttgatgcttgtgatgatcaggaccgcttcaacaagtactgcggagatgtatcatcagttggttcttggaggagctcacgggcaagtctcactggtctgtcctgtagatacgcaatgtcgctgtttggtgctgttatgagatgatgatccgatccttctccatctgtttcgtatgacacagaagatgcaactgattcttctgatccatcgttatcatctacaatggagatgaaacacaactggtttatccgaaatccaaatgcctattgcagttttttttggtgaagaagagcgaacatgattatcttaccagagaactcgagggcttccggatgattaaccgatgagagctgtatgctttctggaaggatacagttacagaaagaacctgaaagaattcaagaacaagcattcatgtttaaaatgtcaaagaaccaattaagaatggaagatatacataagaaatttatcttaccaactcgagccatccgattaatccatccaggaataggcttttctgttacctgc

SEQ ID NO: 9743 - DNA, 977 bp, Arabidopsis thaliana landsberg
aaatgcttttacaccccccttaacactcaaaagattcaaaatatatggttgaaaattttaggtaagcttctaaatctacaaaatatgtaaatgaatttgttcattacgtaaaatgtatgaaatctatgatcaaaaatataaaattataacctttttagctccatttttttttttttataaatagaattcctagcttctgtaagttataatatctacaagcaaaatttttattttttgaactcatgaatctgaaaaatctgtgaatacgattcataatgtatgtaaaccataaaagttataaactataaatgaatttctgagctttttataaatcataaaaaacctacaaatagaactcgtcttattacaggtcttgtgagggctccattgcatgaaaatgtgaactgaataataaatcccttcaagcctagacgacagtttctgagtaaacatatcaaatccataaccagtaactacgaatattgaggaataaattcttgtactaattattagtctcgcaaatcttacgaattatgacactgaaatgtgaactcaaagagagaagaagacacaattttgtcaacaagttcacaccatttgcctctaatatcactagtaccatccaacaacaccttaaactggattctcatttcattttcaatcttcttttacatctttagatcgaatagaatactcaacatggccccattggcttgcttctgtatataaacaatacaagttcttgaacaagcactatggaggtgcatcgctcgtttggttattgaagctccacaattgatatttgttaatcgaattccaaaataacattggcacttttgtggtccaaaaatacgaaatcgacaagaaaactaaagactttctaaagctcaatattcgtctacatgatcatgtgagctaatgagttttacctattgagaatttattgatttgatgtcgttttggcttttaacacaatc

SEQ ID NO: 9744 - DNA, 455 bp, Arabidopsis thaliana landsberg
  unsure (1)..(455): unsure at all n locations
nnnnnnnnnnnnnnnnnnnnnnnnnnnnnnnnnnnnnnnnnnnnnnnnnnnnnnnnnnnnnnnnnnnnnnnagcaatcctattatgtcagtgattcgtttccatttaaatggatcaacaaaaagtggagagaaggattttatgtcactgctatggcccactgccggctctagatgggcaattgttatgtcccgtggggctggtttttcagaccaggttgtggaacttgatttcttgtatcccagtgaaggcattcatcgaaggtgggatagtggttatcgcatcacctcaactgctgccacatggtaccaagctgcttttgttcttagtgtcccaagaagaaaaccagctgatgaaacttaggagacactccgcacatctgcttttcctggtacttcatgtaaggaaaaatgggctaagaacctctatatcgcatctatttgttatgggagaaca

SEQ ID NO: 9745 - DNA, 1364 bp, Arabidopsis thaliana landsberg
tacgaatgattacactgtttgacctacagaagttctatgtcaaagtatgcaaagattcgccaactatatgattaattggtctcttcagatcttccaatggaaaggaggaattttctggattcatagcatctttcatgacatcatatcattttcatggaaaccaaaccactagaaacattattatataccatacggctgaaaaaagcatctctcacaacaagatcatttcatcaagggatcaatctttacggtatatgtacactattatagccaagccataggatactggcatagaacacacacatgaagcttacacacaacatcacaatacaaagacaccaaactctacgaggcattgaacattggccatagatcggtttcagctactacactactgtaccctcctttttcttcttcttcaacttcatacctttctgactggtctgcctctgttgaactggtgtccgtttcacaagcagaagccgcgacatcacatatctcaaaagctcttcacggtgagagaatgtgaaatcaaggtgagcatactcaggctcatttaacgatacatcggcctcggcatctctcatcacattgtagtgtttcttcaccatagaggaacggatcaccttgtcgttccttcccgctactaaatccacaggcacatcgatgaacttgtaagactcccctagatcaagcggttcaggagagccataaacctccatgttagctgatctgcttccataatcatacatcctgaatttaccggtgtgtttgatctgagcaagatgttgcgccacacggaaggagacagctggcatgtcgttcatgttgtagtgaggcaatcctaagactccgacccaattcgagctgtctccaccaactacataactcattagagtttggaccaatccaccaagagcaggatagttgtgaaagtcacgggctaacttgttcagaagcattctgaagaatcttgtcggtatgtagaaggcaggcacgatgcgagccaaaactggactaatgaaaaggaatatgtactcaactattgtgaaacctaagttcgagtcctcatgaaacccagcaggtgaaagtaggattagtcgtgagagtctgtgtggcttctccttgatttttcgagtaataacatacatcagaattgcagcaccgcctagactgtgacagatggcacagagcttataaggctcctcctggttgatttcttcatcgatattgggctggcagagcttgagttctgtagtttttatttcatgaattttttctatcatcgctgggatatcttcagtaccgtgctcgttaatggagtatcgccagaacctgcattctggtcaataacaatgaacatt

SEQ ID NO: 9746 - DNA, 1634 bp, Arabidopsis thaliana landsberg
aggtggcggtgatttggtttgataagttttgcaaagttatcatctgataaatcaaaaatccttatatttcggggcccatatagatccttcaagtaagtcctaaatgcttatttcctcctgagaaactttgatacaagtattaagtatagaaactggttctactattgatatacgcataagttataagaatggtccatttccatgaggcaatagtttaaacagatgatttttttattgtttgcagattactgtatggcacctgaggtttacaaagatgaaatatttgacaggagggtggatccttactctttgggtgtcatattatgtgaggcaccaccttatggattcatacgttttggtgtcattttatatccggtacctattagttacgttaatggtcaaacattgtgctcctcggcatttcttgatggctgtatctagtctggttttattccactcactgttctatatgctctctaaaagtacttcattctgtttctcaaccattctagctgattatgtttttcctagcattgactgattgaggccaataagcttctctagcaaatctcatgcatcaattctctgatgagtttatcttaaaaatttcagatgattgaaggagtacaacctttccatcctaaacccccagaagaggcagtgaagctaatgtgtttagaaggaagaagaccttcgtttaaagccaagtccaaaagttgtccccaagagatgagagagtaagtgtactaagctttatcaactttaaaacagaacttgttttacactttaagttacagtaacatcatttgcttggtccttgatcctttacccaacctctttgagcttatttggttcaattgttatttaaacagattgattgaggaatgctgggatacggaaacttttgttagaccaacattttctgagatcatagttcgattggacaagatctttgtacactgctcaaaacagggatggtggaaagatacattcaagttcccttggtaaaaaaaaactttctcttaacaactctttatcatttatgtttttgcatttctacttccaccttagttaagccgacttcttctaagatcgtgatttttcttatccataacggactagagccaagctctttatatatatcatgattttttctctcacccaaatgtatgatttctcaggaaatagtacataagaacgtgagaggtttactcaggaacacgagaaactccacaattcaagagctctcttctcatgtttacaataaactcgatacaaagaatacaaaaagaaacggccctctccgatttgtcattgtcttatcgtgtaacagtgtacaatgtaaaccccaaaaagtactttcatcgagctatatagacttctctactgcacagaactgagcattttgagatacaatgtatcatatttatataagtatcaagaaagctctttattcttgttatgcttttcaaacatctccgttttttaatacagagttcatatatggatttgttcgcaggggacaaccaatggaaccaacaggataattcaaatttagatgacaaagaagccgttattaggtaatcaactaacaaactgatgacatctcagtttcaaattgataagtcacttta

SEQ ID NO: 9747 - DNA, 929 bp, Arabidopsis thaliana landsberg
  unsure (1)..(929): unsure at all n locations
agtgttttgcttatataaaagcggtttgaaactaaaatgtatgttttgatgtccttgtttacttgctttgaacagttccttcagtgataaacccataaacgaagctgcaactggtccaattgggagagagttgtttgaaaaggagcaagatgaccttcttgctgatttgaaagacattcctaagaaagcttgtgatcgtcgagtgagtgtgcacatttcttctttcactccctcctctcattggatttaaccatatttgttttctgtctaatagataaatgagtttgtgaaacgggcaagagcagcaaagatacatgcgtacatcatcagccatttgaagaaggagatgccagcgataatggggaaagccaaagctcaacagaaactgatagataacttggaagacgagtttggaaaggttggtaattggtttgattctgcggatcttttcaatacgccggttctgattccgatcatatttcatgctaatatgtgtttcaatgttgtgggggacatgaaaacaggtacaaagagagcatcacttacctaaaggagatttcccaaatgtggatcatttcagggaggtgctaagtggttacaacatcgacaagtttgagaagctaaagccgaaaatgttgcagactgttgatgatatgttggggtatgacatcccagagctcttgaaaaatttcaaaaacccttatgattaatatttctatccctcttatcttctgcggttgctgtataatccaaaactatacattcacttttggcctagcccttgtgacttgtgagcgttaatgcatatttgtatcttacaagccttgttgacaatagagacaaacataaagagtgctgactagataattggcttatatcacaaaccanaagtattactggttatatcaagtctaacatgataacttttc

SEQ ID NO: 9748 - DNA, 1019 bp, Arabidopsis thaliana landsberg
gatttgatcttacgggcttttcccgtcgccttccagtatccagccacagtagcttttttcattcgacttccactcggatatttccggtccaaaggacaaaagaagagccactctgagtctgttgtcttcaccacagaaaaatctacaccacaaatactaaagtataaatctttactcaaattcactaagtccactacccaagctaagaagttattgatcatattgttccaaattcaaacatgcataaaccggaattgaagcctgggaattgctaaaccgagactaaagagctaaagatgaatcaacaaatcgatttgatgaagaaaggaattaccaggcaaatcccaaggctcccatttgcagatatcgatctcacggattactctaacgtcgttatcgtgaccgttgatcttgagccggagatagtaccggactaactcttcgtccgttggactaaatctgaacccaaccggtagtgaagcgagcgatagtacttccatgtcttctttcatagttgcgtgagactttgagaattcgagaggaaaagagaaaaacacaaattcgacttcaagttgatatctaaaatgaatttggatcaaagatgcgattcaaaggtatagagaagaaaacttaaaaaacccagattccagaatttgatgaaataacgaaaagaaaaaaaaaaccctaaaatttgacacgatttggtaaagtgaagaagaaggagatgtgacacgatttggtcagacaagagagagatatcaaagacaaagagatgaaaaagtggcgcgtgtaaacacgttaccactgcttcccagaaagtcataaaaaacaaaaccacgttcgttacgcgtaaaaggcaaatcaaaatgtaaatacctgttttacccctgaagcattgcagtaaaatagttacggaaataggggttatatgagtcaaaagtgaggatgtctaaacgaaaaatgtcacctagcgaatcatatattgacacgttgatgctataaaggaagcttcgtgatag

SEQ ID NO: 9749 - DNA, 808 bp, Arabidopsis thaliana landsberg
gaatctttggttaaaaaatctacatttcgtatcattcataaataacttaatatttgtagaatcacaaacatgatcaaattatgcataaaaatttatttcatcttatttatagtttctgaaatacattgatggaagggtttgattggtgtaggcaacaaagaataaatgcttgatggtacaagacaaatagacaccttcttctcccactcttaaattacacacacttacttacacacacataagcttgcacgtggttcttgttcacatggtggaagccacagatgtatatagagagacagagagagagaggaaacaaaaccaaaccttttgctgcagaagagacagactattaaattgcttcacctgctttacttactttccagccaaggcacactctccacgcactcatcttttctcaaatctctctctatatagatttgtgtccagaaattaatgggtttggttcggaaacttatgactggtaatacccagatcttattctatgtttcttgaaactctcttctcgaggcaaatgcagctacttcttcatgcttttgttcttcttcttcttcgattatcaagaaattgttaacgaaatagcttaaccgggtttgagttcggtttaggatccgataaccgcaaatgcagattgggaaattgatttgggtaataatgttcatattcgttcacattattattacatcatctcgaagtttctcggattctattattaccgaacgagagattctacttcaattcaaagacaacatcaacgatgatccgtacaacagtttagcttcttgggtct

SEQ ID NO: 9750 - DNA, 944 bp, Arabidopsis thaliana landsberg
  unsure (1)..(944): unsure at all n locations
tcctcgaggcaaatgcagctacttcttcatgcttttgttcttctttttcttcgattatcaagaaattgtggacgaaatagcttaaccgggtttgagttcggtttaggatccgataaccgcaaatgcagattgggaaattgatttgggtaataatgttcatattcgttcacattattattacatcatctcgaagtttctcggattctattattaccgaacgagagattctacttcaattcaaagacaacatcaacgatgatccgtacaacagtttagcttcttgggtctnnnnnnnnnnnnnnnnnnnnnnnnnnnnnnnnnnntcttgtaaccaagaaggattcgtcgaaaagatcgttctttggaacactagtctcgccggaaccctaacgccggcattgtctggtttaacttctttaagggttttgactctgtttggcaacaggattacaggtaatttacctttggattacttaaagttacagactttatggaagatcaatgttagttccaatgcattgtctggtttggttcctgaatttatcggtgatttgcctaatttaaggttcttggatttgtcgaaaaatgcgttctttggagagattccaaattctctgtttaaattctgttacaagacaaagtttgtttcattgtctcataacaatctctcaggatcaatccctgaatcaatcgtaaactgtaacaatctcattggtttcgatttctcttacaatggcattaccggtttgttgcctcggatctgcgatattccggttcttgagtttgtatctgttagaagaaatttgttgtctggtgatgtgtttgaggagatatcgaagtgtaagagattgagtcatgtcgatataggaagcaattctttcgatggagtagcgtctttcgaggttattggattcaagaacctgacttattttaatgtgtctgga

SEQ ID NO: 9751 - DNA, 1678 bp, Arabidopsis thaliana landsberg
atcaaaaactaataacatcaaactaaaacagagaagctaaccgcatgtatatagggaggctaatagccttgcggacgggttagcgaactatgcttttaatctatctttaggtattcattagtttgatttagctccctcattggtggaggagattgtaagggaggatgtccgaggaactgcgtttccgaggctcacccgcctaccgttttgtaatttcttttcagtttcaataaattgcgggagacggttgtttcccctctactactaaaaaaaaaactttaacagaatttaatagaatcttgattaaataataacagatttttcatatcatttaaagtaattaaaacacagtttaaatcacacaccacctaagactttttttccatctttttcattaatcatattggacattttgcctcattatcccacatttagatatgtataatagaggctttgttcgttgtggttaactaaccctatttcttatgcttctttagatacaaaatcaaattttcgtacggaccaacattatattgtccatgaattaacactgaatgcaaaaggacatgttggtctttttttcccctctttatttgttcttcaaagatttggttggatctaaaatgtcaaatacaatcatgaaaaatcaggattttatcagaatattatttgaatgatacaaaagaaaaatgtaactttgaacaaaaattattaataccattaatgtaatcggattcgggaatatatagtcaaaaaggttattctaagaataatttagacaaaaaggtataagagttaggcaacacttttcggttgtattcattagacatcaataccttcttgtatttttcaaaataaaactaaacaagtgtctactttacgcgagtcggattagaatgcatttaagaatttaattagttagttcatcttcaactagtgaagtgttaaggtgtttaaagattacaagatcaatcgtcttaaatataggccttgaggagagaataaacaaaacaaaacagattttgaagttttaaacaaaagacacttactaaaagaatcctaagaccatgcaaatcctaaaactgtttatctcttatgtcgcctgccaagaaccaaatatagtttgtagaacaaagattttgacaacgaatctaaagggaaggcacaatcaaacgtgcgggtaaatcttaccatgcatgcggttagggaagtattccaaatctggaaagcaagtagatccttgaaccagaggagaaggttgacgatatgtgaagaaggagaagtgatagccatctggatggtttcttggtttagctatatcgattaatctcatacaaccatctctgtcgaaacaagtaatcgcattctctccaccgatttgaagtcccttatcccaagctgcgttgatcacctgccacaaataaccaaaactttagggttaagattacatttgctgagaagtaaaaaaagctatagtcatcaataaaaagtgtcattacctgccaacttaaaccttctggatcagctaatgcttcttcatgcgcattgggagacatttgtggcccagggcacacaaacttcacagtcacggaatatttcttcaaagtttcgaaaacaagagagtacccatcacgggtttgaggggtgtagtatcctgcagttaattcagcagcatgac

SEQ ID NO: 9752 - DNA, 1190 bp, Arabidopsis thaliana landsberg
aacaatactgcctggaccatcatttaagtgtattcggcctggtaggtggcttaaacatcctccagcttcaaacacactataagattgaggaaaactctgagtccaaacatcattcaccatgaccctgtccaacttcttggcaatgagatcatgttctcttttgtttgaccatgtgtaaagtggaccatgatgagccatgtccgtaagagaacaataattcaccatcgatctaaagtcacgcatgcccattgaaaccacaggattatcctccacttttgaatgctcttctagttctaacgtctcattaaaatctccaaaaataatccaaggcttcttcttaatgataggagaatcataatgatcctgcaattcattccaaagaacctttctatcatccctgaaattggatgcatacacaaacgaacaaaaaaactcatcatcccggttctctagctttactgaacaggttatgagctgttcactcttatagaaaggactcaaacgcacatttctcctccatactacccaaatacgacctcgactattgtattcgaagtttgtaatcatcgaccaatcattgaacaacttactacttaacacctgagctttatcctcctttactcgcgtctctaataaacaaccaaacagaaaatcttgtctctccacccaactctttattacggaatgtttttctaacttatttagacctcgaacattccataagaattccgacattaatgatttttaggagggtgcttcttactctgatctttaggaaaattcctattcgattgagtaaaagagtttgataaaaccttgtgagcagttttggatccacgtggaagagacagacgttggttctgcacctccgtacgtacatgaacatggtcttgagatactgtcatcttcacagttggaacttctgtaccagggtcgtctttcttagtttcttcacccgcctctgggatcttatttccctcctccacatcctcatctccactcaggaccgagtatgagttggataatatggagacctcaccaaacttaagctcccctgtttttatagttggactgcgacctgtttttggaggagttatccagcccttatcattctcagattcacttgaaacaatcgcaactgagttttcttggctgcagtttcctgcactttcatttgttttctcctctaa

SEQ ID NO: 9753 - DNA, 1215 bp, Arabidopsis thaliana landsberg
tcaaatgaaccaaatttattatctcactacgtctgtgtaagcgtgatcgagcaccaggaagacttagatatatacaaagaaaaagtaggaacagccctgctagtatatcatatgcaatgcagccgctgcatcagacaacaacaatatattcagagagaatgcttctctggtccctatagaacaaactaacgagaagagagagtaccaacattcttttcagtgcagaggtgaactagcgaattggcaatctctttacaatatcatgtgaacaatacaagccataaggttgggtttcaagttcacacgatcactaaacattgccattccttctcatgtttcaaccaccgcaacttctagccggtaataacgcaaaactaaaaccaagcacggtttactaaagactacaatgatttactgaagattcttaatcttaggttacaacagtccaagaccagaagaaaatattgaaactttaaaaaagaggtccaaggcaacaaaatcaaacataccctccattctatgaggcaatccctgaaaaatgtggatccttctgaaggctcacccttcaccttatccaagttcctatagttgctgatgttgtcaatttcatttgggcggggagaagcagacttgaactgcatccagaagtaataaagcacaaacagccatattagagagcacaacgaaaacagataagtgagcttactaatgaggagaaacagtggactctatgataggtgtagaggaagttttacaaaggaaaggaaaagacatgtgctatataattaaacaaacacgtaccacaaatctcttacgcccctcggaagtgttgagcgactttactgcccgagcatcagctgatgtcgccatgattcagagagccgtgtttcctaaacacatcaatctccaaaacagtcaatttcgattccaaaatccccaaactttacaattaaatccaggctaagcaaaaaaaaaaaaaagagaagcttctaagagcaactatgtatatcaatctaattgcttaattgctaaagccttggaaattaaacaacaaaagtagagcttacgtttggaaacgaaatcacacagagggttgcgaaagcaaaattgcgtctttaaagagaaaaatcgaaaaggcttcccccccccaattgagattgagctgagcttgagtacgaacggaggaagaaagggtttaagcttcttttttgttct

SEQ ID NO: 9754 - DNA, 551 bp, Arabidopsis thaliana landsberg
taaaccctaattgtatctttgcacgaatttctttaattgaagcttttgaatcaaaatttcttgtttaggaaacgcgtaactttgcacactctcttaatcatggcgacttcagctaatcccccggtcgtaaagtcgctcagcatatcccaggggcgtaagagatttgtggtacgttatgtgggttattgttattcatgttaatacttggtcttatatgttagcacatgtttttcttttcccttgtaaaactttctctacaactttattcttgatacttttctattagctttcatagtgtacactgatttactccattagtaagctcaataatctgttttcgttgtgctctctaatatgatgcagttcaagaaattctctcaaagaatcattgacattaaagtgtttaggatcttggataaggtgaaggctgagcccccttcagagggatcctcattgcgtcgtagaatgggagaggatgtttgattttgttaccttggacctcttctaaattaagtttcaattaaaaacaatttttattttattttataata

SEQ ID NO: 9755 - DNA, 1238 bp, Arabidopsis thaliana landsberg
aaacagaaagaaaaaaagagaaaatgatgagttcgtagagttttttatcagaaacatcttctggtgtttgttgttttttactctccttcttttttcttctatatgaccaaagtagtaagtactaagcatcatcttccttaaccctagaacttgaacctgacgtcataccaatcacttgtgtatgcgtaaatctttgcaactgtatcattcgcgcgtagattccatcaggatggttcttgagaagatgcgaatgcgatccttgttcagccacttttccatcatcgatgacagcgatcacgtgtgcgttcctgattgtagatagcctatgagccacgactattgatgttctaccagagcaagcctggtctaatgcttcttggactgatctctcggactctgcatcaagagcgcttgtagcctcgtcaagcagcatgatctctgctttcctcacgagggcacgtgcgatcgcgatcctctgtttctgtcctcccgagagctgaacgcctctctcgccaacatacgttttgtaaccttctggtagcgcggatatgaatttgtgcgcactggctagagtcgcggcttgtatgatctctgcttcggtcgcacattcatgtccatatgcaatgttttcgtaaatggtagttccgaacaagcacggctcttgagggactatggctatgtgtttccttatggctttcaggttgtatttccttatgtctttcccgtcgatcatgactcggcctgaggaaggttcgtagaatctctggatgagggagataactgagctttttccgcacccgcttggacccacaagagctagggttttgccagctctagcacgaaggctaaggtcacggaaaatctggatgtctggccttgaagggtaagagaaatcgatatgtttgagctcgacttcaccacgtaaccggtctgggaccggggtggtatcaggatcatcaggttcaatctcggttttccggtcaagaagttcgaaaacagaccgcatagcttgaccacctttgatgaaatcaggagccagtgtgagtgtctctgctgcaccattggctgagaccatcagaaccatgaagactcttatggttttggagaagtcagagatgccgtgtttcacaagccatgatgcgtaccatagcccgagagcataagatgcataaagacagaactgagctacaccataaccacttccagcgatctgtcctttccagaagcatcggttcaat

SEQ ID NO: 9756 - DNA, 559 bp, Arabidopsis thaliana landsberg
atgaaccccctggaggttccggtccggaattctccgtgtctgacccacgcgtccgaataatttcgacacatattaatggaaaaaaatatggcagctttttcgttgtagaaacaaaattcccctattttcggcacgccgttgttgaatttccaatctgagatttttttcttctgttatttatacgtgaaaattccaaaaagcctaacgcgagagattcattagcttttcaattattccttcgaattattttgaaggaatcatccaaactgcttgaaatattcatcataaacaaccttacgctgttatagatattctttttctctctctctgtctctttctgtcacacacacacacacacacacacacacagatccaaacttggccgtaaaacaccgatgccaatcctttcgaaggtcacagactttgctccaacaactgcggcttctttgggagtcccggccccatgatactctgttccaaatgcttcagaaacatttctttgaaggaagaagaacaagtcaaaaccaaatccacaattcaaacccgttctttcttgtat

SEQ ID NO: 9757 - DNA, 1389 bp, Arabidopsis thaliana landsberg
tctgagagacaggcaccagaagtcacttacctctccacgttttagttcattagtttctctcactggaatgtgtctgcagattaatccattatctaatctatatttcaaaatttcctcagatcgtttagagcggctcttctgctctacttcttcttcatcttcttcttcttctcctcttgcagtgctagttacatcactatcacaggaatgtgtatcatcatcgtagggcttaggcgattgttggtttctactaccagaactgccaaagcatccaaagcaaccgatggtacgggcaaacaaaaaactatcacgaaacatgatctccttctcaaaaataaaataaaaaaacaaattgctcctcaaatgtatgatgaaatataaaatcctcaagttaactgaggaacctgcacacaaaaaaaaaagtgacatcaacattaagcatccaaataattaaacacaagaacctctgtagaaatcgaaatcttaccccgcgataaaaggggtttcgagggcttcaagcccggagaacttgactattccaaaggatgccattcagcgagatgaataagacaacttgagacatcataaccactgcaatcgaaacacgacatgtctaagactgaaaccttataaataaggtatattccttcttcacgagcagaaaatcgttgaatgcatagccccaattgttaatagctacacagcttcaacaaccgccaataaattcaagttgaactacaatgcttctgcgaaaaaagaaaaggtcaaattctcatcaaattcaaaagcttgtgtagataagtcaatcacattgtgggtattatgattcaggcgtaaaggtgtaaactttttcaatccaaatagtcaactctaagcaaagaaacaaagacggagagaagaacaataaaattctacagcaaacttaagaacccccaagaaggtggcttcaaaatcacataaatcacaaaccaaaattttgaaaattgaaaaaaaaaaacctaatttcgaaatcggatgcaatggaaatttcatgagaagattcggaacataaactgaaggtaagagcgagaatcatacattaaagctggttgtgaattcgatcggagcagaggaagacaacaagatcgcaaaggaaagagctctctcaacgtcgtgcgtgagagatttagacacaccaaaaaaaaaagagagagcttcgaagcctttgatcgagattctctcccccttctgtttttttttttttggggtttatattttttgttttgtcaattacttttataaaaagtagttttatattaaatcatcccagctaatgtgacaaacatgctataactaaattcagggtagaaacgataaattctactaataaaaaaacccatatgagttttg

SEQ ID NO: 9758 - DNA, 3378 bp, Arabidopsis thaliana landsberg
tgcaggtcgactctagacgatccccatgatcactatcccccatcattactactgaatagtgaatacaatattactatcgccaatcgttattactgatcgcgtagagaggctagaagaactagttttctaccgtttggaaatttgtataaaggaatcttctagaaagatagcccatttacaggcccaataaaacgtgtacatacccattaggttgatttcactcaggtctcgtaaataaattaaataaataaaaaatgaaccaatcaatattgactaatctcagagcacacaccagtcttcgggtctctcctcctcgcggctcgaaacgcaagcttcacgcttgaaaatctccgttcgttttctacctcgtttagatcggagatggcggagaagccggcgcaagagcaagagcagaagcgagcgatggaacctgcagttctcgacgatattattcgtcgtttggttgagtttcggaacacgagacctggatcggggaagcaagttcatctcagtgaaggtgaaattcgtcagctttgtgctgtctccaaagaaatatttcttcaacagcccaatctgcttgaattggaagctcccatcaagatctgcggtcagatttttgttccctttagtttagaaagagtgcttttttggattggggttttagttttgattgatttttagaagcgaatttagtgcatgtttagataaagtatcaagctttgttcagtagtaatgagttgaattcttaaagctatgtacatatctaagtgactgaagaaaaaatgtgagattttgattgtcttttgagttcagaacaatgaaatcaagctaatgggtagtataaagtttgaatttttattactaaaagtcttagataggcttaggagttttgactggttctatgaggtttgattcattttatcttaatgttgactagtcaaattatgtgttttgattgggtctgataaaacatttcctgcaaaagtttaacgttgactagtagtatctgatatgccatgttttcttagatgtaatggttatattttgtcttttactttataggtgatattcatgggcagtattcacatctattgaggctttttgagtatggagggttccctcccgaagctaattatttgttcttgggtgattatgttgaccgtggcaagcaaagcttggaaacaatatgtcttcttctagcttacaaaatcaagtaccctgagaacttcttcttgttgagagggaatcatgaatctgcttccattaatcgtatttacggtttctatgatgagtgcaaacgcaggttcaatgtcagactctggaaaatattcaccgattgctttaactgtcttcctgtggccgccttaattgatgacagaatactatgtatgcatggtgggatttccccagagctgaaaagtttggaccagattagaaatattgcacggccgatggatattccggagtctggtttggtatgtgatttactatggtcggatcctagtggagacgtaggctggggcatgaatgatcgtggtgtttcatacacttttggagctgacaaagtcgcagagttcttggagaaacatgacatggaccttatctgtcgtgcccaccaggttttaacttgagttatatctgccatttagtttattatgaaaactgtgcaaccttaatttgagtgtattggctctgtttataggttgttgaagatgggtatgagttctttgcagaaagacaacttgttacagtattttcagctcccaactattgcggggaatttgacaacgctggcgcaatgatgagcattgatgagagcttaatgtgctcattccagattctaaagccgtcagaaaagaagtcgccttttctgtgacaccgattatccagtgaccaccattgcttcaaattaacaattctacaaaaggtaaaaacttttttatgctatggtagcaccacatttgtgtaaccctggttcaacattctctgcttcatgtttagcttgttcaccgtatctagcttttactctgagtggtacatacatatcagcctcaggaaaatgaaatggaaaacatgtattcgttaagctagttataatggtttttttgagttcctgtcacagagatgagttcaaaatcacacaatagttttcttctcttacatttctgtgtaattagctcatgttgcttataatttgtcatcaagaaacagtgttaatcttcgaggtttggtcactgtatgctgaatgttcttatgtggctcagcttttgattatcattttgcattttgttaatttgctgcagttgtatactggcaagaggatctagagacggaaactgctcaattgggaccttaatggtactgataatagagcattagacatgtagctgttgacagtgatggcatcgagcagaaggaacaagtcaagtctgtactgtgattttagcatctctcacatctatgtttgtctaaaatgtgtgtgtgtttttagtcttctctctgaataatattagattctcatttgtactctctatttatttaggagaacccaaattcaaaactttttttagtctcttcaccaccataaagccataatcactacgtattgttcacttcaaaaatttaacatggggtgccaattgtcacatgtaaaactatatggtcctaaaattaaaaatatcaagtaattaaggataataatgaaacatgtgtgtgcacgtgtgatggagagaaacaaacaaatcagctttagaattcagattccttcttgtcacacagttttcgtttctctttctctttctctcacactctctgcctatctccgccgcggagatccatcgtgttttctacttctgctggtatccatggattctctcgttgaatccggttggaaggtacttcgtattcctctatctcgtcgcgttcctttgtatgcgattcctacgttttttttttttgttttgttttcagagattgaatcgtgttttttgtttctcggtctctggcgacttgagtgtactgcatttatgatacaagtgtaggtacgggattagtatctgccgtgttaggttgattttgtgtttgtcgtctgtggtccatcgtattgtattgttgtggtccctttatgttgagattgaattggtttcgtgtcgattgcgttgtggtttcagatctggatttgactgttctagttacagattattactgatttcgtatgtgatctctgtttgtgcttgtatttttttttggaatttgagtgggatttatgtattgttgttggagcttgccctaccttagaggatctgtgattgtgatacgtgtaaataaacaataggttttccttgaacgtcttcttaacttgcttttcggcgtgagttc

SEQ ID NO: 9759 - DNA, 1180 bp, Arabidopsis thaliana landsberg
agtatatattcattaaaaaataaatgtgaaaatatgaaatatatggttagttcatttaagcctttgatggaatgaataatgacgacttctttcccaaatctcacaagggactgatctaactttatttgtccaaattatgggaatggcattatttcccacaatcattgtccatttgggaccctttgtcgggccttacgtaatagagcatttctcagctaagacaatgacgatttaacttagactattatcttctctattagtgccgatctgctttttctgatatcgaaattgtaaagcccaaaattcatacaatgtaatgagacgaaaacactgcatataatgtaatagtactcaccaatagccacaaacaagagcttccgaggtcgaaccataacaaaaagcctagcaatgtaatcaaacatacattgaaacacttctgtaaacgtagtaggagaagatttgtcttcaggatggaaacatggctgaatgattccgttcatgtcgagataaagattgtcatactcgtaaccattatgattaggtttgcttgaatcgattggaatcgtgacgccgccgccattaacttcgagtggctcttcttcaataacttcttgtatagtcaatggatacctctggataagccatctgtagaacgacggaactcccatcggaaaattatcgtgaagaaagtttaaaccctaagctctgtagccacaagactttgcggcggtagtgaacgggaacggtcactctttaggtcacacggaggaattaatttactttgattgtgatgacctcataacagtcccacacttgctatttccaaatcgaaccggataaattgttgggttgtggttcaaattggttaaaccagattcaatcattttttttatttcaaaaaaaaaatcttaaatattgaaattagatataaatgtatttgtttaccctagaattagaatgtcaaaaataagaaaagcatttctttaccctatataattatgttaatttgttaaaataaatggatgggggtcatatgttaaatggctaagttaaaaaaaaaaaacttaatgatttaatccatatatttttaaagttggggattaaaatgtttcaaatttgaaaattcatggtgttttttctctttcatttactggcctagcggatggatagtgaactttta

SEQ ID NO: 9760 - DNA, 1569 bp, Arabidopsis thaliana landsberg
ttaattggatactactggtagaatagaggaggtttaattaagaatattgtctattaaattatatagataaatagccaatgctagcaaatgtctttgcaccacttgtagctactttagacagagaatactaaaacagtttttaattcatttgatctcatcgaccggctttagaggtaactcaacggcctgacaatggcccaactaactcaacggataagatcacatgtcttttgggccttttctacttgttaacgtcagcaatattgcagaggtaagcggctactgaagttgaacgatcacacgaactaaagcgatttcaaatttctgatcagaaccaagtcaggcaaatctttcaactatctagaatacaacatggttttatagctttttcatgaaatatatattaaactcaagacacaataaaacaatgctgcaaaaacaagctgagttgaaatctcaccgtctgaattacatttgtatgactctccgtaagggtaatttttatgtaatgggtttttttcgaaaaatcatttgctctgagactattaagtgactagtgaggttttggaacaaacccatcaaccgcaaaatttctagtagctgaaggaatggctaggcgtactccatctagctctggttttgcgatgacttgacatcccaatcgcgacctatataaattttcaaaggaacatgttaatatttttcaatgacacccgaccaaaaccatttaaagcgtagaatagagaactcacgttgctgttaacccgaaagcgagatctagcatatcattctcttcatctgttggttcttcgagtttgttgtagtatttggtgtcctattacgattacagtttcaactatttggtaaaactcagttcatgatattctatgcagatgagtgtttgtaagggcaagtgagttttaccataacaatcacatggcaggttgaacacgctagagaaccttcacatgcccctgaagagtaataaagaagaaacaacgcataaatttccaatgaaaagatcaatctgagatattagttactatcttgcattatgcgaaaaagcatcattggacaaagaggaataaatggaggaaaaatcgtaccttcgagttctatatcattttcatgagcagcttcaaggatgttcattcctactggaaccttgatatgaatttcctctccatctttatcaacaaaggtaacgtttatcctgaaaaaaatacgaaatacatgtatcttacattcaggcgagagtgctgttgtctcatttttcgttgttgtcaagagttgaatgttttctgagctgcatcatggcaaaataaagtctgaacttcagacaaaaaaccctcaatctctgtttcttccagttcatcctctatattcatggctagtatacgagtttcactgataaaactaactacaaggaatgtatcaaaggcttcatcaattgacgatttcaacgaccacattcctttgatgccttgaagttacacggacgcctgcaatatacagcagagttttattagattacatcagatgagaatattgcttacatgacactgagac

SEQ ID NO: 9761 - DNA, 1554 bp, Arabidopsis thaliana landsberg
atgtctgtttccgaaaaattcagtaacaaaatgaaaaatgagttcagtagtgtatataaagctatagtcatagggttttcaatacaatctctgccctcaggagatggtaatggttttcagataagcttctttttctggaagaaagtcttcaagtgccaaaactgaagacctgcgaccgataaacaaactgcaagcgacacaaaactcaaccatgccatcttcgaatttgtcgctatgttcagattgtgcatttcttcttccctgtaatataccaaatgaagaagggttttgagttttgattcactctcatcctctgatcaagtgacttcaagggaagacaggttttgttgtcattacctggcgcggagatagaacatctcgtcgtggattccattcacggtttcaaataacttcttaacctcaaactccatcgtctggccaataaataaaacaagatccaaccataacaaggttaacaaaacattccttcaaaaacttctgcaatctctttaagaggctatgttacatttcaagctagtcttgctctgtagtatgttaaagcctagtcctatctaccacatttcaagatagtaattttctgcgtctgttaaatcctagtcctatccaccttcatttagcagggaaagaactcctgaatgagctgaagaaatcgatggggttcaaaggtgaaactaatgaagctattttctcatatgcaagactgcagacacaggtcagtaacacacgagccctgtcagcttaattcatggccttgttctaaccaaaccaatgcaccaacataacctataaaccaagactacatagcatttctcacttcagatataactttccactttccagcactatgtcttggtgtaacttaggcagctatcaaattctcacacatccggcgcaatgctctattgttcatgtcattagaagcatcaaaatctatttcctctaaagagattagtttgactaagttaagacttcaagagtaaagaaaaagcgaaaaacttacttcgacttggctcttctttgccacattcgaccaatccttggtatgaatacccgtcctccaatcaaagtcaatgatcagcgtcgtctctggtttgtgatcgacggcggagaagcaacttatgtaatcccctgtttccacagctacaaacgagaattgtcccgattctactccgtccgattcgtgataagccgtcccttgtggcgatgtgaccttaaaaatcaaacacattgcattatactgaaatcgccggaagaagaaattgaagggaaatgcgatccgatcggatgattattaccctgacggtgactttatgggaagaaggaagaggatgatcctcgtgagggtttataatgctgtattttccgatggtcatagcgtttgcgtgaatctcctctgagatgcatttcgtgtgcccagaaagtagctcgtatcgtatagagagtgtcacgggagataaaattgagaggatcaatagtacgatcgagctccgacgatgatttatgacggctccgatatagagagaaatcgatctg

SEQ ID NO: 9762 - DNA, 1265 bp, Arabidopsis thaliana landsberg
gaaattgggtgtttttgattcctcattttatcctagttcatgttttttttggggctgtttcttagatttgggtttcgggttttagcttaaagatagttcctaatccatgaatacattggttaatctggaaatgaatctggagttaagattaatgcataaagtttacgaccgtttataatatgcgtctcctctgtttgtgtttcatagtatctggtgctttagtctaattcagatctgatctgagaatgatgaatcttgtttgctcctgtcaattcttctttaactgttttgcaatttgatgagctaataactgactatatctcatttccttcccatcgcagaattttttgaggtgtacaaagcattgcctatttgacgaaccaggaaatggttaaaaggtgcttatcttgttcaaatgcatatgtctttagattcttccaagtggttcgaaagttcttacattttattgttatttaacaggcatggagagttttgatttacaagatatatcatgtcgcagtgcatagacggtttcaagcatgtatgctcctcttttttccggtgttttgatatcgatatttacaaacaatctggaggccttggtgaccctgaacttcttgcgagagagacagtttgtatgctctcaacttcttttccatcttattttaacttccatgcactttttttttccagttatatgtatgattcaaaggcttgccattactctagttgatgctctctgttaagaggaatgcaaatctttctttctgtattttgatcattgactcgttcgggtgcagttagcgtgagtgaaatagaggctctctatgagctgtttaagaaaatcagcagtgctgtgattgatgatgggctaataaacaaggtatgtaggaagggcatcattatatgtcttttatgccactcacttatactcctcacgaatcatgcatattgctacgtcttttggacatccttttctgattttccttgacctgtcttgtcgttcaggaagaatttcagttagccttgttcaagacaaataaaaaagagagcttgtttgcagaccgggtatgttcttcttttttaatcaaaagactttgttatccatttgccaagatcctttttgaaagataacttgacagtaccaatcacaggtattcgatttgtttgacacaaagcataatggaatactgtggtttgaggagtttgcgcgcgctctctctggcttttattcatatgctcccattgatgacatgattgactgt

SEQ ID NO: 9763 - DNA, 427 bp, Arabidopsis thaliana landsberg
  unsure (1)..(427): unsure at all n locations
tacacactctacatgttctacaaaatttagtaagtcatttatgttctacactatttagaatactagttgtgtactaaattttagaatacatattctataaattgctctttgttctacaaaaattagaatatgtttcctaacatttattcatgttctaagaatgttaaaaaacgtagaattctgaatactttagaattttttagacctaagtgaatagattatacttcatcactttttcgtgtagaatttttgttgatgttacatcctctctttttctttcttcttggtgcttccttctttttcatatattcttcttcttcctattnnnnnnnnnnnnnnnnnnnnnnnnnnnnnnnnnnnnnnnnnnnnnnnnnaacaattatgggaatttcagtttacggtctaggttttctatgtgagacaaaca

SEQ ID NO: 9764 - DNA, 1231 bp, Arabidopsis thaliana landsberg
cctgaatcatgacaggatatttagagatggtactgttcaagtcaaggcttatacttaacagtaatcaacgaaacatactgattaattaagacacgcaatgatatgattaatgatcaagataaagttatgaatgtagctgccatatcgtccttatccatcccaaactggcactacgctatgctctgtttcttcatgctacaatcagtgatacgtctttcttcacgttgatcacattcttctctatcccaccaattccgatgtccctcgccgtcaaggatctctccaccgcttcatcctcttcatctaaggcgattccggtcaagatcattcctctccagtatcccgattccacctcttctgatcctcactgtcactccattccctttaatgatttcttctcccgatggacggcgaagatcaagcgcatgacgttcttcgactggattgatgcaatatttccttgcttcctttggattcggacttaccggtggcatcagtactttaagctcgatcttatggctggtatcaccgtcggtatcatgcttgttccccaggtcattttctgtttcttcatttccgattgattgttgattctatcttccctgaatttataccatctagagataagcttaagtgaatcacaggaactctaatgagtatgtttgttcttcttgtttaagtgagtttagtttctaaaaacttctgttttgatggatttgagcaggcaatgtcgtatgcaaggttagctgggcttcaaccaatatacggtctatgtgagctcaatatgaatatacccttttatgaattcatcaatgtgtgtgagagatactaagctattcccacttttgcatgtagttattaatcttgtttggtgcagactcctcatttgtgccggtattcgtgtatgccgtcttcggttcatcccgtcagcttgcagttggacctgtagcattagtttcccttctcgtttctaatgccttgagtggaattgttgatccatctgaagaattatacactgagcttgccattttgttggctcttatggtcggaatatttgagagcattatggggttcttgaggtatttatagtcttctctttgtttgtgcaaggaatcctgtattttttgtagtgttagaacaagttgttcgtttgttttttcaacccaggcttggatggcttattcgtttcataagtcactcagtcatttctggatttacaactgcttcagct

SEQ ID NO: 9765 - DNA, 779 bp, Arabidopsis thaliana landsberg
tacgcatctctcagcgtcaaggacctgaccagccttgttcaagatccggaccggttcgtcttcttcgctcaagcctccgggtcagacccgccccgtcaaggtcatcccgcttcagcatcctgacacctccaatgaagctcgtcctccttcgattcctttcgacgatatcttctccggatggacggcgaagatcaagcgcatgaggctcgtcgattggattgatactctctttccttgtttccgatggattcgaacttacagatggagcgagtattttaagctcgatctcatggctggtatcaccgtcggtataatgcttgttccccaggtactttactttcaagcttaaggaagctggaatcattggctttagaataggaaactggaattattggtttcaatcgtattgtcttgttgagctgcaaaattggttaaagatgtgacaaaatgtattatagcttaagagattatcaattcaagtttttagtaaaattatgtattggtcttcaatctggagttttgttttaagtttattttgctgaatgacttttgatggatttgaccaggcaatgtcgtatgcgaaactagctggccttccaccaatttacggtctatgtgagttttattgtgaattcataggaatgctattgcaagtactcatactcttggtttaaagaaatgcctaatcatgttcgctttgattcaattttataaattgtgatgcagactcttcattcgtgcccgtatttgtctatgccatatttggctcatcccgtcag

SEQ ID NO: 9766 - DNA, 1646 bp, Arabidopsis thaliana landsberg
agtcatgaatcacagataccaaattttctctgaaattacgaacaataacaagaaactcaccatgaatccatttccgaatcgcgaaaccctaaatcgcaaaaatatccaaaatttggggtttatgagtcgctccaccgataataaaccctgatgaattttgattatgattctttttttttttccaaaagagacaggtgcctaacgggcctgactcggcccatatagtatcacggcaggcggatttggacaatatgtttcaagcccaaaacagcatgctttgttctgtagtctcagtctgtatgaatagctctctctcttcaatagttttctggattcatcactgaaaaaaaaaaaatgaatcatagaggttccccttgaaggattcattgatttacagggccattaaatagccatagaggttacatagttgttccacaaaattaggaatacatgagataagatttacgaatctatctaagttgttataagagaatattcacagaattatcctatattctatcaccctcccgcagttggagcgtcgggttcccagacggttaaactggaccgaaactcattgaagagtgatgtcgggagaccctttgtaaagaaactcaattgccaaaagttctcgagttcctatctagaacgaacaaacatagttcaatatgtaattttccttgaatatataagaaactcgattgccaaaagtgttagctaaagtccaagttgaaacaagattctgaatttttcaatgatgaaagaaacttaacacagttttgacgtaccattgtaaacttgtagattgcattctttcaagggaaccatatctcatacgtctaaaacacaataagatcaagtaaaggaaaagatagttctgatagatagcctagagatatcgagcaaatgcattgaatgagcacattaataaacaaccaacacattatactatctcaaatgtacctataataacgctaataagcatattaccttgtgagtcaaagagagaaaacttgagtattcactccagaggtcgttagccatagcaaaagctcaaaacaacgttcaacgtcccaagcttcttcagttagaagctagatataaagattttaccaccttggactggatgattatctgattgatgtgtcctaatgatgtaggataggtttccagtgcccctgacaatatattcaagacaatgtaatataaagctcacaaaaaacgtgtacgagtaaagaccaagatcacaaatctgaaatacaaacattccacaaatcagatgaatcatatgatcaaagaatatataaagcaaagacagagcttacatgaggactccacgatctcaggagcaaagaatatataaagcaaagactttattgtaccataagaggattttggtatcagtagctgtaatttcagtactccaatcccaaaatttaaagaataatgtgaaagtaaacactaactgagaaatagaaaaggcttacatgaccaattcaagaattcaggagctgcattatcattcaaatctatatccgaacaaggtcataaagaatttggaatttaacttcagtaatatagctgaaaatggattcaaaacttacaatttcaagaatctatagagagagacaaacagtttggatcga

SEQ ID NO: 9767 - DNA, 1539 bp, Arabidopsis thaliana landsberg
catggaagatcataaacttaggtacctacagagttttattcctagaacagccttaagtttggaagacctggtaagagtcgcaaggacatggcaagaaagggctcgcttttgttacacagaagatgtaagacttagtagcgatgaatatgtgaagatgttaatcgttgatgcgagcttcctagtagaacttcttttgaggtctcagtttgatgtatatagaggtatgctagataggatatatgggaagcaaaagatgattgtcgatgtgaaccatgacgttatgttacttgaaaatcagcttccatattttgttgtcgaggggatgtttggattgctacatgttgactaccatagggaacttccccctctgactcgaatcattcacaaccacttcaagaaattctggatgagcatcccttcattttcgagaagcatttctgattcaaagatctgtcattttgttgaccttctgcgatctattcacctgcctttggttttgagttttcctggaggaagcatgaggatgatggactctgtactgagtgcaaaagagattcaaaatgccggtgttaagctccagcccgcagataacaacacctgcgcacttgacataagctttgcaaacggagtcctcacgattcccaaaatcaagatcaacgacatcacagaatctctgtacagaaacatcatcttgtttgagcaatgtcatcgtttagatgcttacttcattcattatatgaggttcctcagttgcttcataagatctcccatggatgctgagttgttcattgaccacgggatcattgtgaacagatttggaaatgcagaagacgtttcgaggctgttcaatagcatattgaaagagacaagttacagcgggttttactataagacagtctatgggaatctacaagcgcattgcaatgcgccttggaacaagtggaaagcaactctgagacgtgattatttccacaatccttggtcagctgcttctgttgtggctgcctgtgtacttctccttcttactttcgttcaggctatatgctctatattagctttatgacttgtgagacagtaaaggataatcaaatgttgggaaagaggagtgttatatatgcagagaatcttgtaacagaagcaacataagattaccagttatgtgtgtgggtttgttgaatgttgtatgtgaatccagtcgccattagactgagattagggagaaaagaatctgagggatgtgaggaaagcttctaaactcactgagattagggagattagagtctgagggatgtaagcgaagattctaaacccatttgtttttttgtgattcattgatactttcattggttctttgtttttcatcaatacaattgtggataagcaaatatgcatagagtttatatgttgaaagcttatcagtcatttaaaagaaacgaacaacatagttgtgtccactgaactagaacagacattaatttaccccaatagttaaaaagtccaatagaaagaacataaaaacaagagacgatcatttttaag

SEQ ID NO: 9768 - DNA, 1372 bp, Arabidopsis thaliana landsberg
ggtcatgatcatgcaagccacatacccggtggaagaaccggtgcccacccatcccatatggttcacttatcccatggcgcccacccagccccatggcgcccacccagcccatggcacccacccttcccatgttgctcacccatctcatggcgcccacccatcccatggtgctcacccatcgaatggcgccctcccatcccatggtggccacagggccgcattctggttggggtcatggccgagccacattctacggtgacatcaatggaggacaaactcatcttaagcaggtccatacatacttaatatataattcaacaatctcgagacctgtaaaaatgttaagattgttttagacgtatacaaaagccaacatgaagacgtagtaaatgatactcgtgaatctttgacaattaaactaatattgtttgcttatgcatttacataagtaaccataaagtttagaaaagttattgacagaaacgaacttataataattataatttgcaaacgcgaaagtaaacacacgcatgcaaaagaaaaataacgaagccaaataattaggtttttttttacacataatttgttttgtttttgaaagtaatacatactttctttttctatttgatagagggagcttgtggatatggtgatctccacaaacaggatatggtctagagaccgcagcactaagcaccgcactatttaacaacggctcaaggtgtggggcttgttacgagatcatgtgcgaacacgctccacaatggtgtttgccaggttccatcaagatcacagctacaaacttctgtccaccagattttaccaagcccaatgacaattggtgcaacccgccacaaaaacactttgatctctcgcaaccaatgttcctcaaaatagctaaatacaaagctggggttgtccctgttaaatttagacgtgttccttgtgcgaaaatcggaggtgtcaagtttgagatcaagggaaatcctcatttcttaatgatcttaccgtacaatgtaggaggagctggagctgttagggctatgcaaattaagggaacaaggacccagtggattgcaatgaagaagaattggggacagatttggagcactggtgttgtgttgaccggacaatgtttatcgtttaggcttaccacaagtgatggaattacgaaagagtttattgatgttacaccgccggactggaaatgtaatggacagagttttgatggaaagattaatttttagaaaatgaatttgagttttgttagttaatacttgcaagtaactaagaagagaggggttactggtaggtcaattaatttgtaatataaaaatatttgttgttattgggtaacgaattcctgttttga

SEQ ID NO: 9769 - DNA, 515 bp, Arabidopsis thaliana landsberg
  unsure (1)..(515): unsure at all n locations
nnnnnnnnnnnnnnnnnnnnnnnnnnnnnccacgcgtccgcagatcatatcctctgtcttcaattcaagttcaagcaggtattgttcaacaacagggggacgaaatggagtatgctgctgatgataatgaaatggcggaagtagaagatgacatgtatttcagtggtagagtgtttggtgattcagagtccgaatcagacgacgatgatgaatatgactccatggaaaatcggatgacagatacctctgctgcagaagctaggaaaggaaaggatatccaaggtattccttgggatagacttagcattagtcgtgagaagtatagacaaactagactagagcagtacaagaactatgaaaatatacctcattcaggcgaacggtcagaaaaggaatgcacaccaacacatagaggagggaagtattatgatttctggcaaaacactcgatctgtgaaatcaacaatccttcatttccaattgaagaacttggtttgggcaacatcaaagcatgat

SEQ ID NO: 9770 - DNA, 1358 bp, Arabidopsis thaliana landsberg
tcggaaatccattcttcttccttatgttggttttgccgtcttcaaatgtactcctgtttttatgtattgaaagctaaaagctaacagaagtgatggatgagccatagattacagctgcatcatcgtttttcttgacatgtatgaaaattcatctttcctagtgctactccaaattgattataaatctatctaggacatttaggtatatgtttattcactcatatgtgagttttggcatttctgtgactagttattggatatggtactagagcagttgaattgtaatgaatcctttatcggcctggtttctagcccagaacactaattcatcggaccgatgtcgcttggatcacctgaaaaagcagatcttggattcgacactcagttgcacgacgccggttttggttggatccttcatctccaggagaattaaacttaaggaagatctacagctaagaaagtaaaatcccctctaatgctggaagttacggcccctcctatctatccaaagagccgtagaacttggatacacaaaattttcatttgcatcatattccctatagctgatcaaaacaattactttaggctcccaaccgaaggttttaatgaacaaaaggtattgtggtttactcttcttttacctactagactactattgcataaaagaaaagaaaagacctcaattatatgaacctaagtttgcttactaatagtatataaaactaaactttagggacaagatccggaagatacggccacgtctaagttaccacttcgttaataaactaacctaagattggttaataattacccatcaatgggacattgaagactgtaccgcgattcgaactcatccaaaaaaacagattattcttttcatttgcctgtcactcgaagtcaattatttaccaactcttccataagatataatataaaaagaccaatcttagctgtattcccaagttttatattcaagatcaactaattattgcttatgtaatatatatgcaaaagaagagaaggagaaaaagagtattacaaaaatccaaatccccattgttgcaaccatgagttctgtgggtgtatttgataaggtggaaatggatgagaagtcatatttagtatacacattaacacaaacaaaacacccaacctcttccgccgtggagtctagtggtgatgaccttcctctccaacctcttttttcttgtccctatgcacgtatcagatctcataagttcaaagtagagaagaactatgatggtgttaactttttcaactttcatccattcaattcttaccctcactttccaagaacaagaaccagttatcaacaaggcgaatctttacttgattat

SEQ ID NO: 9771 - DNA, 1497 bp, Arabidopsis thaliana landsberg
gaaaacacgaccttattctttctaaactttgaccaaaaccacctatcccacttgtctttgtcttctaaacttttttctctctttcccacccaaaaaagggaaaatgaaatggacaaatggccgttatcacggcttggaaacggagggagcgtctttaacggtgaccaacgatgagccattaccgttagcaactattgtagtggataggttaggagacaaaggaacgccggtatctttaacgaaggggctacgagaaggacacgtggcggtggagatggtggtggctaacgagatgggcatgaggcaaagacctttgccttgtagatattgcatggctgatcccatgtcctcttccattagctttgcaacttggtgctccgtcatcttcgcctcgccggaggaggaggtgttttcgtgggatccaccggcatcctgaaaatgttcaataaaattaaaaagaaaacaagaaaagcaaaaccctaaagctatgatgatgttgaaatgggaggttttggtatttgttggagagaaagtaggcacgcgtgccctgtccttgttttgttttttttactattttttggaaaactttttcatttgtttttagaaagtcgaaaacaaaactactttttaattagtattattccctaactaaaaccttttcaataatttacatctctttttaattagtttaaaaaataaaatctcattctatatagtgatcacgtcatcctatcatcccttttaagagagaaggaattgaaattattacctcagagatttgagaagaagcagaagcagcaccgcccagtctactcatgcttagtacctgcatacataaatttgccaaatattataattaagcaaaagaagaggtagatatacactaacactatgttttaacaaacgcaaaagataaataatttacaagataaaagggagagggagcatatggaattttagttgcagaggcccatattcgatttcttattctaatgtcaactcaaaggtaaagaagcttccactcttataacaaaaacaaatttaaaattctcatatcttataaaataattcgagagagagagagagagagattcaccttgacttggagctgtaagaacttgacataatcgataatctcatcgagcattgatgctttgtctgtctgttaattattatttttaacaataaaaaaaaccttgttagcaattctgcatctgtttattaagtattattatcaattaaattttagaattaattagctaatcagtgtttaatcatttgactgcataaaagtccaaatctctagataacctactaaactagtagcaatttgtggtccaagactaaaatacatcagtgtaactcatataattaacacattattcattttgagatatatactattaaagaaatgtaaaatacaaattggattatttgaatctactcttttaattatatcaactttgatgatcgaaatttagactaatgaaaaataat

SEQ ID NO: 9772 - DNA, 1668 bp, Arabidopsis thaliana landsberg
  unsure (1)..(1668): unsure at all n locations
acaagcaatcaggaggtaaaaagtaacacaagggttanattttttacttcttacaccaatatagaacagtacaatcagagattagtagcactaatctatatagcaatttccttgagacaacataagccactccccatttgatcaatccctctgaccataatgtctctgcaattgcttcccacaattccggtggtatcgtctgaagaaaggctgattccaccagaggcaatgaaaaacaagcgaaacacattacatcagagacaagaacaaccacttgatgaagggtctttgatttagaaaaagaaggaattagcctacttcagtgtcattgtcaactacatatccatcatcaaaatgttggggagtttgattcgatgttcctggaagaagtgctaaagactttttcgtcaggagaaaaatcccccaaaggaagttatttgttttcttctgcatcttgatgataactgcaaacacaaaacgagttttattcatatttttgaagccaatgatagatctgtaagcatacattaggcttactctgggaggacttgtccagtagttttgaagagaatatcaacaatggtgtgccattgatgttaaatttcatcatggcattgcgaatcctcatggcctcaaagatatgatcacgttccgctgtaaacctgcaatcgtcgtaaattttgtgataacaatgaacaagaagcttttcctttgtagccatagtggcttgattacctttttgtgttcttgtcatctggcaaaatgtacatctcgacatctgaaagccctggttttctgttcataaacaaaccactcagaagattgcctataggaaccaatttgaccttgagtaagacaggaatagcttttgaaagtatataagccttccctcggactttagatgccggttgagctaagaactcgccattaaactcagatggtgtagcagaatccactatgcgtcccctggtatagaggcagaaagaggaagatataaaatatgcacatcttcagtttcaggtttttcagcaatgcaacaaagcctaatgctaaagaaactaaggaaatttcctttttaagaacgcagataaggctaagcacaaacatatatcatgaaattagtaggagtactatagagtggtctgaccgaagcatacaaaatttgaaagcaacaaagatatattgtttggggggatcaggaactcacttccaaatggggtgcaaagctggtcgatatggaagtaattgcaacaatttctctgataaaattgatcggcatatctcgttggaatcatgatatttagctccatcgccaactttagattttgacccttgaaaagccaataaaaaactcagcaagatatgtttttagtcatctagtaaaagaagtttgggatcttaggcctttagaaacgaaatagattaagaaaacggagagagaagcaaaagattccaccttctcctactgcttgtgctttagaagcttgtctcatgacccctggacgaatctgttgagtacgaggactaagaggctcaacctttttaggtggaaggtaaattgatttggttttgcgagccaccactgtagaatttagactcctagctcttggaaagccagcagttggttttgttaaacccattggaggacgagctgaaacaggtcttggt

SEQ ID NO: 9773 - DNA, 1007 bp, Arabidopsis thaliana landsberg
cgcacggtttgtgatttcaatcatttctcaatctttcagcagaacaaaaaaaagttcagatcttattgcaacttcctcaatttgcgtttttgaatcatctctcaatctttgtttctcaaagtgtaaagatcaaatttatgttttgcaggttgaggcgaagaaggctgtgcctcgagatgatcagcaggtgctaaagcgacacgctagtcctatccaccttatgtcacctgtccatggtggtggtggaaggacaaagaagatcttcgttggaggtttaccgtctagcattaccgaggaggagttcaagaactactttgatcagtttggtactattgctgatgttgttgtaatgtatgatcataacacgcagaggccaagaggttttggcttcatcacatttgattcagatgatgctgttgatagagttcttcacaagaccttccatgagctcaatgggaaactagttgaggtcaaaagagctgtacctaaggagatttcccctgtttctaatatccgaagcccgcttgctagcggtgttaactatggaggcgggtctaataggatgcctgctaatagctactttaacaactttgctcctggtcctggtttttataacagtctaggtcctgttggtcgtcggtttagtcctgttattggtagtggtagaaatgcggtttctgcttttggcctcggtttgaatcatgacttgagtttgaatttgaatccaagctgcgatgggacaagttctacgtttggttataaccgtattccaagcaacccttacttcaacggtgcttccccgaaccgttacacctctccaatcggacacaatagaactgagtctccttacaattcgaacaatagagacttatggggaaacagaaccgacactgcaggtcccggttggaacttgaatgtctcgaatggaaacaacagaggaaattggggacttccttcttcttctgctgttagtaatgataacaatggctttggaggaactatgggac

SEQ ID NO: 9774 - DNA, 500 bp, Arabidopsis thaliana landsberg
  unsure (1)..(500): unsure at all n locations
nnnnnnnnnnnnnnnnnnnnnnnnnnnccacgcgtccggccatacatcaaatggggtgcctctatagccggggaaggcttctaagttgaaggttgcttcctactcctactgctctggtcaatcaaaaattcccgtgatttttaactttattattattattttaaaattacacaaatataaaataaaaacagcaaatttagacatcgctcttctctctctctaaaaatctccggcggtccttcagtccattttcctttccatttcggatctgataggaatagatttcgtcagtgttgaaatcactagaaattcatggctgctccaccggcaagagctcgtgcggattacgattatctcataaaacttctcttgattggcgatagtggtgtctgaaagagttgccttcttctacgattctctgaaggctctttcacacctagtttcatcacatctttaggcatttgattttaagatacgaaccattgagcaggatggaaaac

SEQ ID NO: 9775 - DNA, 1123 bp, Arabidopsis thaliana landsberg
tagtataaagcaaatcttattctcatgatcgtagattgctaagaataggtttaatcttggtttttatttggtacataatgctgggagggatgatttttttggacaaaccgcataaatccgttttggtatgttctgttttggctgaaaatggtcaaagaagagtcacggatggttattaaggagagaacaaaagcgacttctcatagaatcttaccgttggaaaatacaacaaaacgtcacctaaatgataaaagacaaataaagaatttaaagtaccaaaagactcaaagatatgaccactttcatttgtttcacccatttagcataacaacatcaacatgcaacatttgattaatgtgaaattaacaaaccaagagttttggaatttgttttttctcctacttatgtgtgccaaataaatgaacttctatcatattatagtacttaagaatggtattatattgaatagaccaaaaatgaaatagaagacaagaaagatgatcattttatatgttagtaaaggctacacagatgcattttaaagcataaacacacttggaaacaataggaaactacaagtgagaacaagttaaaagtcttccaccgatctctgcagttgcattaataaaaacattcagtaaccgagaacgcttttttcttatttcttctagctaaaagtattctcagaagaccattgtactctaaaacccacttaactctctctctttctctttcccctttcttcttctgagatacgcttctctactccactgccatggagctctaatgggtctctgcaattttcattcttttcctcttttcttctgagaatttcagctcaagaaccatggatgagtcttctcttgttcgttttgtgttccttctctgtttggtttcgtcgtctgtgttctgtttggctgagtctgaccaaaacgcaaccgtttcttctgctgtttacattgttactctcaaggaccgtccatctgttcatttctccggcagagaatcgagtgactctaaacacagccttaccgctacttcgtcccaaatttacagaacattgtatgtagaaaaaagttaccattctttctttttgttcttcaaagtttcaatctttatccag

SEQ ID NO: 9776 - DNA, 2130 bp, Arabidopsis thaliana landsberg
cagaggaccgtaattcctcagatctatcaaggaataacgttaacctatcagcaaccagtggattctcaactgatgctagtctttcacaaccatatacgtttaggtactcaagacattttggaagcgaaggaagatatctgagattctcgcagttcttcatgacaagacatttcagattagagaaatctttgagattatcttgtagattgaccattgcaatatttctacttaagcacaaacactttagcgactttatcttcgggatctttctgattcttgtgccgtcaagcaataagagccgtagatgtttcatgtcttttacgtccgttggaacgctctcgagctttgaacatccagagagtaccagttcttgaagagctttctgttttccaagacgtttgggaagactctccagttctgtacagccttccatatttaagacgacaagtctcgtcagatccccggccgctggaggaagtccctttattgcagttccatctaaatataattcttccagattttccgaaatcacctcaaattcctcaagttttgagcagtcactgagtatgagaattttcagagagctcactttaatactttgaagacatgtgagactagtgcaacgtctcatgttcaggaagacaagacttttcatgttctccatctcttggggcagtttaagcaaacttgtgcaaccttcaagattcaatctttcaagatttttagcatttgacaaccctaaaaggttagtcaacttacttgaatagcttagattggcccactttagtatcggggtatcctgtaaagaagaagaagacaaagaatttaacactgaatttgatgaatgcttcatataagaattgtggatcgtacagtgagacacaccttaacaccctcccaaactttcttaatggagctataaggcagttcaagatcaacgagattctccgggttgaagtctgatggaagtttctcccatggatatttcatccagtggagatagcgtaccttgtctaatggtaactgaatttccctaactgtgtcaaatttgaagataccttcgccttccttatggcaaacagaactgtatattttgagatatcgaagattgcacatattgctaaagatgttaccatcaaatgtcatttcctccggaactttagacatgtctaagaaaatacctctgacattttccatttcctacaaccaataattaatgataaaacgtaagcaaaccgcagaaacaaaatagttagcaattgaaaaatgaaaatataatacaactaacacacgttagaggttctaatatgttcaaataatctcaccaattcattgttgagaaaccacatgatatcttgatagttccacagcctgagatgaacccttgtatcttcagtcaatgcttgtgaagcaagttccttggcgaatgtgcatagtatatcatgcatctcaactcgaccaccagaaatattgacaagaaactttcctttgagatctgttatttcatcccaactcttagtagactcagaatcacatgaattcaccacgtgtcgtacataactttcattctctgatttgaagaaacatgcgacgtcaagaaaaatatctttctgcctctctgtgagttcatcataccttcttctcaagacatcttggatcatcttattggaaattagtgtcaatgtttttattctcttttcccaatcagccttgtctttcccacaaagttctacaccaaaagctccgagggctagtgggttgcctttggcataattcagaaagtgtttggacaactttaccaagtttccctgggcatcatccaaaccaaatgcatgattagtaaaccacagtagactgtctctgctgttcaaacttgggactacataagtatctttaacgaaacccttgagcattgactcatcacttgacgtaataacaatcttgcttccatttttaatccaattccatttaccaaaaagagtttcgatctgttcctcgctactaacattatctatgacaagaaaaactttctttaggagaagaacatccttacaaaactcatgttcattcgttgtaaatcaaatgttgagattagtatccttcaacagctcttccaataatgtcttgtgc

SEQ ID NO: 9777 - DNA, 1664 bp, Arabidopsis thaliana landsberg
cttttgagattttctcagtctttcttcctcttcttcattaactcggctattctgttggatatgcagtaagcagtggactgaccggtgatcatgggattaacaccaagagctgtaggcagaacacttgcatcacagacatacaaatcttctgcctcccagctctctccttttccatcaatggctccttccttttctgtggcacccatacggcaacatcctatttgatgcgctgtaaaggattgagtccaatgcttactcatggacacaactccaggtggcgcgtttacggtatctaaaaatgcctctagatctttctgtttgattccatcacacttcattctctgcccgtcgctcctgtatgtgcctacctccgctgctcctgctgctactaggatcctcagtgcttgctttaacccaattgtcagattctcttcgtccgctttggttaatctgtatttgacaatgtctcctttcacctctccaactccttcatctctcaccatggcaaaaatatgagctgttcttgcgtatttggccattctttctttcatgtctgacccagagacccacggggtcagagctgcgaacgtacctggtcctatagcaggagtctccagtgtgatgttaggtgtagtggagtccattggatgcacataatgcaatgaagtgacgatctctccctcatgagccgctccttccaattctgaattcttttctgggaagtagccccaagccatcatgatagggtggatatggagaccgcgactgatgtttgaattcttcaacccgcttgaagccaacaatcctggtgtcttaagcgagccgcaagccacaattgtcactttggcattgatctgaagcttctttctggtttggtgggatagagaggctgcgactcccaaacatctttttcttcgtccgctctcctctcttttgttagcatcgttatccgccaagattagtttctcagccttgcactgtgttaggatcacagcattgttgttaactgcatcaaccagccaggttgaatctgtccctctcttctctccggttgggcatccatacgagcaactaccgcaataatgtttctctgttgaattccttggcactattgtcacatccaaaccaagcttctcgcaacctttccgcagaatctggttctgaaacccttctctgatgattttctcagtgacacctaacctcttgcagacaatacccatcgccgccttatatttctcactagaatatattgaaatccctcgatgtactgaccattcttcgatgatagcatcaggtgtttttaaggacgctgcccagtttaccacagagccaccaccgactgttgatcctgccatgaaccggaacctgccatcatgagtcatcatcaagctattggactcaaacagctcaaacatggaagggccctcgagagctgagtagtctctgggggcaaagtagttccccttctcgataactaccaccctaaggcccgactttgctagaattgcagctgcaacccctccgccacagccagaacccactaccactgcatcacactcgatcttgtaagtgtccctttctctgtcttctgtgactctgaggcccttgttgatcatacgttgcttgatggtcatctcatcttcttggcagtctcgatgatccct

SEQ ID NO: 9778 - DNA, 1735 bp, Arabidopsis thaliana landsberg
  unsure (1)..(1735): unsure at all n locations
ttggtctgtgtagctaaatgtgatcgaatctattaatgtagtgcagattacattatttgttactttatctaaagaaagcaacaattctacaatgaaaatgaatattctctagggctttaaatcattgaatattatttttgtcggagtttcttggtatggaagacaaattattcgacaattctattttcgacgccgatttgatacagtaagcaataagnnnnnnnnnnnnnnnnnnnnnnnnnnncaagtcgcaagaattccacactgacatcaaccaagagtatatttatttcagttgtttacatccaaatttaaattcatgatatttttactaatcctattcctcgccttagaaaacgtagtttatctccgactcgtttcatttttattggatatcttcaaaacaagttttccatgtaaacaatacatgaaatgagtagtctccttttgatgtttgtttcaaataaaagtgaatacaagcacactagtaaaggtagtttaacattagtaagaaaaatacagtagatttggcatttatatattttgatgaacttaaaagatcttatgaaataatatcttttagaccatcttcattggacaacttcatctgagatgtctttaattaattttagtcattaaatattaaattaagaaaatcaaaaccaatcagaatattacacatagttcaagagggtcttcaaagatgtcttcagtgtctggttaaagacatttttgtttctctttcttcatttgtgtctttaattaaatattaaaaaactgggaagacatctccatttatatgctcttagtgccgatacaataaagtaataatgataagtgttgtgtatctgcagttttagtgtcggacggggttggtcaaaagaggcccacgtgagtgacaatgtcacggttttctcaggatcttgtctctcttagattaccaagctcctttcactcatccctcgtctaaacattcgttttctattttgatatcgatcaccataacaaaaatattgaactatgtatatttgttgtcaaatctgaatttcgggtagagaagataatgtggaactaccatgcatatatacatatatactttcaaaaaccaaatttagagaagtctttagttatttgtcgttttagaacaatgtcagtcatcactactattggaccagggaattgaaaacagtagatctaatattgaagcttcttagacataaaaatgtatatatgaaattatatatgttaagaacttaagatagtagaattattattattattttttaaagatgatagaaactaaggtgaaatagtactgtttaagctaagaacgaaaataaaaagggtaaagttaaagagaattacgaagtgagattcttggcaatgatcaaaagcaacatcttgtgttctttctttggcttggggagcgagagattcaattgatcagtcaaagaagcaaactccaactcaaaatatttttaaagcaaaaaaagtacaaaagcgaataaactcaactggatatattacaccaaacactcaattgctacttccttttctttttttcttcttccttttcccaattttgggttatatacttagttcgttcctctcttaaagtagatgatgttttcgccaagacaagaataatagtaaataactaaatatcaagtctttgataagcttaacacgaaagcaagttggcttaaacgtaaggtgatctcttcgaatagttttt

SEQ ID NO: 9779 - DNA, 950 bp, Arabidopsis thaliana landsberg
tacattttttcattttgttacaagtgtttcttcacacaagttctttttttttttttgattagtacacttttcggtttgtgggatacatataatttaataaaagctgtaaccatgcatgcatgccactagttctctctataaatacacaccaccacaagtaacttctcattcaaatcaattctctcttctctccaaagctcatttcttctctatcagcataaagctaccaaattaaacaattctgctttttatagcttagtctttaaagaccaaaactttctcacctaaaagttttcctcaagcattgttatatatcaaacgggttatttgaaagcttgagaatggaaatgaagagggtcatgatgagctctgcagagagatcaaaggagaagaagagatcaataagtagaagattggggaagtatatgaaggaacaaaagggaaggatttacatcatcagaagatgtgtggtcatgctcctttgttcgcatgattgattaaaaaacaaagttttatcaatgccaactctaaatgtattattttatgtatacacgtgtgtgtgtgcatgtgtgaatgtggcttgttacgtgcgggaaagattagtgctagtttggggagaaaaccggttatttatgtttttttttgtgatcttcgaccgaattgtatatataatggcctcaaccggtcgatcgatggttgtttttcttaaaactaatgttactctatgcaatcatttaatactgattcatcatgtgcttaagaattcaaatgtattaatcagcgatgaaagttatccagttatctaatatttggattccaagcttcatattgataattacaagttaccacttaacatggtgaaattataatatccaaagataaagaacaaagggtttttttaactattaaaatggattcacacccagcttttaaattattttttttggtta

SEQ ID NO: 9780 - DNA, 1023 bp, Arabidopsis thaliana landsberg
atcttgcgaactccgctcacatcacaaatcgccacaaccacgaagatccgatccctttcttcaatcaaaccgttgtagtacaacgtagatattgtctataatatgcatgtgcatatgcatgtatatataacacatataagttgtaaattagtcatgccaacaaataagcatgaccacacatcttctgatgatgtaaagccttcccttttgctctttcaagtatcctccaagctttttgttgcatggcgtcttcttcttggtacctttcattatgaaaatctctagagaaagagagtggcagagagaaattgagagagtatttggtgagaaagggagagaaagagatgccttagcacatagagatgttgtgcaaactgagaaagacttaacttatatatactcacatacatgcatatatactatgtaggtaggcaaatatgtatacattatccccatgatagatggaaagaaatataaataagtaacaagaagactttatcccatgctttctctcatcatgcattaaatatcattactttttttattaaaaaagaacttgagatttaaattcgaaactaaaaaatgtctctcttaattaagggtatgccatatcaacatttctaagaagtaacaagattacaaaggaatctaagcaaccccacgcgcattatgttcttttctcttgtaattgatgatttggaagctgtcattttcatcgtgtgttggatccattatgaatgataatagcaacatttctgtagagcatagttaataaaagagcaacatttgattcactaaatagacttgccaatacaatttataatccggtgagctttttaatatgatttcaatttcttggccagtaggagtaaatctgaacattatatattttatatatattcaactacaaattacatatatattatatatactttgaagaaaaaaaaagaagaagctgtcacacatatatacaaaatgaagagacacaaataccccattgtgtgggctggatgttcatttttg

SEQ ID NO: 9781 - DNA, 1381 bp, Arabidopsis thaliana landsberg
ctttatataactttttagccttttcctgcaagagccagaattgaaaaagaagtgtaaccaagagtaatagattgcaatagcatgcacacacaaagatatactttccaatccaacggaaggcagataagctttttcaagacttacaacgacacttcggagtttacttgttcgatggataaccacatgagaaaaataggtagaggaatgattttcaccaaagaacctatcaacagtgtcgctcacactgcttccatctgaagaggggatatttcgaaccaatattgtaaactgttctggcttaggtttagatgaatagaaatgctcaatccttttcaacgcaatatatctgaattcctgtcaaagaaagacaatactaatgacaatatagcaaatactaatgacagtcttctaaagagtcatcactaaagaactttagcattcattacgataaaataatttaagtaaccataagtacaagcccttacaaagtaaagaagacagcaaacaaatacagtcacaagatatatagctccaaagtgaacccatagcctgcaaaaaaaaaacaaaaatatctacatatatacatcatcctagcaacaataataacttcataaatttttgaggttaccattgtgagcggactttgaggtttgcaacagaaaacagatccaaagaattggctgaccattcagcgtaatcaatcactgtaagttgatctccaaagcagttcacaggcaagagaacaataacaccaatgataccagcaaacaagaacactttcaaactaaaagtgatcattctcataaacacaacaccatccaagccagatgattccataagttccttttctgttggtctccatgatttccaaatccatttaagagaaggtatataccttgctactttgttacgtctacgtttatacgtcccattcgcgagtctgcgaggtaaaaaaacctcgtagtttcgtggctgcttcctcagtacagagtaaagaatgaagagtaatacacataggcaagagtttatcccaacagacataagaagtgcagacaaaagcatcttcaatgcttcgaaacctctcagtaacaaaactcagctcaagaactgcataaataaatcaaaatcaataaaaaaaaaactaaagaatctatctacataatctgaattcgaaaacagagatcttaattcacactgatctttacgagacggaggaggatcaaacctgagagactgcgaaatcaaagtcctgtgttttgaaatcttcaacgtcagtgatcggaacaaaacgcaccacgaatcagacaagactaatctgaattcgtattacgatttcaaagtaagattgattgtgaaagcaagagagcagataattttaatt

SEQ ID NO: 9782 - DNA, 1781 bp, Arabidopsis thaliana landsberg
agaaaactactatatattgtgtgtataaccaaatgtcaagggtatgtgatgctgctgcctgtcgcagaccgaaagcgacacaacttaccttttttgataacataccaaactatataattgatcgcgttcattttccgaaaatatatgccgaatgcggcggggctataaataatagtttgatcgatcggcttgtttatcatccatactcaagccctcgaattaacacttctttgtcacatcgtcgatggaacgagtaagagatttggcatcggagaaggcggctgtgatattcacgaagagctcgtgttgcatgtgtcatagcatcaagactctcttctacgaactcggggcgagtcctgccatccatgagcttgacaaggacccgcaaggccctgacatggaacgggccctcttccgggtattcgggtctaaccctgctgtccctgcggttttcgtaggaggaaggtacgtcggctcagctaaagacgtcatctccttccacgtggatggctccctcaagcagatgttaaaggcctctaacgccatatggttgtgactacatatcatcacgcttcttactatcatttattctacacacactagttcatattatgtcatctcgtgaataatacatacatatatttatctaagcttgcatgaatattgaattatacttttagtaaccatatatatagaagattatgcatgctccgatgctcgtggagattaattatcagttgatacggagaaactagactgtaatcaatcatcacgtaaagatttctgttaatatcggaatatcatctggatttagcataatatcttccgattatagaaaaaaatgtacgtagtataatacctaaccgatatacaaatgaatatcgaacgtaactatgctataactagtatatatatgatcgtttttgaatcaaacataaaagagaatctcgctcatgaaaagattactacacccacaaaacaatcgaaaagtaagccaagaatgacgcagcagagttaacatatgcgtgtgattcacgcgtgcgtccggcaagaaagacatttcgagagaagtgaatcaaacattagtgtaagtgtgaaagaagaatatataaaaaagaaagatggaataattttctttggcaagttggtgttggcggaatcaccatgtacgatgcatattgttgatacatatatatacatgtttatcaccgaaaggtccaatctttttcatttatcctcactttgcgcaatgactcaatcaaaggagatatgttgagagaatccgttagattataaattgacaagcctcttttctttttctaggggtattaatcatgctatatttcttgtcacattgatttgaatatcagcagtttaagaaaatcgcttagccaaaagttattaagaaatcgtctgatttctatcattgttgtaatcaatttgataagctagcttcaactttcatatctatgttagtgtttcaaaattactatcatatgcattccgttcatacttatttcatcaattagtccatgcatgcatgtgcttattatttagattaattatatttatgtcactggcaatgcgtatactattattaatccacaaaaaggtgaaactgattacaatttttcgaatcgtattcgtaaattactaatcaacatgttatgacgatcaaaacaactgcagcgttaccgtagaaataaaaatgaattgaataacttagaagtgagagtaatgtttgcaacttgtgcagtcaacagaatataataagagaaaaa

SEQ ID NO: 9783 - DNA, 1248 bp, Arabidopsis thaliana landsberg
cttcgttttttttcctcctttggcctcattagattcctaactaactaaccgatttgttgtccaaactttcctcgatttttatcatttacagttatataaacaaatttaggattataagatgctgtgcttacatttagaaaaaaaaaacataaaatttgaactttttcactttactatttttaaattgtatcacggaatatttgtacacttaatcgaatttgaatgtttgactgtttaagagataaattttgaactttttagctttatatgtaatattatagtttttataagtaatttagtactaaattactttagatttttataattctaattcaattatttgatgtaataatctttttgtctatagtttcgttatatctctcttaattaatcccataagccgtttatcttcattaaccactcatataatcccaaaataatacaacatcttacaattttattggaaacaagatctgttaacagaaaaagaaaaaaagaacagcttcttcctacacagacaaagctactttgaggttaaaagaaaaggaaatgaaacatggatgtggtttagaagaaactaaagagtggcgcctttgaagatgaggaagttgagagtccccaaatgaaaatagatgaaagttcctttagaatgtgtgaagaaacacccaaaattggttcccacgacacattgccatccacttccatatctctcatcgaactcctgatttttaaaaaaaaaaataacaccaacttttatatatgatttttagctagaaaagaacaagaaacaagactactaacctttttgattgtgagcagcgatggatatagaatcaaagacatcaaaaagatcgagagattgagaagcaatcttcattgcttgcatttgcatcttcacaggcatgtctgtctcttccgccttcgctttcccttccaacatctttttactcaaagactcaaaatttctatattgaagcaaaaatagagaagataactcgtaaggagaagataaaaatgaattgtacgtcacgttttggacaggttttagggagagaatctccacatgttctgcctctgtcgttttctcttttcttcctgagtttaaggaactgtattattaccttgcagatatctagataagaaaatcgtgcttattcttcttcgttcttcttatctttaacaaataaaattggtcgacaatttttgaagagagtacatagtaagtctgaagtcagaaatggtcggcta

SEQ ID NO: 9784 - DNA, 436 bp, Arabidopsis thaliana landsberg
  unsure (1)..(436): unsure at all n locations
aagataaccccnnnnnnnnnnnnnnnnnnnnnnnnnnnnnnnnnnccacgcgaccggtcaataccactccccggccagcttcccaagtattctgttgtaattgatgctgtcaagcagacggcggcagctgaagggccaaggggttaatacaagggtatgggagccccacttgccacagtagctgccttcaatgctgtcctgtttacagtaaggggacaaatggaagcattactgaggtcgcatcccggtgctaccctcacaataaatcatcaggttgtttgtggagctggagctggagttgctgatccttttctagcttgcccaactgaattgatcaaatgcatattgtaagcacatagtgtgctagctggcactggaacagctgcagtggcagagaaatatgggggacccatggattgtggtcaggccagttctc

SEQ ID NO: 9785 - DNA, 833 bp, Arabidopsis thaliana landsberg
catatgtatcctcaatcaaacaacaatcgtatttattgggtcacaaactattaaattatatacattaagagattaaataaaagaacaacgacagcagcaacaacaacaacaatggaggcttagcgcatcataagagcaaactcatcaaagcttaaaactccatcagcattgagatcaaaagcactaatcataactctacaatcatcagtggttcttgattctcctagcttctttagcatcatcttcaagcttcttggtgtaatacaatcttcaccttctgcaatatacagtctaaacgctcccttgagctccatcttcttctcttcttcgtcatctactttgattaactgagaaaattcctcaaaatccaacatcccatctccgtccgtatcagacaatctaacagcagctacggcttcttcatcagacaattgttctcccaatgtcatgaaactcttttgaagctcttctggtgagattctaccgtctctgtttgcatccatgtaagaaaaaacagcctctaactctctgttcttgtcctcaccattgctactgttatgttgttgtatctctccggctgaatcttccctctttggtgatagtttccggcaaagtttcttgaaagatgattgaggttgagtattattcttcatgagagaaaaataaatggttaagtgtattttttgtttgtcttgttttacttttgaaatgaaaagtgaatgagaaataggggaaagggcttttatgttttatatataggcgtgtggtcaagttgtgaaaaaggaatgggtattttcttgaatcttgaaaataaattaagctccagtgggttt

SEQ ID NO: 9786 - DNA, 1483 bp, Arabidopsis thaliana landsberg
taaccaaaaaaattctgtctgttttaaagatttcgtcactcttttttcattttttcttacaattatacaatttcacatgggtattatgaaaaaggatacacggtgtgtagtagctacaaaaattagaaagatgaatatatgtcaccaaattaaatcattttatttaaattttccctttagtcaagttgccatataagtatataacgtgtttacatgtgaacaactgaaataggaatcaattctatttttcttcattcgaatttcaaaagtaagtaagtcatccacttcaattcataaccgaaaaataaaagtaaattgatagtacgtaaaagtaaaacattctttaaaaaaaatgagatgtaaaatttcacatacaagatacagtaaagtgaccatgtgaatcttttttgttcataaaaaatcattttggttaatctagaggaacatggtgtgcgaatctatgaccataacttcaaggacacgatgatgagttgtgtttttcgtctttgcttcttggaactttgtgattttttgatctgtgaatcttgtgattagtacgaatcataaagccttgtttggctgtttcccattcacgacaaaatactgactctgtcacttattatttatctctcattatctctttagtttttataaattgtttgctcctactaatcattctttaaatgtaacctggcgattataaaactaaacataagccaacagttataaaacgtgtattaacgacggtaagagattttttgcacccaaaaaaaaaggacggtaagagagacatatagtacaggccaattataaagataggcccaattgagcattcaaagtgttattgggccacactccttccaaatgatgttctttatccgtatgagaaaagaatccacccggaaaaaatctccgacccgactaaagaaatgggatcgtctgcgaatacagagacggcgatgataatcgccacaccggcgtcgaaccataataatccggcaaccaacggcggagatgcgaatcagaatcatacttctggtgcgatactcgctctcacgaattcagaatcggatgcttcgaagaagagaagaatgggggtgcttccgctcgaggttggtactcgcgtgatgtgtcaatggagagacggaaaataccatccggtgaaggttatcgagcgccgaaagaattataatggtggtcacaatgattacgagtactacgttcattacacagagtgtatgtcgtttcctcctttctctatctgaaatttgtgaatctagggtttatagattggagctgacatttcgaagaattgaattagagggctttgcaattcaagttgttttgagtatcacaactcttgtgaaactgcagttaatagaagattggatgaatggattaagcttgaacagcttgaccttgattcagtagagtgtgctttagatgaaaaagttgaagacaaggtattagccatttttctcaa

SEQ ID NO: 9787 - DNA, 1449 bp, Arabidopsis thaliana landsberg
agataataatcctaaatcaaagagaaagaagaagttttacaaataatattttctgtttcaatgtaaacaaaatataagggttggttatatatccttctatttgactatgatatttttacttatggaaattatggaaacaatatttattggaagagtaatagaaagaagaatatgacatatatataactttctgccggatttttctcttttgctttgtattgaaggtttcatgattttttgatttcttagctaaaaataataataatattcaactaaaatatatccttacaattttctaaagaacaaaaaaaaaaaaaaaagaagaagaggagtattccataaacgggacggggtcaagatgacatgttgacatgaacgctagcgtttttaggagatgtacagatgggacacgtgtgcacactggacccgcatactccacacaagcacaagtgtctgcacggtaacagcaacacacacgattcctcctccccacagtttctacacatcctcctcctcctcctctccgccttatcctgcgcctcccttcctaatcctaccctgcgccttaccgtttcttcaccaccaccaccacagctgcttccgcagcacgactccgcatcgtcctcttcgttcatgttattctctaatcctgcgccgcgtgatacgtccttaacctgcgccagaacatgctcgaggttggttcggaggtggttagccgtggcttcgttcgtctgagcaaggtctctccagatttggttctctatagaaagtgacttcactcgctcctcaagcgcgtggttaaccttgccgatcctctctctttcttcttctttgactcgaagccttttaaccagtccttgctctatcgcctccattatcgttctcgcttgtcttttcctcttctcttctatctcatatttcactctctccatctgatataactatgaacatcaaatcagtgacaattgataatacgatgcacattgcaacgaactctgccgttgatgcaaaacttacgtgaagggagacgaatcgatctatttcgtgttgttgttgattcatgtgagaggagatatcaatgtcttggccaagaaacgagaacggagttgttgtagttgttgtagtagcagcgttaacacatgatgatgatctcgggttctgaagaagaagatgatgataatttgatcttgaagaatctcttgagcgttttctcgttggtaaagggaaaaattcacagtcgagattagtagcaccatcggagtagtaaccggcggtggtgggaatagtatcagagccgccgtacatatgaagaagaggaggcgttgctgttgttgttgttgatgtatggtttggaacggagaaaggtgaaacgacgccgtaaccggtttgattgttattgcagaaaccgccactagttggttccatagtgttattattcatcgttaattc

SEQ ID NO: 9788 - DNA, 1232 bp, Arabidopsis thaliana landsberg
tccagcaagatccatggatttacatattttcttgatgtagggttttcaaaagtaaagtatcaaaagacagaaacctaaaagtaccatgaataggagaagaaggtttggatctctgaacaccaaaagcagcaagattacaattagctcttcttccatcaataacaggagctggatctacacaagctttctgagctgcttccggatcacaaaaagtaacctttacaaaaaaaaaacagaacccgtgagcttgaagctataacaaatctccaaagtaaaaagaaacaagaagaagaagaaacttacaaagccatagcctttagatctaccactagatttatcagtgataacgacagcttcaacaatgtccccaaactgttcaaagtaattcctgagagagactttgtgtgtttcccaagctaatcctccaacgaacactttggtaaatgttgtgtcttccatttcagaaacaagggaaaattcaacgaagtaaagtttccggttttgggaacagaagaagcagagagacggtagttgagaaacgagagagagagaagaaggaggagggaagaggattcaaggaaaagtctcaggaaaaaaagagagaatttggggacacactcattgaattatttaacttagcttttcacaaatatcaatgacgtttttttttttttatgtacggtcattgtgtgtttttgtacacttttttcttgttggtcggatccactctgtaaaatagatttacagttggaaaacatttattttagttattgtttaatttttggtttttttattggtggaaaatcataaaattgaaattttttctgtacttttaattctaccataaaaaggatattcaacaaaaaaaaaactttcccttagcaaataactaacagagaaataatatatatatatacaaaaaaaaaaacataatagtcctctaagtttctttgtgattatttgtttttagtccacatatccctctaaataagttgaactactgaatatattttactaaaattggttaaaaaaatgtgtatattaaacctttaattttttattatcttcttaagaatccatattatgattgcacacaagttgtgtaacttatttgtaagacataaaatgattcatgcatatgcatacttcttagaacattacttaatgtctagccaacatatttatatgtaagtcaaataaaatctaaatttgattgatagtacgcaaaatat

SEQ ID NO: 9789 - DNA, 1202 bp, Arabidopsis thaliana landsberg
tcggttgggtcagcctttccctccttgacaacttttccaggaatccccagattggcaagtcatcataatacatctgaaagtagtagtctttcgcaatcacatcacgaaacttagcaacgtcttctctactcaacctcttcctacacgcaacttcagagttcttctcacccaaaaactcaagtttgtaaggtgcactgactaaccgatctccattaagaacttcccctagagcctccttcttctccttaacaggagctgtaaaaaaatatccctcagctatataaacttacaaaaatattcgcctaagaaactaagaaatttcaccatccatacatacctgatgaacagaacggaagatcaaagtatcgatatgtttcactgcaacacataaataaacaaatagttagctcaaactaaaacaacagagttcgtaattcatcgaaaattggattgttttcacttaaatatccaatcatttgatcaattcatgcttaatgtttaaacaatttgaccatggatcaaagatgatctacataagaagcttaaatctacactaaccaccaaccacaatcactaattagacctacgaatttgtcattccaattaatcaaattcaaatttgaatcagaaacacgaaaagcgaagagatcaccatgcaattgaaatcaaaatcagaaaaaaaaaacgtgaaataactgaaaatcgaaagctcagatctgaatagataagcggacagacctgggattatgaaacggtccgactttgttagcgtaaagaggaacatcatcaccgaccttgtaacggtgatcggagccgtcggagataaccggagaaacgccgtagaggaagaggaacaccagaagaagcgacgtcatcgaacgaagaagtaccattacagattagagagaaagagagagagaggtttaagcggttgggtcgatgaagatgattaagatcaaattcatgattatgagtgagtgatgagagactgatttttgttctccgcaatgcaagtcatgtcaattttactttttgttaacgaaaccactttttgtcactttttcattttcccaagttttatttatatattttgttttgaattatcaatagtaaatttttttaattttttttggttaaattgatttatgtataatcgataatgatattctaactatctcacattaggtgttgggattagagga

SEQ ID NO: 9790 - DNA, 961 bp, Arabidopsis thaliana landsberg
  unsure (1)..(961): unsure at all n locations
gactctctctctctctttagtcaaaaatccccaattcgtgaacaaattagggtttttgaagtttgaagaaggagagaaagatgagtgcttcaaggtttatcaagtgtgtcactgtcggcgacggtgctgttggaaagacttgtcttctcatctcctacactagcaacactttccccacggttagctttaaagttctcttcttttactttgatttcgtgaaattttagcttggtgaagttggttttgttgttgaagcttatgagttggatttagtcacaagtatttgttaggttttcttaaagtcttcttctttctgctaccttagtgaatgtactgatgtgatctttaggatttgagagactcagagattcatgtaccgtagcaatgttgttgatctgtttaatgatcttagaaagagtgttaggtaactttctgtaaggagattttgtagctgatgttttagtggaattttctatgtgacaggattatgtgccaactgtgttcgataatttcagtgccaatgtgattgttgatggcaacactatcaacttgggattgtgggatactgcaggcaagttgttaccttggatttttttgtcttttgaatttcctcctcttccagagagtcatttgtgtttttgacttggtgaaacagggcaagaggactacaatagactaagacctttgagctatcgcggtgcagatgtcttcttacttgcattctcacttgtcagcaaagctagctatgaaaatgtttctaaaaaggtttgatctgtggtcttctcctgaaacttctttcctgttttattcagtttacattcagtgattctgatagaatacaattggtatcttgcttttgattcttagtgggttcctgaactgagacattatgnctctggtgttcccatcatcctcgttggaccaagcttggttggttttttcttagctcaactcttaatcg

SEQ ID NO: 9791 - DNA, 1634 bp, Arabidopsis thaliana landsberg
taattatattgattaaatagtagtccaatggtatttttactatatatttataaattaaatattattttctttagtttgttttagtgaccaaaaaaacaatctgagagtggtctccatttgatacgtaatcagttttcttttcgcttgcttgttttatactagtttttagattaattactaatgaaagtttgtcatggttgttgtagacactttatattttgcttttttcagtttgatactcattttagcgagtagataaacaatctcataatggctttattgtttgtttccaactcaatggctccaattgtaaacaatctctccattgttctcttcatcttaatctccttgttcttgccctcatctttctccataatcctaaaatatccggcaatcatcaactttggagactcgaattccgacacgggcaatctcatatctgccgggattgaaaatgttaatcctccctatggccagacttacttcaaccttccttcaggaagatattgtgacggccgtcttattgtagattttctatgtatatatacaaactgatgttgttcctctcattgaaatggttccttcaattcaaagaaattgtttttgatatgtgttttgtgttgtgcagtggatgaaatggacctgccatttttaaatccatatttggattcattaggtttaccaaatttcaaaaaagggtgtaactttgcagcagcaggatccacaattcttcccgcaaacccgacctcggtctctcctttctcctttgatcttcaaatctctcaattcatccggttcaaatctagggccattgaattactttctaaaacaggtgggactaattttaaaaaaaattgttggtgagatgtgattgcgtataatgttatatgatgtagaaatgaagcaatggtttgtttgatgatttttcaggaaggaaatatgaaaagtacttaccaccaattgattattattcaaaaggattatacatgattgacataggccaaaatgatatagctggtgccttctactccaagactcttgaccaagttcttgcctctattccttccattcttgaaacttttgaagctggcctcaaggtatatcaatatttctcgcttttgttttcgccaagggcgtttatttggataaatcggagtggtctcatgcaaatgagaaatttactttggcagaggctttatgaggaaggaggcagaaacatttggatacacaacacagggcctttaggatgtttagctcaaaatattgccaagtttgggacagattcaacaaaacttgatgagtttggttgcgttagttcccataaccaagcagctaagcttttcaatcttcaactccatgctatgtccaacaaatttcaagctcaataccctgatgcaaatgttacttacgttgacatcttctctattaaatctaatctcatcgctaattattcccgatttggtaagcatttcactaaaccacttatcgatcttaaccatcttgagaatgttggttataacaaaattttgaatgttttaggcttcgaaaaaccgttaatggcccgttgtggagtcggaggggcgccataaaataaagatagtcgcattacatgtggccaaactaaagtcttaggt

SEQ ID NO: 9792 - DNA, 1336 bp, Arabidopsis thaliana landsberg
  unsure (1)..(1336): unsure at all n locations
gacgatctgttggagaagcgctcgagcacacgagagccacttttataaccgcctctgcttcttttctatccacttcaggcctcaatctctcatccactacttgcatcaagtgccccgattctacgcactcgttagcctgcagatacatcacaaaaaggtttatcaagaaaaccgttttttggttttaaaagtttataagcaaattgcaacttgggatcagattatagttacaaattctaagaggcaaacggaatctcctgcccccatgaaattactgtnnnnnnnnnnnnnnnnnnnttctagaaccaaaacaccgaagctgtagacatctgctttgaaagttaggtagccccacagtgcgtattctggtgccatatatcctctgcagagaagttcaaatgattcttctggtgaacaaacaaacataatagtaaataatacgattaacagaaaaaaaaaggcaggctcagggctcacatagtcccagcaactttggtgctgatgtgtgttttctcctcttcgtcaagcctagccaatccgaaatcagatatcttgggagttaaatccttgtccaataaaatatttgtggccttgatgtctctatgtacaaacttcaacggtgattcctcatggagaaacgcaagaccctttgcgatcccgcagcaaatcttaaacctagtaggccagtccattggtatctgtttatgctttggacctaaacattgcaacaaaaacacattttacttagagccgaagcatcaaaaagccttcattagcaaaaggtggggaagaagaaaaaaaactcactgaataatgcgctagataaactgttattttccatgtattcgtacaccagtaatagctgagcccgctcgacgcagaaaccatgaagcttgacgagatttggatgttgaagacaagaaattgcgcctatctcgtttagaaattctcggttcccttgtctcgatttagatgagagttgcttaactgctacaactcttccatctgctaacacaccctacaaatgatattttatgtcagcatgaactgcattacaactttaacttcttcgtatataaagaattatttcatctcgtaatctttaccttaaagacagcaccgaaaccaccttctccaatcttgttagttggattgaagtcatccgtagcgaatttgatttgcctcaatgtaaaagttccagaaggcaactcttcttcatacggatctgtgggacaaactaagaatcaataaacaagaaaaaacactttcttccaacttcataaaaagcactcaggtatatatattatcaactcaatatcaaaagtaaaaagaactg

SEQ ID NO: 9793 - DNA, 1087 bp, Arabidopsis thaliana landsberg
ctttagtgaatttgattaacaatctttaaatggtgtaggaatcaaatgaagttagtcaatttaccaattgagctatactgttgattgtcccatatattaacgggcccaacttgaaaaatataaggcccatttaaagtatcgtcaaacactcatttcagtatctctagtcttggtccattcgtataatttttcagtaaattatctaaccctctcgatcctctctcgcctgttgaaaaagcacgacgcaagagcaaaggatcaaaaagggaagacgaaagaagagatggatccagacgcagttgcaaaggctttcgttgagcactactactccaccttcgatgcaaatcgtccaggtttggtttctctataccaagaaggatccatgttgaccttcgaaggccagaagatccagggctctcagaacatcgtcgctaagctcaccggcctccctttccagcagtgtaagcacaacatcaccaccgtcgattgtcagccttctggtcccgccggtggtatgctcgtctttgtctccggcaatcttcagctcgctggtgaacaacacgctctcaagttcagccaggtttttttttgccttatctctttcccttgggtttagatcacttcgatttttagtgtttcctttgtattcctcgctgttgatcatgtacgatagggtttttatccttactgctctgtagattgatgtgtgtattaggtcactaaaagcttcaatgatctggaattgtctcgaaattttagaccctccctgatgcatttagtgatagatctgtgataaggttggagataaaagaggtttcccccaaatgattgcgtagatcagtagatgtaatcttgtgtcatttagattttgtcttgtggagcttctatctccttgcacttcgtgaatgtagtattgggaaactgctttgccatgattctgctagtttttttcaactatgctcatatgtgatcttgttgtagttgtagatatgccaccttcttgattaaattgtctcaactctaaatagtttgagatgcttgcagtgtttgtatcatctgccgtaagacattgttttctctttttagt

SEQ ID NO: 9794 - DNA, 1653 bp, Arabidopsis thaliana landsberg
tggatgctcttgatcatagatataatgtttgaatttaatgtcaggcatcggtggacaggtttatacgatgcacatttatgggacaatagttgcaaaagagaaggccagactcgcaaaggaagacaaggtactatatatataaagctaattttttaattttcatttaccatttattttcaaactaatttaggttttcttttcatgtgtttcatcaaaatttgcacctgatggctctcttttcagtttatctgggtaagttcttgattttaagctataaattaataatagatgactattaaatctattctaagcaaaatataattgttgtgttatctgatcctacaggaggttatgacaaagaagaaaaagcagctagggcttacgatttagccgcactaaagtattggggaaccaccactactactaacttccccgtatgttaattaatcaataatatatacataaattcctaacttctaaccaattttagtctgaataatgccaatctcttaaactagtattatcttactattaactgtcatgtttatattgttacatttgttacaataaaaattagtaatgttggttggatataatattcagatgagtgaatatgagaaagaggtagaagagatgaagcacatgacgaggcaagagtatgttgcctctctgcgcaggtacagaatgaaactcttgaatttattgcattttagaaacccatcacgtatatatttattcaaatatatcgtaacattgaataaatcattatttggaaagatataagaaacatgtaaatatgcaggaaaagtagtggtttctctcgtggtgcatcgatttatcgaggagtaacaaggtacgtataatccatctagatatggaacgaatacagtgtttcattattttttttgatgtatatatacataataattgtcatacaatactattaatctaatctaattaatatttcctttaaaatggttccaaaaggcatcaccaacatggaaggtggcaagctaggatcggaagagtcgccggtaacaaagacctctacttgggaactttcggtacatttttcagtcaaatctatgtactataagatattaaatatacacaaatatatctaagtgaatcatacaaattatgtaggcacacaagaagaggctgctgaggcttatgacattgcagccattaaattcagaggattaagcgcagtgactaactttgacatgaacagatacaatgttaaagcaatcctcgagagcccgagtctacctattggtagttctgcgaaacgtctcaaggacgttaacaatccggttccagctatgatgattagtaataacgtttcagagagtgcaaataatgttagcggttggcaaaacactgcgtttcagcatcagggaatggatttgagcttattgcagcaacagcaggagaggtacgttggttattacaatggaggaaacttgtctaccgagagtactagggtttgtttcaaacaagaggaggaacaacaacacttcttgagaaactcgccgagtcacatgactaatgttgatcatcatagctctacctctgatgattctgttaccgtttgtggaaatgttgttagttatggtggttatcaaggattcgcaatccctgttggaacat

SEQ ID NO: 9795 - DNA, 2061 bp, Arabidopsis thaliana landsberg
agttttattgtgagagaaaactctgattgaaaagcaattaatctgattcggaaatgagaaaaagaaaaaatttgtctgttgttgtattgtccaaggtaatgtggtttaagaacactttcaattaaaagtatcagagaagtttggtttttattaatacagaacttgcatgaacgaagatagtgttttatcttgtgtgtatctatatagtctatacaaatacctctcttagtaaaacagatctcttctatttttgatctagtgtccaacattacttggttttgtgagtttgtaatctaacatgtatgtttttttactgatacagaacttgcgaggaagaagaaagtgaagaggagcaatacagaaatagaagctgatgcttcttcctccgacaactcttgttttgtggcccttgtcacggcttcgaatctacgcaaagatgctctggtgcttatactctttattgcatactgtggtttaatcactcactataccaatatatatgctaccaattgtggttctaatcactaactcaatgaaatgctgtttctaaagttgcgtacttggtttagatcctattgtggttcagtttgggagagaacttgttgaaataaaatcaaaaggttaactacaatatggttttggttcactttgatcaaacatctacttaggtaactgtatgtattttctcaaatttatactctaactttagtttggttttcatttcgattctgtttggtggtttggacttccttatttcatgtatccttttggtgtggttaccattggtgttgtgagactaaagaaagtgaattctcacgtctgctacacttatgtttagtattgtgttgaaaaggcctgaatcctttggttacagtatcttccacaagatttaacaagttcagttggtcatgaaagcaaataccgggagattgttgtatcagatgaaagggaaagaagatcatgggcgttggatctgaggttcaacaaatcatttgatactttctacataagccgaggttggaggagtttctgtgatgaaaacggtaaaaagccaggaggtgtctttgttttcaaactagttggaaacagggaaactccggtgcttagtttctgttccactgaatctatcaacgatggaacacaaggacataagatcaacaaatacaattgtatggagctgaagagcaagaagaagcgtatgagatgtagagattcaacttcaccaagccaaaaccggtttatgacattaacacttactcatgacaacctcataaaaagtagacgggtgagttcaaacaactcttgttctgagggttagttagttttatcgcttgcactctaatttgttatattctcctttaaaatattttccagcaacttcctttgccatttatgagagaaaatggcttggtcaaacctgggattataaatttgttgggtaaagatggtacaaagtgggaggtaaatcttcgacgggaagccaacggaaccatgtatttgggaaaaggctggaaagatttcactatagctaacggcttaaagaccggcgaatctttcacgtgggaggcagttttggagaatggaactcgtatgctcagtttggtcagtacacagtccacaagtgatagaaaccagaaagaagtggtttgcatatctactgtcaaaaagtggatttgtggcactgggatctggttggaaaggtttctgtgaagctaatggcgttaagacaggagaatcattcaatttggaatatattgatgaacaagacacaactcctgtgtttaagttctgttccaactccgtagagtatgtaaagttcacaagccttccttaaaaactaaaggcctttttgttagttaagtttaaattattatgattatgaacttgctattttgaatgaaccatctttaaagagtttctcttagaatataatgacaacttattgtggattgaaataaggttaacagagttgattgaaatctaaataagctaatgcaatagattcttgactaaaaatcctaaatgaaaacaccacacattaaaaaaaaaaaaaagggtcct

SEQ ID NO: 9796 - DNA, 1652 bp, Arabidopsis thaliana landsberg
tgttatctaaggttagctggcaaattcttacctctcccaattgcctcctagcaaaaatcgtattgggaaagtattgtagtgcctctagttttccggattgctaagcaactggctcagcctctcatggttggagaggaatcctaataggccgcgatctcctaaaaacacatctgggaaagtccattggctcagggaaggatactttcgtgtggtctgaaccatgaatatctttcgcaaccccataacacctatgggaccccctgctgaacaagcacaattcatgaaggtttcagagctaatatgtcctaatacaaattcgtggaatagagaaaaacaaggctagatcttacctgcttatgaacaagacatcctcgcgctcagaacaagcaagctaggtgctccagatcaacatgtctggctcctgaccaagaccggcgagtatagtgctaaaacagggtaccttgctgccaattccagacacaaccagactaaagttcctccaggattgttagcaggcttcaattggaataaagatatctggaataaacaatgttcccctaagatcaaattctttctatggaaagcgatgaaaaacgccctccctgtgggcgaaaacctaaaagcaagagaaatcaaacctgatgcagtctgccctcattgtgatggagaggaaacctgtttacacactttgttccattgcccttttgcccagcaggtgtaggatcaagcacctttcaaatcctcttcctcaccaacccggatcttaaccttaagaactgagtttgaagcctctaatcttctgacttgtttcccaccggttggaattggacatggcgagctgtttccttggattctatgggcgatctggactaatagaaacaagaaactctttgagcagaaacaacaatcaagctcggagattctatcccaagcaattggcaatgcaaaagaatggatagatgctcaatcgtagcaaccaaaagtgcagagattaccttcgttacaattgggacaggttatccggctcaacaccatccaatgttttacagatgcggcgtggcgagctgattcaaaagatgcaggattcggctggatctttgtagatcacaatgctcagactgaaacttcaaacagatcctcggcgaggaccatcacatctcctcaaatggcggaagctgttgttctcctccttacgatttaaaacgcgctggatcatgtattcacaaacctctcaaaagcttcagactctcaacagttagtcaaagctcttcaagggaagccccaaccaaaggagcttcgaggaattcttcacgatatcctcaatctctctcttaatttttcggaaattagcttcaatttcagtttgcgtgaaaccgatgctttatccaaggcagctttaagttcaattactcctgtaccggtttaccattaatgaaattcaaggtttttgacaacaaaaaaaaaagaaaaaaaaaagaggtggttaagtccttttgttccattgtacatatgtcattttcatatcatttttcttcaggacattgttcggtggtataataagttacttcaacgtcaagatgacaaagaagagtttgagaaggccatgcattttttaagcttcatagtagaggaaatatttgatttagattctg

SEQ ID NO: 9797 - DNA, 814 bp, Arabidopsis thaliana landsberg
cgtgtcagtctagagactgtttgtcgtttctcacctgacaccgccatgctctcaccttcatttactttatgaaagcttcgcttcattaaacatctaaaaaccctagaaccagagagagacagagagagattgagagatctcaaaaagcaaaagaaaaaaaccctaaccgaaatcttcggccgccgaatcatcatcaggcctatccgccgccgagtcagaatcaacatccctaccagcccccgaatgatcacgcctatcacgcccatagctccggcgcctcacgctcatagtaacgatctttaaacccaaagtttacaattacttcaccatttcttaaaaatcttagatttttctccactgatatgcatacatttctggttttttggtgtatatgtgtagatggtttttacgctatgaacaatccgtaccaagcgaacggaccaaaagggtttgctgagttcaagtatctggaagatacccatgatctattcgtgaggcttgatttgcctggagtcaagaaagagactgtggttacccacttacccttctcgaaccatccaaaaaagctgttactgtgaccggagacgcagctaagagcagcaaacacgatgcttctaaccgcaagtatggaacctccgtgggactactctgtgactgctgtgtaatcagtaacaacattcataactttgttgaagatggtggtgttagactcatcctctccaagaagaagatctatcctcatgctcccaaattctgcccttgtaagttcattttttaaaatgggtaaaaatacttgtgaccttgtgaaagatca

SEQ ID NO: 9798 - DNA, 1720 bp, Arabidopsis thaliana landsberg
catataacattttagtaaagtaacatatatttgatgtttttcactaagcaattctctttacataaccacaggcagcttatgatattggaggctatagaataaacccttatatcatccaaagctcaatcttaggaatcagacctcattacacatcaccatcacctgtaaaccatttcatcttactttcctttttttgcttcattctcactttcacttttcaccacatagtaaatgcgtaatttacattttgcagttactccaaactctgttttccccttcaagaaagtcgaaaacttgcagtgttagacacatttacgcattggaataccccgaggctttagctcatttcgctatttcttcaggggcattcactgatcctacagtaacaactataaaccatttcaactctaaatgatttcagttatactcctagattggaattaactgtataacattattggttaggttcgagtttacaccgcggatagaatcttccgggatctaagacaagcgaaacaagagtatatcagaagtaatgttcgtgtttacaaagggacaaagattttgttgccaaagatctttcaacattatgttaaagacatgtcaatggatgtgtctaagctcatggaagcaacatctcaatgtttaccagaagatgcaaggaaaattgctgagaaatgtttgaaagagaagaagagtaagaattttgaatggttaccggaaaatttgagcttccggtatgttatcgccggagaattggtcggagcaagaaataagacgtgaagggtttattcaagaaaagtgttttttttttgcctcctgatgtgattaaataatctgattacaattagtgttcaatttcattttttttttcaagtgagaaattgtaaaaccagtgtttgtttgtataatcttaataaaccgagaactactaaatactaattaaggttttaaaccgtgtaacgaaaataactgggagtaaaccgatcgagcaaaccgggtcttaaagcgaagatacttgggcctgggcctaatattcattccactaatccagggtttaataagtaatgtatcaaaacacatggcgtaattttgattttgataatactacaagggcctaataaataatttggtttttgtatcttgacgccgatgatttgttttccggtgagaggaaagttagggtttgagtaagagatagagtaaacaagaaggaagaaattcacatgtttaatctttcccttcttaattatcttcacttcagattgaatattattctttcctggtttccaaatcttcgatctttcacactaaatttgttctaaaacattgaggaagacgacggtgaggatggaattagagcagcttaagaagtctgtagaagagaacccagatgactcttctctacaattcgaactcgtaagttgttttccgaccataaatttagttcctttactattggttctcttggtatcttctgctaatggaattttttttggaactttgattttgattgcagggtttgtatctgtgggataatggtggagattcagagaaagcggcggagcattttgtgttgtcggcgaaatcagatccgaataatgcagtggcgcttaagtatttagggcattactactcgcgtgtaacgctttgatcctaatcgaactgctaagtgttatcagagagcagagttgataaaccctactgattctgattctgg

SEQ ID NO: 9799 - DNA, 635 bp, Arabidopsis thaliana landsberg
tggtaatactggtgtcaatcctggtaagtggcagtttcgaaactttcgtatacactaggaacttatgttctcaatgtttcttattacatttgtaaatgtttgttgtagatgatgaagaatctgggcaatgctttcttactggtttggtgataagaaacctaagcattaggtaagcattttccttgatgtgtctttccattatcctccattttaatgtccctgacttcttgaattgtgaaatgttcagtacctcaaactggagatgcacgaagacacttgctgattatctaaccgaaagggacatcatgggagtttgtaagttccttgtattcaacatactatttagattgtgcatgagataaagttgcatttgaaaacatctctgattactctattttgggatgtttttgtaaacactatcagatgatcttgacactcgagcaataacccgtcggttaagagaagatggtagtcttatcggggtgttgagcacagaacagtccaaaacagatgatgaacttctgcaaatgtctcgttcatgggatatcgtaggtcagatttctcctgccatttcctgtttttggcaattataatataacacttggaatattgaactccttctgtctgcttttttg

SEQ ID NO: 9800 - DNA, 509 bp, Arabidopsis thaliana landsberg
actgcccagcataactaggatcagttaaaatttcttgataccttccaaaaacattcaaaatctaagattcagtaagctaaaatcaacaatctttgaggtgatataatgaaatcaaagaacaaaacataccctgtcaaggaagtgttaaacaccaattcagcaatacgggttccaggagcaccaaaagacttagcaggccagatagaaccatcttctaacacaagcctagcattgtacgaagtccaaggtttctccacaacacctacgatgtgcaaaaatcaaaactttcactaaaaggttttggcactaattcttaagacagagactttctcgatcaaacgaaaaatccaagctttaccctttattcaagaactaaaacccaatggagacaatacacaatttcatcaattttgaaacggaaatgaaggcaaaatttaccagaagtgggaaaaatgagtggagaagtggagcaacggatgacagaaaccctaaatccaccaccgcgacgg

SEQ ID NO: 9801 - DNA, 1565 bp, Arabidopsis thaliana landsberg
agacgtttactgtttaataatgctatgaatattcatagtattaattaggagaacaatcatcgacattgaaaatgatattttggatgtattagcaacataacggaaatgagagacacctcgtgagtttgggagaaaacggaacgcatgacagagataacatcggtagagtctgtgaaatgtttaagtccgaaaatacccttaagctgttgcagactcaccaccgtcgctgctcctcccatgaatcctactatcgttgcatgcgatagaaagtccactatgaaccctaacctgcaattcccttttcatcatttctttcttctcttaattttatttttaaagctactaaacaatcaatttatcagtttgcactattaaactcacatcatcatcaaactcaccaaccttagttaataccttatgcttcaatccagttctggctagatataccgaaattttgtggaaccaaaataaaagattctacctataatatactatatatatctctcttgtgcttttgaatcaatcacactatgattatgatacggggaatcaaaataaacttggccagatatgtattaaattatacccaacttaccagtaaagtaattacattattctagtatgattctccactgttacatgtagtatatatgtattaaaccgagcataccacggtgtgattttctaatagttatctagctttgtccctattggtttgttgtctcagctcttgtatcttgtttcacgtgacgtaactcgcgatgacgcatttcactctcatatagtacatagtacatagtgcttatgaatttttagatcttaagaatcaaggtaaggaaaaagttactatttggttgatattttttatgccggaatcttttcccacatgcattggaccgaatatattactcacacttttatcataagtaaaaccatattaaaaggacaaaaataattaaggagaaataaagtaaaaaagaacctgaaaattccaagagaggcttcgagaacgccggcgaaaaaagtggcggtgaaagcaaggtgaaggtaaagcttaggatctttctcagcatcaacttctttgctcagcatcgcacctgtcaacagagacgcaaccgcaaccgttcccaccgctaagtcccttgaactccctagcaccgcgtataccaatggcggtacaaaactcgaatctaaacgcaaaaaaacagttacaataagtacaaacgctacttcaaaaaatagtgtatatacacacacaaaaaacccgttaattgttaaggaagctacttaaaataaaagatgtgtagcgcttacaaaggccaagaattgggggcaagttagcaagtttggcgtaactgatgccctgagggatggcgagactagcgatggtgattccggcgatgagatctgatttgacgaacttgagattgtagcgtggtgcccattccaaaatcggtaggaagtatctgaggcctaacacaaatgatcttgatgcattttggttcttaaattgtctaaaagggtcgtctggaaacagaggatccttcactgagtactgaagcgac

SEQ ID NO: 9802 - DNA, 1209 bp, Arabidopsis thaliana landsberg
  unsure (1)..(1209): unsure at all n locations
ttctggagatgagtgaaaacacacagatcagatttcagccaaacatgtcaaaaagattagaaattttttcgacaagttccaaataaaagtagatgaaactgaaaccatataagatccatacctgtagtgatgagacttcagtctgcaaggaagcaatcttgtcttccctttctttgagtagtttctccttctctgctactacctcgtctttgccctgaacttcccgggttttctcatcgatttgagattcttcaaaacaaaacaaaaacaaaacataaagctcaaaccccaaaatttgcattcaccaaataatcaagctataacaagctcgaatcagaacggataaggcatttcacaaattccacaaaaccatagcaagcaattcgacattgggaacaagttaatacgattcatatctgaaatcgatccaaaagctactaatttaagtcaatgctataagaacagagaaacacatcaagtagctgaaacggtaatnnnnnnnnnnnnnnnnnnnnnnnatgcgaactctgcagattccgatttcaaatacgaatcaaagtcgaataaaaatcaaaacttcgcaatcattcgatcagatggaagagtctgaacaatgcaagtcggtaactaacctagggcacggatcttggcattaagctgatccaggtggatcttggaagagccatcggatccggcagcctcagaaacctccggctcatcagcatcggcgaagacgctggtggtgaaaagcaaggcaagaagtaacaaagcgacgagcttcgcagccgccatgtctaagattcaccaccgtcgatcaacaaaaagggacggagattccaacgaacaagagaaacgtttcctctctgctctctcacgatctctctgtatatttatgaaggtgtgtttttgaccatggaccgtagaaatttcttaaccagtaggaaaaaaagaaacagcgtgccaagacgagagagagagagagatagatggtactaaacgtgaggtaaatggcttcgtgggtatgcgtgaccgacgatgacacgcggcatccatcggatccacttttgtattttcacattaatgacgtggcgtaaatccaatggttgatcctttttgggtaaaatatgacaaccaattaaccagtcgatattattattattgtcctttttcgaaagcaattcaatcagatcatcaaattaatgacattca

SEQ ID NO: 9803 - DNA, 1062 bp, Arabidopsis thaliana landsberg
acctcaaacctgagattcctcattccttaaacccctaaacctccaaaattctctgaaccttctcaaagattacaaaaatggaggtcgaaggcaaaggaggagaagctggaaccaccaccacaaccgcacctcggaggttcgcacttccggtggacgcggagaacaaagcaacaactttccgactattctcagtcgctaaacctcacatgagagctttccatctctcatggtttcaattcttttgctgcttcgtctccactttcgcagctccgcctctcctccctgttatccgtgaaaatcttaacctcaccgccaccgacatcggaaacgccggaatagcctctgtctccggcgctgttttcgctcgtatcgtcatgggcacggcatgtgatcttttcggtccacgtctagcctccgccgctttgacgctctccaccgctcccgccgtctatttcaccgccgggataaagtctccgatcgggtttatcatggtgagattcttcgccggattctctctcgccactttcgtctcgactcagttctggatgagctccatgttctctggacccgtcgtgggttcggctaacggaatcgccgccgggtggggtaacctcggaggaggcgcgacgcagctgatcatgcccatcgtgttctcgttgattcgtaatatgggagccaccaagttcaccgcgtggaggatcgcttttttcatccccggtctctttcagactctctctgctttcgccgttctcttgttcggtcaggtaacaaaccaatcacactcaccggttcagttattttggttttttcaactaatccggttttgagaatttatcaccaagttattttttgtttgggttaaatttactttctttgtatagtcagtttatcctgttctatataaatgattaaaccgattcgtttaggtgcaaacccggtttattgataccggtttgggtcgtctagtagagtctttagtcggttaatcatggtcgagtttcagtggatatggacaataactgtttaatcatctaagttgtgtctattacaaggaatagtaaa

SEQ ID NO: 9804 - DNA, 890 bp, Arabidopsis thaliana landsberg
tatattctatctgaaccttcacaaagctcacaaaaatggaggtcgaaggcaaaggaggagaagctggaaccaccaccacaaccgcacctcggagattcgcacttccggtgaacgcggaaaacaaagcaacacctgtccgactattttcagtcgctaaacctcacatgagagatttccatgtctcatggtttcaattcttatcaaaagaatctatcgttctttacttatacgtgtcttctcttctctaccaaaatcatacaaacaacatcacttataagaatgtaagaaagatacaataattaaaaaaattaaaaacaacgttaataaataatgttgctactacaataatgaaatttgttggttgtatgatcattggtcgtaatttttgtgtatcgtgtggcttactcatcactccatatctctaaggctttcactagtcaaccacagcttcttctggacaatgaatacaacattgtctgaatcttgatctgaatctgagtctgtcttggtacctacttcttcccaatgcaatgcctttagatacttcttcacaaaatccaccactctttgtttatcccttatgattataaacccgctcgggcgcagtattcgatccatctccagtaacaaatccacttcactacatccttttttcttgatatccgatataatatcccaagcatggaggagatcatatgtccttggatatgtcgagaatgcttcacacctgtggtacattcaaaaacatgctaaaaatttcaaattcggtgtagaaataatgtgtcatttcgaaaatttaagtataaaaactgaccagctatgaaccgcgcccattagacctctgtcatatatcagtttaagcgtgttacgtccgtcctcaggaacaacat

SEQ ID NO: 9805 - DNA, 1375 bp, Arabidopsis thaliana landsberg
gcaaacttgttatgttatctttgttgagaaaatgaatcaagccttgtaaattcattatcattttagtgtttatacaaagtggagttgaaatttcatggctattgagatacttagttcccatatataaaaattttggggaaaacatatgttttcttccaaagattaaatgctttaagatatgactatattgtcaaagcttttaaaaaactgaattcagaccacacgttcatagacgtatttgtttggtataacattcattaatccgaaccaggggcggagacaatgctttattaggagggtcaactgaccctataatttttttaaactcctatgttattagtaataattgaaatgaccccaacctaaaacaatttttgaccccaatacgaaaattaatgttagaacatgaaacaaaaaaaagttcaaatacttgaaatttagtttcctagcatgtattaatctgaaacaaaaggaataataaattattaacatgattaaggtgttcttagttttgcacgtgggggttgtcaaagttgaccaaagcgttctgactgtttctttaatgagaaacaaatcaaataacacggcaacgtcagagtaaaactcgtgtcgtttcgattatacaacgatgaacgttgcgctgttttttgtttctcagacacggtgagaaacacaaaaaccatagacgacgaacgattcctcaaacgcagaagtcttctccttctctcgacggattaagcttttacacagaagaggagagatatggatcagatactgaacaaagttggctcttactggttagggcaaaaggcaaacaaagagttcaattccgtcggtgacgatttcaatgtaatatttacatttttcctttcttttagttatcctcaagactttgctttgtgggttttagtttcctgtttgagaggaaaagcatcaatctttgattaagggtttttaattttgaaggctttttagtctttctaatgcttggtttgtgaacatgtttgtcttattgtctggagttacatggtctagtttaataaaccttgtcctgtttttaacagaaattttataacgttttaccttaattgaatccttcattgatctttagtggagggttcttgagcttgttatagaaagaaagagtggatagagatttgctattagtatggattccattttaactgtttatgctgcaatttgtattttatggtaacatatcatgaaaaagtttattgcttttgatctcctgagacaaaatgttcctgagtctgataatatttggattcaatttttgcagtcattgtctagcagtattgaaggaggtaccaagtggttagtcaacaaactcaaaggtctgtattatgtatttaaa

SEQ ID NO: 9806 - DNA, 1247 bp, Arabidopsis thaliana landsberg
  unsure (1)..(1247): unsure at all n locations
catagttaaaagagagtaactagaagctgaggagtaacaaacagacatggctttttaattttattctaggaatagaagagaaagctcacaaaactttaagacttggtgatttgggtgacgtggacaccaacttgatgaacaaaatctccagctttgccgtggaatccaacgatcttatgatctttcatctccaccgcaaacgttgtgcctgcatcgagcccaaacggtggagacgtacgcttgtttgtcttgaacctaagcatcgtcaccaactcgccttccactccaaatactttatcgtaacttccctccaccgatacaatgtattcatttggagaatcgagcacaaactgccacaaaatacaaagaccagtgaaacttggatctcaagaaaacattattaggtcaatacgagaacagagcacaaaaacctcctctgttccaagaattgacatcttcccatggccaactccagctacaagctccttgcgattagcatactcaaacttaacaaaagacacaccggagtcaccttgtcctacatataccttcctcacatcttcatagaaaccatcatcccacatggctcctccatctccgccttttgcttctagtttcttagccggaacttgtgtggggactggcgctggaaccgnnnnnnnnnnnnnnnnnnnnnnnnnnnnnnntgctccaagtgctctgagagcattgtcactttcactattacgtccacggaatccgacaagcaccgcaaggacgaatttcttactagacacttttccaaatacaggagagattctacactttgatgttttgaaagtaagcgaggttacataaccacaaaaatgtaagttccttccactgatgtaataaattcatttggataatcaaccttaaactcttttggttcttggttcatctttccgtgagaatgccgaacagatgtgcttcctttaacatacttgaacttaacatagcttaggtagctaccatcttgtgtaaccgatattttacttacaccatcgtaaacaccatcatcccaagcatatcctctgtctccaccttgaggttctaactgcttcacaggagaagaaggcgcgagaaaatgagctccaatagcaaacagagcagtaccagaccttccatggaacccggtaagttttgctccacaattaccttccaccacgaaatctgttttaaaaatcgctatctgaccatacatgggaaattttctaccgtgtgatgtc

SEQ ID NO: 9807 - DNA, 1613 bp, Arabidopsis thaliana landsberg
gaaacgattatgaaaacaaaaagaaaaacaatcgttgattgttcttagaatccctaaatcttttgatttccctagaatccaaatttgtgaaactaaaatttgaaaacacattcagattcaacctaatctttgtaggtgtcctcagaataggagggacaaccactcgactctgtacatcccacatatcatcagagaaagaagtttttgttttcttatgacaattctttttagaagagagctcgtggaggaagcctacaagtgttaggtgatacgattcgtggtcattttctccatcccacacgcttgctcgtccgttttttcttgggttagccacgtggcctttcctacttggatttttcatttaagttttgtttgttagttgacttattattctttttcgctatagacatgaaaattgtttggccagtcctaaatctaatataatatttttgaaactttgatatatcatttttgatctaagacacttatgagagagagatatagaaaggggataactcacatgacaacctttcctcttcaatcagtcattccaatttcaaaaaaataaaaagacaaaaataaaaatgttctcaccattgatatctctatataaaataaccaaacaccactttttaatttgttgtatagtgtcaataagagctaaagtccgaagcctagcccagtccaaaaaaaaacaaaaaaaaaagtgttgggttggactatgtttcagactctggtcataattaataattttaacgttgagttatctaataacaattaagtaataatgtttggttctattatatatacataggtacttatcaattgaatcgtgacataacaattttatttctgtctttttatcttctctaaatcaaaatcactgatcgaagaggaaagtttatcttgtgagttttcccttttctatctctctcaatattcttagattgaaaatgatatgtgtcaaaagtttctcaaagtattttattaaatctatatctttgaatctcattataatatagagctttagtcaaaaggttttataaataaagtcatagatataaaatgtatgaaggctatttacatttacaactagacaagctgttatttatttgataattaataatgtgttaagttaaagtgataatattgttggaacaaacattgagtgacatattgggacaaatttgcaatgaactattggttaatgttgaggtgattaaaaaaatttagataaataacaaaaatgtatttttcgatctaataatcaatttatttttatgatgattatagttagtaatactaacctcagtatccgccttcggtttacgcttctctatttcaaagtctacagcttgaatggtatgatagaacgatagtaacgatgaatgatggagttttgtcgttgaatccacaacaatactcaaaccaaaatgtttgaatctcacaaaatatatagaaacgcaatcaaacaagactattagagtcataccaatagattgaactaatagacttcaagagattacacatctttaaaagaaaaacacactttctattacttaacttgagtgactcgaataaagatacaaactaagatgagcttatatagaggc

SEQ ID NO: 9808 - DNA, 1210 bp, Arabidopsis thaliana landsberg
ctgctcctattgcaatcttaagccttatctcccatgagagtggctgaacggcagacccctctgaagtaatagaagcaattacacatcgaaacatcgagatgtaaatgtgcatataagcaaaagattctgattaaagaatgttcttacttcggaagagatgattctctaagctccctttttgcatatactcatacacaagaagcaactcttcaccttccaagcagtatcccaacagcttcacgaggtttggatgagaaaccctcccaagaaaattcacttcacactgcacaacaaccaacaaagaatctatccactcagcaaacaaaacttcactttgtatatcaaagttagaaaactagtttcccattgttcactttactcacttgccattcttcgaatccttggaagctttctgcattcagtttcttaacagcaatcacagttccgttgctttgtttccctggagtcttgtcttcaagccagcctttaaagactttcccaaatcctccctctccaagaacattctcagacctgaaattccttgttgaagctctaagttctgctaagctgaatatcctcaaattcggaatgggaagtatctgaccatcggggtaagcatcttcaccacttgccacagagaacccacttttgctagatatgttacttccccttgatgttcctgtagtcgtcgtgttgtttgatgacttaaaagtccctacttcaattacaaccacaagaaaacaaagtcaagcccaaaacagagagtcacataacagatcacaaacagcattaagtatgataatgaatctgattcaacaaaaacacaagaagaacagagtcttttaatcaaaaggtcaaaactttcatagaacccatacgagataacaccaaaagaagagtcacaaacgatacacaaagatgtaaaagcataacctttatgcatcaaacaaccaagtacagaactcgcaacgtatcacgcaagtttaagccaaactcagatgggaaattccgtagatatagagaggacaaacctgaactgatgttaccagtagaggaaggtgttgttgttggaggagaatcagatggagatccccaacaaagacccatcccaacagagagaaattaaaagccaagcactttttgcttcctttacaaatatataacacgaatatgtatgtcttaaacaattctttgtcaggattttacagaa

SEQ ID NO: 9809 - DNA, 1357 bp, Arabidopsis thaliana landsberg
cttcacggctgttaaaaggcaatcagataaaagacagagacatcctttatcaatgtcatatgttaaagaaggttgctctgttacatggtgatctctatcacttgattcctcctgagaatttaaaccatggtttgattcctcctggctcgagaagagctgaagcgagcgttcatctttcttatctctgtagcttcccttcctcttttgacctttagatttcttttgctttcctactgcccatctggaaggtcctgaatcttctaaatcaaatgaaaaaggatcttgactatcctcgaaggatgcaaagttttcaacttttttacaactggattctctagtttggctagtccttgttttacttgtggaaatgccactacccaatgaggctaatctgcctgcaaacgacccagtgttggaaccagctgtagtcgtcagcgtgcagtgatcaattgtcgacattacacttgattgagacccggctttggtgtcgttgagcaacctaccaggaatgcagactgatttctcttggatacgctcaaactttttatggagctaaagccagtggtagagcaagtatctgaactaataattgtcacaaagcccttcttaacagcagaagctagatgtggctgagggtgaggatgcttttcgttcctgtgagcacgtaactgaagacctggtgtaatcattccaaccagccatcagcataagagatgataacatacgaagcaagtcatggtggtaaaatccaaatataggaatgggtacctgaaagtattttgatgacacttatcatgagctctgtgaaagacagtcgggattcatgagaacccatgcttttattaagtctgagcaaatgaatctgaaagatatattatgtacagttattttttaggtgcaaactgcagagctattcaatacaagctatcatgaggctgggaatccaaaataaataaaagttacctggttttctgtgctgaggaatgtagcattctccatgatttttagacatttcagaagtaacatcagactctgcttattcaagtcatcttttatatcctcgacagagagtgtgtcatgagtcacccagctctgcaaacaaaatatgcaatagagactcttattaaatacagttgcaaaggtccagtaactattgacaacttaagtacagagtctttgccaccactaagacagacatccaacttgtccacaacaaacgcagtcacaataacattaaactgtgttacacaaacaagagaattctcttgcccaaggacaagaaaagaaccttgacttgcaacgattttcagcaataaattagattgaaataaacatgaacctgaagatagcaaacaat

SEQ ID NO: 9810 - DNA, 576 bp, Arabidopsis thaliana landsberg
gaaccaagagtcgccaccaacttattttcgcacaaacaaatttacttctgcaatccattaaattgttgatgcgtatgggtaagtgtctttctggagcttttgacgcagtttaagaaacgggaaattgaagatagcctttgaattataagaaaatgtgttgtagactgcgttttactcttgtcacagtttcctatgaactctactctgcagtgtggccaagtatcaggaagccaatccaggtgtattcaccattgttaccttccccttccttttcgctgttatgtttggtgattgggggcatggaatatgcattctgcttgcaactatgtacttgatattgaaagaaaagaaacttgccagccaggtaataatactccaactgatgtcacttacgagtgttaacacgcgagattgaaatctgtctcatcagcagaacttgcttataatttagctgtttgttttactatagagttgcatgcaaatatgaaagaatgggaaattcacttgacgtttctaaagatcagattagtctgttgcattttgatgttttgtgcttacaagttctagatgcttacc

SEQ ID NO: 9811 - DNA, 559 bp, Arabidopsis thaliana landsberg
tcgctcaagcttagtccatttttggatgaaatctggaattgttcctgacaactggttgtcacttacacgactatgtacaaaattatatgcattagcaaaaaatatcagaattgcatatatatagtagcaaataaaaaaaaaattctctatgaatcaaagaagaatacttacaaatctctcaaggtggttagttttgcaaatgtagatggaatttcaccattaaagttattcgagctaagaatcctgaacaataacaaatcgaggtttcaagtttcaacaatacaaaaactaaacttaaactcgtacgaataatcttacatttgttgaatgtttggtagattccctagctcaagaggtaattctcctgaaagttgattggcttccaagacactaaaatcataagtttttttgattaagttacttctaaacataaactatctgaaaacattggttataatagattgaaaattagttgaactcacaggctagtaagagttgtaatgtttccaaacttcctagggattggacctgttaatcggtttccgagaagccaactgca

SEQ ID NO: 9812 - DNA, 781 bp, Arabidopsis thaliana landsberg
cttctttttaaagtttgggtctttcatttgatttcatactcttgatttttatttttttttttttagaattacacatctgacgactagaaaagtaggtaggattatgaatctttctgggtttgtagtgagtttataggaaatcctttgtctagtgttccgaaatttgagtagatcttgaacaactatgcaaatcttgttgatcgatctgtttgggaattgaaaatctactaggttttgaatttctgaggttttgtgtcagcaattgaagcagtaggtggttgagtcatgtttggtctgtgatgtcctgtcacacgcatcacatgaaccttggctttggatttaacggccattgttagtattaggctaattattaacatggcttttgttcattgtagttaattttcacagagtaaagagattttgatacattggacccaaagtgcaattttcaaaaatgtttcgctggaagaattcttctcaaaccgaacaagagcataaagaggcagctctcagagaggcaaaggtcaaatatttcaaggccttgttgatgattttcatttcacttaattacctagttgattcgtagaagctataatgctttctgatttttatgattatagatgaaagagcttaagactctcataggtcagctttctggaaggaattcactgtattgttcagatgcatgtctgaagagatatctggaagctaggaattggaatgtaggcaaagccaagaagatgctcgaggagacgctcaaatggagatcgagtttaaaccc

SEQ ID NO: 9813 - DNA, 474 bp, Arabidopsis thaliana landsberg
tatttttacaatgacatttttagtataaatgggtttgtcatcagacttgtggtaattgaatacgattctttcaatagacattaggaactggatgaagaacttcgagcaacgtacctcagataatgttaataaaagattggttggtacaaaggtgacattgatgacagcaaaagggtatatattcttaagttgaatgcttagtttaatttcttgatttttaggttgtaggataatgatgatggtgttcttcttcaggttgccccaacaatgaagggctaagctttagctgagtatagaatcaaattctttaagacggggacctagataaaaacataacacatatgccattttcattaatgtgttctttagattaacgatgtgatctaaagagatgcagagtgcaaaaacaaacctcaatattataaatcttttcttttaatcgccaaaggcatacaacaaagattaacagaaact

SEQ ID NO: 9814 - DNA, 932 bp, Arabidopsis thaliana landsberg
gaaggattccatgatttagtaatgatgcatacccatcagatttcctcgggtttaaaactcgatctccatttcagcgtctcctcgaacatcttcttggctttgcctacgttccaattcctcgcttccagatatctcttcagacatgcatctgaacaatacagtgaactccttccagaaagctgacctatgagagccttaagctctttgatctatatcataaagatcagaaagcgtctacgaattaactaggtagtaattaagtgaaaatcatcagcaaagccttgaaaagttttacctttgcctctctgagagctgctttgttatgctcttcgttttgcctattggccaataagcccaacaaattgacgcaatcataatttaaaacattcgttggaaaaaataatttatttatctgtgagatcaataataaaacagagtttgtctttgtcaccaaaaatcgccacaagaacaatgaccatcactgaaatggtgaaacctattaacatctctaacaatgataaatcttcttgtagccattgatgcagccttcatgaactcatggcaatccacacaaatcctcagattcttcataatcctcactggagaactctctggtaaacacattaacccaaaaaccaatgccagcttctcactatgctgcatcaaaagctcctctttctttcctatctccacatcgtgcagctcgtgttctacgcttggtttatatccaaactttctgaatttgattactagattgtctagcgtcgaacagatctcacggattctcggatgaccgctctctccaacactgaaagtatggaccctgtctttaatgtcaatccaactttttcctcttactttcttcacgtcgcagtcccttaaaagcttccttgacttggcgatttcctcccactgtttgtttgccgcgtata

SEQ ID NO: 9815 - DNA, 1125 bp, Arabidopsis thaliana landsberg
  unsure (1)..(1125): unsure at all n locations
agaaaaaaaatgatgagtcttattacagttaatggtgaatactacaattgtctaaactaattttattgtcaatttatttttctttttataatttatttatatggttcatttacatgtactacaattattcttatatatttttcattatgatgctctcactaactttcatcagttcatgtaacaacgtgcaaaccacatctccactttcagtatttggattccacttttactttcttcttttttaattgtttcgacgatccatatttgtattattgttggcaatccacatttacttttttcactagataaatccataatcacatatttatacaattaatcatttaagtatacaattaattaaggttaattaaacttgctatttgttatttatatttcattctcactgaagaactcttcgttgatgattttccactcttgtaagaagtacatcatgctaacaagtataaatgaaatgaacaaggtaggcctggtgcagttaaccaaaaatcgaataattttatcaaaagcctatactaaaacaaatgaatcttctttaatattgcgttatattcttcaagcccatcattatataaacctttatcgtgcaccttttaccatcatcatttcaaaagcaattcttcttgtcttggctcaatttatatacaaacacactctctctctcggttttgtccaaacaatggctcgcttcgatattgttctactcataggtctttgcctcataatctctgtctttcccgatacaaccaccgcacnnnnnnnnnnnnnnnnnnnnnnnaaaacttgccccaatgtcgaacaaatcgtgagaaatgctgtccaaaagaaaataaagaagacattcgtcgccgtccctgccactctccgtctcttcttccacgactgctttgtcaatgtatgtttctatttaagcgttttcatatcatttttctcctctttcattaggcgattaattggtacctttggcgtaattggcattgtagggttgtgatgcatctgtcatgatccaatcaacgcctaagaacaaggcagagaaggatcatccagataacatttcgctagctggagatggatttgatgtggtgatccaagctaagaaagcccgtg

SEQ ID NO: 9816 - DNA, 1389 bp, Arabidopsis thaliana landsberg
ttcatcgtgaaaccctttcttcatcaagaagttaggttttttgacatatccacaacctccattggctctaaacataccgtgcatcaaccacagagatttcccatatccctataatcaccaaatgtttcatttcttatacagagatcactttatacatcacaaaaggtagcttaagagtcaaggtatccatagaccttacaaaacttagcttgttacctgcatgttgaaagcaatcatttgcgctccgtgagtccaaccgataagaggtttgtagtttgaggagttaaatcttgtccctttagggtatatccgaagcaaattccgctgcgtaaacctaaaaaaacattgagattaatcaagttgcaaaccctggcctataaagagttaggatggtatataaattagtactaccttacaacatcctgactattagatgaacaagtcctgtcaagttcctgctcgcttaaactcaaacgtctcactttatcaaccacaactttcatctcttctttcaccgttccctttggtttcccagcatgaatcgtgatcaaccgtttgtatgcaggtttctgatcttcactagcctcttcatcctcttgatcactatcactctaattcaaaactcaaaactaaattacaaaacaacaaacaatgtatattgaacctttttcatgaactaagttcctttttgttaccttgctttcaaaatcttggtcaaacaacatactttctagtgtttgaatctcctctgttctaggtgtttcatcctctgacgatggagatacattattgtccttttgtttaacaatcgggttcctcgattcgagatattctttaggcggtttggttgagatgattatccgatgaagcagtgaagcaggagaaggaaattccactaagctatctgattcagggtaatacaacatctgcccaaatatctgtgtagccatctaaagaaagaaaaaaaaaactcaaacaacatcaaaatcaaacttattgataaccacaagatatagatatataaaatgttatacctcagcaactttggcttgaagatcaggtgtaagatgatcctctaaagtgatgataaccggataaggcgaactagaaaacgcgtaatctcttatcgatttcaagcatttcatcagcggtacaggcgtcgttagcgttctgaagaatcaagaaaaccgcggtttcttgaaaatgtttttgactaaagagaaagaacaagaacaagttttatatatatatatatatattaccttccgtgaaggacattgatatctgtcccagtagagttaggccaaagatcgagctcgatgactcgaacgcctcgttgcaaggctttgatcacagggacttcgctacaatcgctgcttagttgattcc

SEQ ID NO: 9817 - DNA, 945 bp, Arabidopsis thaliana landsberg
aaaaaactaattattgaaactaagtaaatatcaccaaaaatcaatcccaaatcattacaacagagagcaaagcaacaccgaggaagacggcaataaacttgtagattggcttgtcgaagtaacattcctcaagaggcttatacccttttgagatgagatggttaaccgcaacgtacacaaaaactccacacgcaagccccatagagatcgcgtaggtccagtcaccaccagctccttggctagtggcattgattccaatgccaatcccgacacctatgggactcgatatcccaaaggcgaaggagtagacgacagtgaggaagaatggacgtttagggattagcttgagaagagctattcccattgctacggccgcaaagaccttgtgcaacgatattgtccataggtttctccaagcgtcgcttttagtgtctgaccaaaatattcataacaaaacgttactaaagaataatgtttgatgcaactagctagattataactagtattttagtcatctacaactcacacacggaccaaatttaaaccaagttatgacatgacaaagaaactagttcgtatcgaatatatacactatcatatttactgcttttaatacagttcaataatcatggaccaaaagtccaaaacctaaatagaacgagtagattacctatagtcatataaaatgaatgatgaactacatcgaaaacaatttccatctagattaactacatgattattttgcaaaacagcaattagggtttatcattgatagtttacctgagagaccaatggcgattccctcaaagatggagtgaaaacaaagagcaaaaatcagcaaagctgtgtctccaaatccactagttcgtataagcgcttgactcacatcaacaccactctttatctcacgacgtccttcctctttcactgccacgtcatcatcct

SEQ ID NO: 9818 - DNA, 1229 bp, Arabidopsis thaliana landsberg
gggctctccgcttagccaaataatatctgagacgagaaactttcatttgccgttaagcgcactctctctctcagaaacaaatttcaaaatttctaattctcactctctctcaaggaagccatgaagagaaattctctcccaagttcttctggtaaccatttctcttcagttttggataatatattgttcaattcgattgtggaagcttgatgattcatgtagatagatccaaagttgaatttgatccaaaattccatcagattttgcgtttttgtttcgaaatttggtgtaatagggatcgatcatggttctaaagagtagatttagcttctttgagttctaattgttgaaatctaccaaaattgataggtttttgtgtgaaattttgggcgtttttttgctagattcgaccaaattgtgttgagattatgctttcgatgctctaatatacttacaatcgatcatatagctgattgctcttagatctgtgattgattcttgccaaaaattatgttactctagcaagatcgattgatgtttgtgaaatattactaatgttgatctgtttttgtgcttgatcacttttgattccgagttttggtattgaaatagttatgatgttcctgagtgattcggtttttgttgagaatctaccaaaatcgaattagtttttggcttgagattatgcttcgattctatttagctaatctaaattggtttaatcaagaattcggacccctcaatgttgaaccttgattaaaccaatcaagaactacattggttaaattggttttatgaattgatgacaagctcatccctatttcgcacaagtcaggacactagaaagcagcagacggaggattaaaaaaaggagttttactaatgtctgcgggccagcccgtctaaccgatgggctctgcggggcgggttactctctttccaatacctcgtttgtggccaggcagtcccttcgctaacaaaaaaaaaagctggcagaacgcatatcctccatttgggcgcggggaggcccaattgacaaccctaatcgtgtccaatattttttgaattcttcacaattgaattaggtagcataacaaaacaactaaaataatagaaaaacaaattggtaaaaaagaaaaaaaattaacacacaagccaataaacttaaagatacattaagttctcaacatcatccattccaacgacttcccaaatattgttgagatagc

SEQ ID NO: 9819 - DNA, 1315 bp, Arabidopsis thaliana landsberg
tcataaatctatggtgaatgcacagaagtagttgggaaaaccagaaagctctattgcaatgtcagatggtgcacatgttgaacatattcatgctcttccatagaacgatcatttatatatgtcatacttcgtggatcgatatagatatattcccaatgatcacgtcccgctcatgtaatgatacaaaggtaaccattttcttgttagcgtaaggtgcttatgaagagaagcacagtcacccatatgatgatataaggttaagatcgaattcccaattccactattatgaacttgcttcttatctttttgacatcttgaacttaaaattatgtttgattgaagattgcattagcatacaacaaaagtaccattgttgcatacattttagcattttctcttattactgaaacaattctctttaaaacatttgcatcaacggctacttataaagtaactaaaaaccataaaagcagtgaacactggagaagattgacctatcaataatggtgatgatcattctcaaataggggctctcctgttcgatattcgtcattggatggcaaaactatccaacgtcactcttctccacgtcaatcgtgaacgaaatagtgctgcagataagatggctcaatatgttttgtctactactactctgtatcagtcttttattgttcctcctcgtttcttactctcttatttgtatcaaccttatacaatctaataaagttgtagtagtagttgttaaaaaaaaaagaaaataacaattatttcatattttacactgcattgtacatcaaagacttttatttgtatattcggtaacaaccaacaaaaaaaaaagtatttgaaaggaaattcttagttcgaaactcaaataacacaaaaaaataaccatacaaaaaagattagctaaggactcttttgtataattctttatagtaaaaaaaaaaaaaaagacaaaacaacagtggagactattatctaagtacaactttaaaatgtcgtgaagcttctcaagttgaagtagtctatgctctcttttccttcaaacaagaagaaaacttctcaagcagccataagaccgatgccctttccccttctgctatgcttttctaccgcaaattccgaacatgacacagatgcaggtgggaggaaacttctgtaaggactcctagaaaacagaggatcagttcatttttagctggatttggcgatggacttgcacgagaaactccacatacgacgggccgcttgctgtcctgtcctctaccatatacgagagaaacaacattcctgaaaagtaccaaatatcata

SEQ ID NO: 9820 - DNA, 1442 bp, Arabidopsis thaliana landsberg
gactaagtatattatattttaaaaaacaaaattgtgaaatacagaaaacatgcgcatcatacaaaggatgtccctatcaattttcttgtggtgctacgagattcgtatatcacttgcgttaaactcacacttcattacgtaagattcagtttcttgatttctttatacaagtaatatcctggtttttgtttagtcagcaaaatcaattttgtggactactttaaatgaaaaaaaaaaagagatatatacatcaaatttgttcgacgtaaactttcatatgtattgataaaagtttttaattgtaaatgttttattttgataaaaaggtcgaattaccgtgacttaaaagttaaaacagttaaccagtgtctttgcatataagaggaaaatacggagccaccaaaatagtgcaaatgtcaaccgaaactacccacttttgttatacagacagaagaaaaatggcgcgaaattgaggaggcctgtctttttaatgtcctttttttgttctccacaaaaaaatcaaagtagtgaaaaacatataacagaaaataaaactttaatctataattaaaaatcccatacagttgcataacaatatcacaagtttacgcaacacatcaaatacacatcaatggtcgctcgggttcaatactacaaagtctacaaagcaaggccaggcttgaggcccaatggtccatcaaccgccacaggctcatgcatctccctccatgatttacgaaattataaatttacatttcactactttaaaatttaagtaatacttgtaagaaaagtcatgtttcttttctgtcatagacaatttggctgaaaaaatccagcttctatccctccggcgtgagtacaagccgatgcagccggtttattctggtacgttaatttcacatcctcaagtctaattccggtacatggtttcttagaactacaatcaagtttcactccaacttcagttgccgatgttccatgtatatcaacaaacaacacatcgctaattttgatccccgaaacctaaaataatcgtgaaagaaattaattaatctccaatgtagaatatttcatgtgcatatatacttaagataatttacctggcgaggacaatcgtgatcaggacagtagttttggtcaatgatgatagggttctcgacattgttcattacacaatgttggaaacggatgtttttagcgaacccactactgggcctggcccatgatttgatccttactccgttatcagttcccgtaaacgtcaccgttttcactgtcacgttttgtacacctgactccacgctatcttttcccaaactaccaatgctgcaaagtgcaaaagaccccatccaaaatattagataaaatttagactgacatatgaatgcatattgtatataaagtgattattatccaaaacaagattaatttgtaaaagc

SEQ ID NO: 9821 - DNA, 849 bp, Arabidopsis thaliana landsberg
gcttgagatcaacattgattacttggtgaacacttcgttcctcaattacattgccgacaggttctttctaaaccctaaaactcacaaacacgcaaattttgtatgaattgtgatatgtttaatgtttacatagtattcaataatgtttatcggtatatattctgcgagtaactcgagaacaagtcttattgatcatgttataattctctatattgtagatcaagtaatctgagacggcttggagttgttgacaatgctccagtattgagcagtggagttgtcgaagcagcgatgaagctcacattgcttgaagaacttgatattacatacaagtcatcaatcagagaacaagagttaaaagttgtaggccagtcttgtccaaatctgaggacattaaagctaaactgtacgggtgatattaagtgttgtgataaggttgctctagcaatcgctgaaacaatgcccggtcttcgccacctccagcttttcaggaacggattatccgagacgggcttgaacgccattcttgaaggttgtcctcacctgaaaaaactcgggttacaccagtgtttaaacattaacattgtaggtgatatagtgaagtgatgttttgagtggattaaagttttgagacgcccccatttagttcatgagaggtactgctagattcagttcgtttgtttgtaattctcatttagatcatatatttttttcacctattcttacaaatttatgttggattctccatgaacctaagtgggcattctatgtaatatcttatatcagaacctttaaaactaagggagcaacatttgaccatacatatttaaatgaactagagatgataat

SEQ ID NO: 9822 - DNA, 1025 bp, Arabidopsis thaliana landsberg
gagctagctaatctcgtaactgttaaatatctgtatttattgcagagcatgaaaccaagaatcctctgtttctgaaattctttttcctgtgtgtttgcagactttgattatgggaaatcgagatgatatagatgagttgtcatctggaaacgctagcgttcttacaaccgtcttgaaactcatcgacaaatatgatctttacgggtctgtcgcatatccaaagcatcataaacagtctgatgttcctgatatataccgacttgctgcaaatacaaagggtgttttcataaatccagctttggttgagccttttggccttacactcattgaggtaaagtatgcatatgtgatatatatatatatagtccttcttactcgtttccaatcctgtttaacctaaatagtatccagaaatctattcacaaaccaaactagacaagaaattaatcaatctggtttaaccaaaattaaaaatgcaggctgcagctcacggacttccgatggtagcaacaaagaatggaggaccagttgatattcatagggttagcaacgtgtcctgaaactgaaaatcatttaaattggtaatgcttatttctttctcatggtatttaacttcaggcattgcacaacggtttgcttgtggatccacacgatcaagaagcgatagcgaatgcgttgttgaagctggtatctgagaagaatttatggcatgagtgcaggattaacggttggaagaacattcacctcttctcatggcctgagcattgccggacttaccttacacgtatagccgcgtgccgtatgagacatccgcagtggcagacagatgcggacgaagtggctgctcaagacgatgaattttcactcaacgactctcttaaagacgttcaagacatgtctctgagactctctatggatggagataaaccatcgttgaacgggtctcttgaaccgaattctgctgatccggttaaacaaatcatgagccggatgaggacaccgtgaaatcaagagtaaaccagaat

SEQ ID NO: 9823 - DNA, 1314 bp, Arabidopsis thaliana landsberg
acatgcagtagtaaagaatatacctgcaatcatgacgtaagttgcgaaccaaaagactggttgggtgatcactgtcacgactcccaccaaaccggccccgagggctagggctccggcccctccttccataaccccttggtggtgatggcgtgtagctccttcctctcattgtgtctagactttaatatctatatcaatcaagtaaccaacagaaattgagtcagagaatgtgctagatatgattggatgattaagaaatagaagaaccaccgcagaagcttacacacatctagagaagacttcaaaaaagtataaaaccaaatttgaattctacaaattccaagccataaaacaattactgaatgtggatatacatctagctaataatgagtttcaaactaagaactaagctatcggagaacatctcaagtaacaacaagaaagatcgatcctaaacaagaatacaaatttgagatcaattcaatagaccttaattaaccactgccgataagataagacgacgaagaagaagaaaggagaacagattaagcatcaagagacttaccgcagctaaggagttgaaaagaaagacggacggcgaagaaaaacacaggggaagcggcgggatatgtatcggagaaaagagacagtgtttagagagaaagtgtgaaacctagttttatggttttggatcttatggtctgaagcgaacgggtcattagggttttttctgcaattttttattttatttcctttcttatgtattgtctacagatcctttcgtttttccctttgtcaacttttgccccaaattccttccaaacgtttagttttacgcaccatactttcttatattacatgtagacccagttaatgtagtttttttttaaaaatcaacagatccattaaatgtagttaattttttaacttaattgtaaagtttgaatcttgttcttatgagagtaatttagaggaatttaagtattggttcaatctaactcttgtgatagaatatgaggatatatcttatattaagccggtttattttgatcgtttatcattgaaattatgtttggttgattaaaaaatgaaacatctaactttttttgttatgtattccacactaaaatttgaaatcacttgttactcttacaattttatgttttccgtatgtgtgtttcgacaacttctccaatcaaaatgcataataataaattaatcgatttagttttattccaatcactttgttactaacaaaatgtgttcttggcattcaagagacattagccctacattttttttttttttcaagag

SEQ ID NO: 9824 - DNA, 1105 bp, Arabidopsis thaliana landsberg
atatgctattagaccttacaaaaaagaagatttataaaacgttcaacctgcaggttgcaaatgctgtttcgcagtacgggcgtcccattacctatgagagttaccaatgctttgaaatcacagctgggtaaagttcttctcatgtgtatgtatatataagaagctattatctcctatgcttaagtgctaaaaagatctccatgttgcagtgacgttgatgtctttccccaagttagtttgagctttgctggtggtgcatcaatggtcttaggaccccgtgcatatcttcagattttttctagtgtaagcatattcatacacttacactatttcataaattgtcttttagtgtgtcaatgataagctttgaaaaagtttagctgctcaactcttagctatacgtctactatatctagcctaagactgtatctagcagattagaggtgttaggggtttgtaagcgagccgttagtgagggctgggacgttgggttcataaggatgtctcaacagattgttttgggtgtggatttctcttaaggtttacagtttgaaaaatttgatatgataatttttcttttgctatttcagtcaggaagttcaatatggtgcattggtttccagagaatgtctcatcgtcgtataacaattcttggtggtaactactcttgtttgttaactcaatcaagtgaaactgtaacagtgcaactatttttctcaatgagtgattgctttgcagatttggttcttaaagacaaagtggtggtctacgatctagttcgccaacgtattggatgggcagaatacgactgtgagtgtgttatctattttaccacaaagcaataacgaaattggaatacaaagcagataatgaaattgcattgcaggttctctggaggtgaatgtttcagcatcaagaggaggacgaagcaaagacgttataaacacaggacaatggagagaaagcggttcggagagttttaatagaagttattacttgttacaactagtagtcttccttgtccacctttttgctcgtttcttgtagtaggcttttagcattcactccaccaattatggttggactttgtaagcttattattgta

SEQ ID NO: 9825 - DNA, 2255 bp, Arabidopsis thaliana landsberg
  unsure (1)..(2255): unsure at all n locations
tactgttggggtttaggatttgaagtttttatggagtatgagaacgagaaatggaaaagaatatgttaatttaaacgaagatgatatttttatatcctttttttgttattctaatgtttcggtttatggaagattggtagggagagagtaagggaaagagacgaggatgtggagaacccaaagctgatggagtgtaaggttaaatgtccttcctttcctctgtattggcttagcaagattacattattttctttccgtgtagcccttatgtttatattcctcacagttcgttcaaacatctaacacttgtatgctagtcgggtcatgttattctctgccagacagtgaacaatgaagttttctggtgtggttgttcttttatacatggcaaattatttgatgatttataggtgcttggtttgtaaaggtggatgattagtagtcgccttttcatgtctgaagattgctgttatcttgaattgaatttatttatcacggcttacgatatagacatatcagtctctaattttcaatgggaagtgcactatttaacctcttcttttttgtgttgtatgtgtttgttctctcctgttattcctctttttcttttgaaagtctgtctactgatatcctacatatgccccctaattccgaggtttgcagtactactttaggactggagggtgcaaatatggagagtcttgtagattcagccacatgaaagaacataattctccggcctcagtaccagagcttaacttccttggccttcctatcagaccggtattccattaattggtttagacagttctagcattctgtttacaacagccttatggaaaagctataatagtataagctattgacagggagagaaagaatgcccgttctacatgcgcaatggctcctgcaagtttggagcagactgcaaatttaatcatcctgatcctacagctatcggaggagttgattctcccttgtaccgtggtaataacggtggatccttttccccaaaggccccatcccaagcaagttcaacttcttggtcttcaacgagacatatgaatggtactggtactgctccttttattccatccatgttcccctatagtcgtggagttacacctcaagcttcagactggaatgggtatcaggtactaattttgttccattttttcttttatgctgataaaactatagtactttacttttgaagtttctcatttttattggtgtaggcgtcttctgcctatccaccagaaaggagtccacttgctccttcctcataccaggtgaacaattcattggctgaaactagttcattctcacaataccaacaccagatgtctgttgaggaattcccagaacgcccggatcaaccagagtgcacttattatcttaaaactggggactgtaagttcaaatataaatgcaaataccatcatccgaaaaatagattgccgaagcaagctgcattctctttcaatgacaagggcttgcccctaagacctgtgangtttttttcccatgctgttcttttgtgctagcattaggaagccactgagaaatttcgtttgtagtgctacagaacttgatatttctggtgaatttgattcaggacaaaaattatgatcaatcacacacttctccgattcacacttaaaactcattttcctttattttgttatactttcaggatcagagcatgtgcacacactacagccgatatggcatctgcaaatttggtccagcttgtagatttgatcattccataccgcccacattctcgcccagcagctcccaaaccgtagaagctcgtcaagttggcgctaacggaaatgaagatgacagctggcattgacatcacatgttgagaagcctgcgtaagggatacttttcttctttaccatgatagccttttcagttcttnnnnnnnnnnnnnnnnnnnnnnnnnngaatttatgaaaacacatttaggtaaattatagtctccaaactacatctatctggcaagtcaatgcttgtttacaggattctcacctaataactactgttatgccgctttaactgtaactatctactctttcactaaggttcactctaatggaagcatgtcctgtttatgctttgttcttcttccgttggtgactctcctctgataaaaatttccttgatttctgcctagttttgttcatatctgaatctcaaaagaattgctagaacggagaaccaaacaacgacactatatgtacata

SEQ ID NO: 9826 - DNA, 1415 bp, Arabidopsis thaliana landsberg
  unsure (1)..(1415): unsure at all n locations
aataatgaaacttgggcataccgttttatttgggcgagactatttctgcaggcaatgtccatcacaagaggccagtattcatctcccttagcatttatttcatcggatgaccatagaaactctacattctcactattcatcccggctgcctgaaatatctccttaaaatattctccaaccaccctgattttcttcaaatcacctcccaacttattgttcatatatgcaaaccaatctgcaatccaaattttcactcggcaaccagcagaagtcaacttgttcacattcatgatcttcatcagtccctgccaaggtaatagcagagttaaacgcgccagcagaagcttctcacttaaagaagaaagaacataaaagaattccaaagcaagctatgtgaaacaagcatatgacaagtgtaacacacctgagcgatatgcatcctccctgatggttcaaaaccgtcgtagcaaaccggagcagccttcttagccagaagatccttcagctcatcatcatgtatgcattgctcaccaacacttctaactacattgtatcttttttcgacctcctcacttattctgaatcaataaaagatctaatccggtaagctaacaagtgcaaatataaactggaagattcacaaataaagtatctatctttatttttctaaggtttctacctgacaagtgatgcaaaaagagggaaatcacaaaccaaatttccatggtgaattggagaatacaaacttaaggacgtgcctttatcactgaaatcttatctaaaacatgcggaagaaactagacaagagatcaactaataatataacaccaatattggttacattcacttcttaaatcctaggcaataaaattgcaggggagatagagagaagaaacttactgtaatccggagggcaaagtagaagcctgagttggtgcgttgatggaaagagcctccatctctgacgatgaagctgtttctgaaaatcaaaacacacacaaaaaatgacttcattttgaaactttatgcagaaagaagttagagtgaagtaacaccttatcctatattctatcatctcctctctctgtatctctctctatctatattgtttggtttcccagctcttggcttttttcttttacttacaaactcacacttgttctcattgtcaccaacacataatcggttatgcaaagttggtagctttagcatataattcgatctaagctttgagtatnnnnnnnnnnnnnnnnnnnnaaactgacattggctcctaaaattgagaactcctattgaaaaacctccaaatacaacctaacaaagacagaaatcgagctgacctctgagattggtttatcgtaggcgtttgtgttcactccgtgaaaagtctgaacccttgagatagaagaaacaga

SEQ ID NO: 9827 - DNA, 1233 bp, Arabidopsis thaliana landsberg
acactgttttggcaacacttccgcttaatctaacagcacaatggatatctgaccacactcttaaccgatcactgtcaccagactgaactaaaaccgagtattcagagtggacaagagatggatggtgacggtatgccacaaaatccacaccgtattgcaaccctgatctcaaaacccagttctttgatcgtaaatgtgaataagctttgaaaaacattggaaagtttggtctttttgatttcatgtagagccatgtatctacttcattctccaagcaacgaccttgaagagagattttgatgcatttgagattgtaatgcaaaaagaaagcttcttcaaaagataactgaatccatttcttgattttctctgccgatagaacgagtctgccaaaacaacaacggtcaagaagctcagcttgctctggctcaaccgctagaagcacattgcaacttgataaggtacccgaagactctgtttcggctagggagcgctggagctctgagactgattttgaaataggttctgcaagagcttttgcttcagctcctttccatttccatctaggcgccatggaattgagctgcatatatagcactaaaaatcaaaccttttgaccaaacgattatgtaaaagcttttcttagtctattaccaactacaactcttataatctagaaaatcagataaacattgtcactaagacatagttgttaacgtttaaggtatcttgaagaaccaagtaggaattggaatgagcaaaaccaagagcttttgattcttttcccacttttgtattcaaaaatcaatcgtctatgaagcggaaactgtgacattcaaattttaattgaagaagcaatcacattcagtcattgaacttgtcctaacatgacagtaaccatgaagagaagagatttggttaaaaacgaaacctggcgtattgatttatgaagacaaaacagaggatatgaaggactcgggaagcagggtcaacaatggagagagctatgcttcgaggatccaatggagagctatgcggtagtgaaaaacgtaatctcgtaaaaattattgttgatttcgattgcacagtgaaaatcgaaaagaaatagccacgaagattcttcgaaatcgagaggaagagatcgagaattgaaacgagattcggatctctctctccctggggaagacagtcgcgcgactcgagcagcagagattgtggtgcctactgagtacc

SEQ ID NO: 9828 - DNA, 713 bp, Arabidopsis thaliana landsberg
cctctatttaactaagagcacaagtgaagtgctgttacaagtagcattatagtttacttatttgatgggttgtatatctatcaagtggtaaacgatcgattatttgtgtggcagcggtggcacgtgaaaaaatattccgaaggcaaacaacgtttgtccagtatcatacatcagcacctctggccaagaatagaattcttatatgggtggtaagattcttagctctcttctctagaaaatatggaaaacaattacaaatattgaataatgggtggtatgtttttcacctccttgcagacatgtttcttccggcaattcggacgttctgttgatcgttctgactatcttactctccgcaaaggattcattgtggtgggtgatactctatgccgtatgatcattagctttttccactctcattttcaactatttatgaatgacaataatgatacaactacttatagttggtactgtttccgtttcttctttaatgagcagaatcaccacctcacattaaagtacgattttcacagctacatgattcgttctatggaagaagagttccaaaggatcgttggtgtgaggtgagatacctcatcccatagaaacatagtgtgggatatccacttagcttatatctatcaggttctgagttcttaaaatcactaatcattttggataaatggatgcattagttattgactgaacaactt

SEQ ID NO: 9829 - DNA, 526 bp, Arabidopsis thaliana landsberg
tacccctttgtgtcacaggaacaaatgtatgttctcctctaaaatgctttggatcaacacctccgaatacgatttcaccgccttcttcactctttggatcacggttaagccaaaatgaaaagaccggcctctttataaggccttgcttgagcatattgtacctgtaagaaataaaattagttgtcagctcatcaaacattagtagggtgtgtgtaagtacgtaagtaaccatcaatccaaaatgagagaaaagtgcacgcatataccaaacaggagtagcgtttccaacagcgatctcttggaacccaagaccaagaagaccatcaaacttagccaccaggaatgttaaaccaggctcactggttgtctcaataaactcctgatctttgacaaccaaatcaccaaccgtgacagcatcataactaaagaaaccagagattgatcctgagccgtaatggattgcggcacgttttcctgcatcaaagatatacatacaattgtagagatccaattaacattgatatct

SEQ ID NO: 9830 - DNA, 639 bp, Arabidopsis thaliana landsberg
gtagtacatacaaaacatttatagccaacggaaaatatttggaacggggatttgtagaatccaacgtgatttcagatactagttgccattctccactccttagcttccatacaaataacttatcctctagaccactatcgtctttgggttctaggaaaatgttcatatacatacgtgatcccttagaagttgtgcaaagtctcttgattttcacatcttttcatacatcagggaaaagaataactctgtatctatcagattccgtttcagtagcgtagaaatcataggacacaacatttcttcactgtctaagatgtagccaaaccagttaaggtttccgttcaagctaacgggattgcaccattcaacactgcgcaatgggatagcgttttggagaatgttggagctccacaagtctgtcttagatgaataaaagaaactttgtaacttaaaacgagtccgttttcatttaacactctcttagtgtcggttgacactgaaatcatggtctgactccaaattcgtttctttagcttaacttcgtcggttttgctccaaaatgttttcttatctataatccagttccgatcataaaaaatacctgataagaagattttaaaaataataaaaataggtgat

SEQ ID NO: 9831 - DNA, 1174 bp, Arabidopsis thaliana landsberg
caagtacatacttgtcccacaaaaccaccagcttcccgccatattccgccaattgaacactagaatatctagaaaacttaggtagcccttctaaaccctctattttcccgtaaaccagtatcttaccgtcaagtcctctccaaataaaatttcctttacgataaaaataggctatattctctatcatacaagaagagcgaagatatgaatccaccgtatccaatactaccaatccacatgtcaaatgcttcgatttatagctcaaagatagacctttcccagccctagagtctaaatgaaagctcttgtagtaaatctttttttccaaattttccaatttgaacatccgtttttcgggtgacaccggtttccaagtctgagtcattgtgttgtacacttcaacacagttcaaagaatctggactttcaaagcttcctggtaaatacactattccttcaaattcactattagtgtgagccaatctcattcttggagcttcatgccaagtgtgagttcgacaatctaggtaaggaacgttagagtacggagccttttcgatgtctgcactaatggcgtagagataatgatcaacagatatgatagctgaccattccacaggatgagaattgagattggagccaacagattaacacttgacttctcctccttcttcttcttcttcttcttcttcttagtggtgtgatcggttagggtttgattaggtttcctgtagagagtgaaccagcgaggattagcttcatcagggaagcgtaagcaaacatagagaaaattctcggttttgcctaagagggttcgggttttgtaaagctccggtgaagtaaggattgatcggaagcttttggagactaaggagagatttgtgtaatacgatctcgagacgcgggctaagatgatcagtattacatcatatggaagtgacggattcgaagtcgtatcgttcgacagcttcttcttcttccatggtggttggccgtccttgacgccggaagcggtggacaacctttgggaatccgccattgagacaaattcaatcaaaaattgggccttgttggaccaatatttagagataaatccaaaaatcccaaaacgatactatctttttagataattaaatattcaacaacgtttactccaaaaattaaaaacttagttt

SEQ ID NO: 9832 - DNA, 1259 bp, Arabidopsis thaliana landsberg
cccatatgtagttgcctaactattttgtcgaaacgatggaagaatctttggacgatggttcaaatgtttgattttgatgataatttcgaactcgagccttctaattacgggagttttctcaagtgtgtgaacagatcaatggtgtttcataaagctccggttctagaaactttgaagtttaaagttggtccttgttgcagctatgaagatataacaacatggatcactattggaatggttcgcggtgtgcgtgaactctacattcgccactgtaatgctgatttcaaagacaagaaacatagcttaatcaaattacctaacagtctttacacatatgaaaagctcgaggtcttgaaactctcttacgcagttattttggatgttcctatcgatgtttgtcttccgtccttgaaatcattacaccttgtacgtgtagtgttcaaaagcaaccaatctcatcgtcggcctttatctggtttgtcctgttcttgaggtgttgatgttggacaatgctagaaacgacgacgactatatgtcatcgtggttctataatgaatttgatatttttaacccaataaaatacggcaatatgattgtgattaatgtcccatctctgaagtacttgagcttagtagatttcaatggtgactcttatttgtgtgagaatatgcctgaggtgattgaggcaattattaaagttgttcataaaagtcccatgaagttactgggatctcttccatcagtcaagaatctctatttatgtctaactaattcagtggtagtaaaaaccaatctctgttatcttgtaatttattacatctatactgttttgcttatgtttctagtcattgtttatgcagcttcaacaccaaatagggatttatcatcttgtccatttggagctatgtcaagactctccagggtggtggggtctgcttacttggatgcttgataattctcctaaactacaagttctcaagctcggaaaggtaacacttacattcagttattcacttgttatcattgtcttaccttataactgcaagggctaatacactataattggtgttctgttagtgcaaagaacgttgtttcatatcgtccattgaaagtcactggagaggaccaatttcagttccagaatgtttgcggttacatctgtctacttttgagtggaaatattacaatggaagagatgaggagaagaaaatagtggcgtacatcctaaagaatgcaagacagctaaagactgcggcttt

SEQ ID NO: 9833 - DNA, 1149 bp, Arabidopsis thaliana landsberg
gaactccatgtggttatgaagctgcatagagattctcggaaacataatcacaatacaaatgtcgtgtatcacaagaaaacataggtttggttttggttacgtaccgtcgtcgaaggagataaacataaagagagacgcttgactgatttaagaggtcccaatagcttcttgggatttctgtaaatgactttaatattcacatcaaccacctcaggcatattatctctcaagcacaagtcgccatagaagtctacaaagttgaagtacttcaaagctggggcattgaccacaaacgtaaagtcaccgtacagttctccagatgtatcaagaatagataatctctgtaaagtaggtatttctacatagaaagaccgcacatggaaactgttataagatttgtccaacaccaactcttcaagaacaggacaacccgacaaaagcctgcggtgagactttttggttttgtactctacacacacaaggtgtaatgatttcaaggatggaaaacaaacatcgataggaacattcagaactaccgtggaagcgagtttcaagacctcgagtttttcatatgtataaagactctttggtagtttgattgacctatgttccctgaaatatccttcacaatgtgatatttcaagttcacgcatattgcgaaccattccgattctgatccatgttgctatatcttcagagctacaacaaggaccaacgttgaacttcactgtttctagaacctgagctctattcaacaccattgatttgtctacatacttgagaaatctcccgtaataggaaggctcaagttcaaactcatcatcaaaacgaagctttggaaccatcatccaaagaaacttccaacgttttgacaaaagcattgtgacgacaacatctttggttggaagtgatgaaacaatcttcaaaagcaaatcatcagacagattactaatcctatccatatatggaaacaacttctatagactgaaaaacctttcagattcaaacaaagatgtatatgtgatgatttctacaaaacccacatttatacatatacccattgtagcaaacacaaccttattacaaactcaaagagtaacgacgaacagaagacataactctaagctaacgcatgacgcagaatataaa

SEQ ID NO: 9834 - DNA, 993 bp, Arabidopsis thaliana landsberg
tttaaattatacgaaaaactctggtttagtaaagaggcagggcatcgggttgagtagactatattcaaaattatataggatgctccaccacaaccacaatcaccggttcaagaaggattagaagatggctcttcaccaagtgcttctgtctcagataaaggaaatgcttctgaagtttttgttgtacgtatacatttccttttgtattgctttccttgttttctagtatacccccttcttgatcgacgaccatctaccactcactttctctaatgtacggataagggaccgtccgttggcatcgtagatttaatcagaatgagtgacgagcttctcatcatcgatcctgtcgacgttcaattccctagtacgcttttatttatccttgatctcgatctctcctaatattcagattagttttttactctgttgatcggttgacttttgattttgatgtagttgaactgaacaagaaagtgtcttgctctctcaatttgactaacaagaccgaaaattatgtggccttcaaggtgaaactaatacattataattgtctacatgttggagattttgtgtatcttaggtttcaagggtcaattttcttaggctaaaacgaccaatgcaaagaagtattatgtcaggcctaatgttggtgttgttcttccaagatcctcttgtgaagtgttaggtatctctctgatactcttgacttatcttttttactttcgtaattaatggatcgttcgccataaaagggttttgggatcatgatgagtttcttgtctccaacgtagtgatcatgcaagcactaaaggaagctccggctgatatgcagtgcagagacaagttattgtttcagtgtaaagtggtggaaccagaaaccacggccaaggatgttacttctgagatggtattgacattcttatcatcgggattaaaatatgattctgatattttctaacttggcttttggtttatttcttatgaaaactc

SEQ ID NO: 9835 - DNA, 1175 bp, Arabidopsis thaliana landsberg
aaaattaaaatcactatatatgtacattatatagaaaacttaaaaaaaaaacatcatcttattattatattaagttttaaaagtttctaaaataacttctattttctttttttgaatggtttttaaagtgtatttatattttagtgaataaactacaatttaaatataatactaaataaaaacataaataaaatactttttttagtgttttgtgaacagtattacatctaaaaaaatatggtgtaatattgttcacaaaacactaaaagataatttggtgttgtttatacagttcgattggaaaattattagcactattatttaatgttttgcagtctggttagagatgcaaggttatggacttaaacccctgtatccctttatattaaggacaaagaaaattgtatatggtactctcctaaatgttatactaaccggcaattttaaaacttagttcgaaagtatttaccggttgaattattggactattaaattgttaatttattaacaatttttttaagacctatttaaagaagtttaccaacgtgacctcccctgtttttttaatttcccaagaggcaagatgcgaagacaaaacatcatttattattataattcatatcgttcagttattacgattcgattaagcaatcatatgatcttatgacgatctggaaatgattaaaaaaacttagcgttttcattttgtagtaatctatcaatttgcaatttataaattattgcattttgattcataatccaatcctgaatacgcaagatgaccaaccatcatttattatttacataatacatgccatcagttccttaacaattgaccaaaaatattaaaatataataaagatatatattcaaattattaagatataagtgtttcacctaaaacaaaacgatataagtatattttcacattttctctttcgttgacattttatacgttaatattaatcgtataatcgtttttcttttctttttttttaatcgtataatcgtgatttatgaacagatagtattgaaaacacccgttaagtgttaactgttaacaagtaaaaagggttgcattttataatacatcacgttgcccactataagaataaaatcacgttgtattttaaaatgggaaaatcaacattgaactcatataaaaagatcgtaat

SEQ ID NO: 9836 - DNA, 471 bp, Arabidopsis thaliana landsberg
aacggatccaagaaaggcggtggaggcggcggacataacctcctcgctcgccgatgtttaactgttacaccacttctactcctctttggagaaacggtccaagaggtcccaaggtatttaatatgtaacctttacatcaaatattttatcatttcttgatgtgggactaatatttctctctgtacaacaaaacaaatattgataataactttatatgatttttaatttggtcagtcgttgtgtaatgcgtgtggaatccgattcaagaaagaagagagacgtgcatcgaccgccagaaactcgacctccggcggaggatcaactgcagctggagttccaactttggatcatcaagcaagtgcaaattattattataacaataataaccaatatgcttcatcgtcgccttggcaccatcagcataatacgcagagagttccatattactcgccggccaataacgaatactca

SEQ ID NO: 9837 - DNA, 525 bp, Arabidopsis thaliana landsberg
  unsure (1)..(525): unsure at all n locations
ttgttcaaggtacaatcctcaagagaaaccttcaaatcattcaaaagaaaattctcaatttatgatatcaaggttaagaaactcacaaaacccagattttgaataaccaacaccatcaccgatgatcgacgccgctaaatctgtagaatctgagaaatctccagttttatcaccgttggccgctaaagagagagaaattttacataacattgataccaaaaaaaaaaaaaaagagagagaaatgaaaacacacaacatttttttccttttgttaaaataattagtaaatcacgacatgccacgtctgcgcctctctcaagttcccaaaactctcttcagagagtcgcctctcttgaaaaaattttgttttgattttcttttaatcaacaaatagcagagaaccctatcaaattatagtagagaaccctgcattggagatggccgtaggcccaacanaataccaacgttcctttttttctcattgcgtttaagtctttgactttgcctccttatttttctctttat

SEQ ID NO: 9838 - DNA, 489 bp, Arabidopsis thaliana landsberg
  unsure (1)..(489): unsure at all n locations
ctttgttattagaaaatctgactntgtgttacaaacaaagacatcatccttttatagacgtgaatcagaacttgacttaaacaacacaaccataagagttataactcttcacttatgcctcttaagataactacccttaaggcaacacaactcttaatgtataaacttaacaaacatagttaattgtattaaacaagcgaccaaactcaattaacctctaacactgcaataccactaacaaacatagtttataatcagaagctaatccgaatttcattctagattcaaatcaagtaagtagcttttggttgaatccagtccacaatgtaagtatcattagatagatagaaacagaacaaaccaaccaataccattatagagcaaaatccaaatttacgacttaattgtcaaatttaaaaactgaagaatcatgtataaggttcaaagtgtggcatgttgcttataaaaccaccagcttaagccatcaaa

SEQ ID NO: 9839 - DNA, 1900 bp, Arabidopsis thaliana landsberg
ataattagtggttagctttttattcttttgcgggacaattggtgtttgaaacacacacaacaccgcacctgaacaaatgtactattaaaatataattaaggatgaaaaaaagcttgagcacactttcactaacttagctttcaataaaattaaagaggggttataacctgaaatagtatttatttagaaaataattaaggatataataaagctcgaccacactttcactaacttagcttttaaaataaataagagaaaacgtatgaacttttactttaacgaattaagtatatattaaaaatttatattggttagaaaaatattatttaatgataaagtataacctgaaattatggaccgtgagactttgtcatcatatataccataattacgtatatacacgttcggcccccttgtcccatttctttcaagcaaagcacaaatataaacattgccaccgtttttaattactagattaatttccaagttacacatatttttcctctaaataatcaaaaattcaaattgtacaacttaaattatgttaccttttgcgtatcttagtttttttcttttaaaaaaatatagaatgaaaattaatttcgatatatagaacaaacaaaaaaccgaaaaaattgagaatgtgaattggtaaaataaagtaatgaaaagggcaaaagcgtcataaaatctttttataaagccttgttactcttgttgccactcacctctttagaaatatttcgtaaaaaaaaattctccgtttagacattattgttcgttggtcactttcatctctcttatccctttgcttttccattgattcagctcaaaaaaaaacaaaaaagtctcatcgttttctctggatctgaccgaaagatcattcctttctaaggtaatcaaaatccaatttttctctcttatagtctgtgtcactgttctctctgtttgtgtatctggagactgtggttaaaaacggtttgagtcgatggtgaaatggtaacgttctgctatttatgtctgaatctaacttaactcattgacatctgtgtctatgctctgacgtaatagaatgatgctccgtaattttgctggaattgatgctgtgaatacacccacttgctagacgtttataaatctatgtcctttactgtttttgatctctggatttagctcatttttgttgctgatgagattcttccttcgactttttgcacagatactaaagtaggtttgagtgatcagaatcaattagagtgtgtataagaggaagaaaaagagaaaacagcatgtgtattgccgtataccgtaaagttttgagcttgaatctgtattgccgtgtgatactgtagattgtttcacctttgaagcaacaccttcaagagtcaaatccttttctttcttattcatcttcccttctttttcggtatattataaacacttttgaaaatgggatcacaacatttctatgtgtaccattgtgaacaaagaatcagctagactaaaagctcactctccttccacaaacaaaactttcctccttttggttttggtatctgtctactttcttcaatcaagatttcctcaaagttatggtgtgccaatcacctggtaagacaagatttcgaggattgaagtacgagaccggaaacgctaacgaatcaacaattgtagtgagagttattgaatgctatcaaccgatggataattgccaggtttgtaccagacaataatgctcttgttatcatacttttagcttatatagttctagtcttctaacactgtggttttgtgattattctttgtgtttcaggctgagtacttcccacccctactcaaaccagtcacgtagttggtaagtaacatttcgctgcatttttcaatctgtgattgtttttcg

SEQ ID NO: 9840 - DNA, 961 bp, Arabidopsis thaliana landsberg
ttccctcgacgtctcatagtctagaacagaacaggagctaaaatgtacaactctaaacgtgagtttgttttgctcgctctctgtataaaaaattgtattctttggacttcattatgttcatgaaggcacctgaagtgacccagcagactctgaaataaaatgcaatacattataaatacggatgaacctattacacagccaaagtatctaatattaattcatagagtgaggttttacttacaatcatcagatagtaacatccctatgagcaatctctattcctcaggcgttggtatagatccaagtaacccgatgattctggtctgataaacctgcataatagacaaaatggaacataatgtgttcaggggcgagagcattaaaatcacggaatattaacgtaagtaaattgtttcttttaaggtagaaattttgggagataggagttagtacccgtgccgaaacaagaagtcaataatgacaagggaacagttcgccttgaagaaactagttttcttaatcacactagcaacttgggctactggaatcaacttgaagctctcaacttctccatctgcaatgtagtttggactacaatgttatgaaagagtctctctaagcagcaattcagaattactcattgccttactagtgattgcctaaccttgatttttgggaacaaaatcttcagggagttccaaatcataacaaaacagcacatcacgtttgaaacagtactgatcgatgtccaaatatgagacagcaccaaccgctattgccctttcataaacataaaatgcaacaggttgaaatcatcaagagagcctatacatactactttgttcaagactgcagagtatgtcttacctatcagcaatggctctggaaatcccagcttcctcttcacattcctttactagatttccaccgcagctaatcccgtgaggctatggttcccagc

SEQ ID NO: 9841 - DNA, 461 bp, Arabidopsis thaliana landsberg
tacccgttccgaaacaagaagtccataatgaccagggaacaactgtccttaaaaaaactagtcttccgaaccacattagcaacttgagcgactggaatcaacctgaagctgtcaacttctccatctgcaatgtaattaagattactatgctatgacaaagtatatctacctgtctatctgagcaagattactgattgctttattagttattgcctaaccttgatttgtgggaacaaaatcttgagggagttccaaatcataacaaaacagcacatcacgtgtgaaacagtaccgatcgatatccatgtaggaaacaacaccgaccgcaatcgccctttaagaatacacaaaaatgcaagaggttggaaaatatcaagagagctatataggtactactttgttaaatactgagcagaatgtacacatacacttgggtgaatcaaataatgtggcatccaccc

SEQ ID NO: 9842 - DNA, 1650 bp, Arabidopsis thaliana landsberg
cctggcgggcagaagatgaggtaaagacttgagactttaaattttgagcttgaagcctcgagcatgatggtggtgtacgctgtacttctgtactaatacacttgcttgtgattgcacaggaggctgataaggataaacagaaaagagatgctgacgagatgggggatgcgatgaagtccttggagaacagaactttggattctaaaagagaaatggacattatagctgcacttgatgaaatgaaatcaatgaaggtatgacacagctgcctttttgtatcttctacttactcgcgctctctcttgaattcttaagatgttattatatttcatgcttctgttacatgctgacataagagttttgagtactgattttctattattttgatttttttcagtctagacatgctactgtgagtgtagatgcaatgttggaggccttgcaaagaaccggcgctgagaaggtatgctcctgttactctgttactttttcatatttgtggcgatttgatattgtcttcacagaatactgtttttaagtttaataagaaacagagattccagctttcgtgtttcttgataactaaaccatcttgttgctctttgtacgtcttttgtcgaagtgtacctctgacaaaagtgttctgtaccattgttatcttaagttatgtcgtactgagccaatatggttattttctttttattttgacaggtaaaacgaatagaagaagaagatgaagcagttataaagtcgatatttggtgtaagtgttcatgtcattcttgcataaatattggttcttcacatgacatctagctttgctaaactttttcatatttctgtttcatctgaaatgcagaaacagaaagaagttattaggagaattgcagatgaagaaattgatgatgattatgatgatgatgatatcgatgattatcccagccttcagaaggagaagaaaggatcatcgtcagatctttcaaaggttcctctatcaaaacatatatctttcagatttccctcatcttctcatcatgtttcagattttttggaatcaggactaactgttaattcttttatctttgatacagaagaggaaggctacagaagtaagtccaagcaaccccacagatattttgactagttcttctgcaggtgggttttttcaatctttctttcaagtttatcgactttgatttcctttcttcggttgaataatgtttaacgggtttctccatttacgaccagaaaatccgaaggagcccaagaaacaagctatcagcaaacaaccctttaaatccgctcacataaaagtcatcaagaagcaacctcaaccaacttcatcgtcaactccggctcctgcaaaaccagaggagaagaagagtgatggtgcggctaacaccagtttagcctctttattccagaattatggtagtgatgaagatgaagcttgattgtttttgttctcaacaagttccgcactttctcagatctcatatcactgttttagaattcgagctcttacactgtcgatatatgtgagatctttcagaattttcaggaatttgttcatgaaattgtttttgcaattgatttggattgatagttagcttctgatcaagcggacccacttacaaaaacttacaggtaa

SEQ ID NO: 9843 - DNA, 1989 bp, Arabidopsis thaliana landsberg
gtgagaatatttgacaaagatctgtgatgttgatattttattaagattttgtctgcctgggtggtgaatggggtgattcctaaactttcgggggtcgttttataagaaaaattgattttattgggtggtttacttggtttaatcaaaaatttagctcaattgtcctaactggctaactctatggttcaaatatatgattcaaatttggtttagattgttggttcggttagttaatttggatttcatttggaaactgtgctcctaaggcacctatatcttttatcttttcagcaattaaatagcaaagcctaattaaggaaagggtatcatattctatcattgaataaaatgttaaatacaaatctgtaagtttctaaaatctcttagattttgattaactttatcaataaattttgtatagaactaatcaatcatagactagtggattcatatataatttgaccaaatcaatatacatttttcaaaattaaattaaagattaccttccaaaactaattaaagataccttgtttggaaaaaaagagattaaattatcttccataattaagtaatatgtagagaaaaagatttaagtaagtaatttatggctaccaaaactttttgttgaatatgtgtatatataagttgacaagaaaataatatgtatatcgtccattgaatcgaggaaggaggaacaagggtgaaagaagataaattttcagtagcacaaaagagtgaaatatacacaacaagaatcatgagatctgctactttattgttggtttcttgtgttcttttgtctttcattttgggcactgttaaaggtaaaatctttaaaaaaaaacctcaatttctatcaactgcgaaattgtatgttcttttcataaacaatggtttgtataccatggtctaattataatcttcttgcatgatcaatgactaagatctttaatatttaacaattcttttggttgatataaaataacagaagtggaagctgtgttgaagccaatggaccaatgcggccggaaggatatatttttgggaggatgcggcagcaacggaagcaaaacatgcataaacgactttgttaagaaaggaggtgtagccgctaagcctagtagttgcgagtgtgatgactttggggaagaacatttatgtagatgttatgttccttgctagtttttgttatagttctacaaataaaatttacaatgaattatataatataacgttaacgaaaccagtttaatgtgatgtgaaattttgaatcttcttagatgttggcaatattgtaatgaataacagtcgcaaaacttataatacctcaataaaaagtttcgtttccgtaagactactctacttgactcttaggtttgaatctcttctcaaaacaaccatttccattatttcgttttttgatcttcatgagtatcttcacgtggttcttctggaagcaaagatgttatttctttgtatccaatggtttaatttggtcttacttaccaggaaccatatgaatgtaagaatgttgccatctcaaaaaaaataaaaaataaagcgttagttagttggaatttaatcaaaattaaaatacaagatactgtatttattagttggctttgtcttaattcaccaaccacgatctcgagctgtgctttccattaatacaatatgtcaacagtttcatattcttaagattcagtagaaaaaattgaccacaagacaaaatataggtaggacgtttcaatctttacaactattttgataataaattagagacgagcttaattatataatcagtcaactagaaatgattattataaaattacagtgttgattaaaaaaattaaaaaactatataattgttaatttgcatgcagatacaactatacagaaagagaagataggatgaacaagtgagtctcttctttctctaaatccactccgtaataagttcataatctatcatccaccatggagaaaaca

SEQ ID NO: 9844 - DNA, 475 bp, Arabidopsis thaliana landsberg
  unsure (1)..(475): unsure at all n locations
gagagagattcaccagctacttcctccagaagaaaaaggggcggatgtgtaagagtcactatagagagttgaaaatctgttgagtttccatgtgtaaatgggatctttgatgttttcttcaaaggagaaaacttcccattcattcaaggtttgagcaacgaagatgtcaattccaaacacacactgttctccatcgaaaatgtatccggttgtcagcgttgagaacaccgatgtgggttgaaattacggcactccgtattcaggtttgaataaatgaaacctccttgcctcaagtttgtacaacaacattcatttatatagatgttcagttaagtactggacccaaaagatagtaccatgcatgatactttattttttctnnnnnnnnnnnnnnnnnnnnnnatagtaaatgtgacatagcatatcattattgtccaaacatagcaataaactggaaatgaagatcttttttttt

SEQ ID NO: 9845 - DNA, 779 bp, Arabidopsis thaliana landsberg
  unsure (1)..(779): unsure at all n locations
cttgggacgatgatcacatattcatatacttgtctggtctcatctttagtaggagaaacgatcgaataatcatagaaaatacttctcgaaaagcaactctctctctcgaagaatcctttgccccatgtacacctacacataacactcaagtctcaacaagacaatcacaactcgaagaatcatatgatcattaagtatgagcgttttaccttccgagcatcannnnnnnnnnnnnnnnnnnagtctccggagacttgagaaatgtggatccatttcaatggccattaaggcatcaatacctaaaactttgtaattcttgtcgaccaacttgacaacctccatggtaatgccatatagtcatcacaatgtggatgcaaaactgcgtcaagttggacttcgaggacgcgtgtcattttaaggttttaattttgtttcacaaaaattgtcatttttgtgttttcaatggaatatttaaaaccaaatctcttttttttttttttatctctattatttcactttatcatttagaaagagaaagtattatctagtgtattagtaacgggtagaaataaaatttgtttacttttcttcatttgtgtgaaaatgttagaagacaataacacaacaagtaataatagatgagaaaacttttgtctactctctattaagaaccttaggctttttgttacttttcgtggaaagccgctctttgccgaataatttcctgccccatgtacaaacacatagcactttcacaatgatttttattcaaacatcat

SEQ ID NO: 9846 - DNA, 1195 bp, Arabidopsis thaliana landsberg
atcttagagctatttatgtcaatttccatagaatttacatatttttatatgtgcttctactttagcagaattttataacctagtcttgctgaaattcaaataaaggatttgtataacgaaacttaataaggttattatcttgaaaacttttttttcaaaagcaaaaaacttgtaatattaccttttcaagaattagataattttactttatggtcactttaaggtaaataaattgagcaacttgccattctggcccatttttcttttcaagttgctgtccatcaacttgctttaagtcaattcataagcgtttttgttcatcaacttggatccggttaacccaaatcccggttttacaattaaacccagagaacaacaatcttttttatggttctcaatttgttcatcagaaagcttttttcatcatcgttcatggcatcctcactgctttgatccagtcaatttcgacttggaaatcgcctgcgcctgatttagctccaatgaaaccacctccttgtgcgttaacggatagagacataccaacaacatgacctggattcatctccatttctgcatctatcacgtttcctttccatgttggtaagtagcgagtaagaggaacctgaagaagaaagatgtcacacttgagttaacaagttacagcaaaaccccttttaacactagttgctttgtagaagtacgagacttgccttagctgtataccagtttccctttggagcaaaaacaaaagcctgccatgagttgtcttctgcttgtcctggcgagttcacccagttctcagtatatatctgaattggaactgcagtttagtttttagtaaaaaagttatgctccttgaaccttgtgtttcatctggagcaaaaagacatgaatgttgagcatgagactcacagtagaaatatagcaccttccatctcctttgagcctcagggctatggaatcatacccttcgagatcaataaagccatcaaactacaaaaatgggaaggggttttagttaagtaagttgtgcataaactcatgcaaatctttggttttgattgatgatgtgatgattagtaaagaaaaacaaaacctatgattttaaccttctttgaccgcattccacagaaaccactccgattgatattaaattatagaaccttccctcatatccgtagagaggttcccagag

SEQ ID NO: 9847 - DNA, 1467 bp, Arabidopsis thaliana landsberg
gctacattgattggcaagctcagctactatgttgatgcttctgagtgtctcttcgttgacctccattgcttcgtctatcgcctttgggaatgagcctttgttgataaacattctcctaaaccatgtggcaagatgtacttcttcctcagatcgtgcaacatcaagagcttttcgacccgttagtagctccatgaggatgactccaaagctgtaaacatcaacctttgttgtaactcttccggtcactgcaatgtacatagagatttcaatattttacatttagtgagtttagaacgagtagcaacatacaaaataagcataaaaccatacctgcatactctggtgcaagataaccaaatgttccagcaatcttggtctcaattgattgtgtaccttctggtgcaagccggactaaaccaaaatcagcaactttagcatgcatgtcatctccaagaagaatattagaaggtttaagatctctgtgtatgaaactttgatgtgctaaagtatgcaaatactcaactcctctagccacatccaatgcaataatcaaccgtctagtccactcgagaggcctcaacccttcttccttccaatagaaaatatgcctacttaatgtcccttgtggcatgtactgataaacaagaagtctctcattgccttctaagcaataaccatgaagaaccactagatttcggtggcgaactctagtaagaacagcaatctctgatttaaactcatctaaaccctttccacttataatcgaagattccattctcttaaccgcaatctttgttccatcatgcaactctcccttgtaaactattccaaatcctcctctcccaagtatattcttctcatcgaaattatatgtagcatccctcaaaacttgtattgagatcacaatatttccagcttctcctagatgagcgtcattaccactgaatccactttcactaacaccagtacacagattctcaattgtaatcttgaacgcatcttggtcactagattgttgttgaggatgcatcttatgatattgcatctttttcttgaccaaaaagaaaatagcaacccctataagaagcaaaagctagcaaaatcccaataacagaaccaacaattttcccagcattactagatgctttctttccagcattgccattaggacagtcctcaaaattcccagtcgtgttaacaatagttgtgttaaaacgaggtacttcaccacacaaccgattcttcgaaacatccagtgttttcaagttactcaacttagcgagctcttgtggaatagtaccattaagattattctgagagagattaataacacgaagagacgcaaaatcagcaaatcgtggagatatagtgccgttgagccccaagtttttgaagttgataactgtgatatcagttccagtacaagtgatccctacccatccgctacaaggatcatttcctttccat

SEQ ID NO: 9848 - DNA, 707 bp, Arabidopsis thaliana landsberg
agctttctcagtcaaatcttgcactcctcttctcttatacatcttaaaactcatctctctctcagctgccatattcctcaccttctctgtaatctctccagcaaattctctattatacaatttcttcaaacccttcataagtttagcaaatgtgtctggttgtggcatgaagtccatctctatcatttcaatacaataagaacacgcttccttttcatagccttttgagaacaaggcatgtatccatattgtccaagatgatacattcagctcgcaagcacctttacttgtgatacaactccaaacatctttcgccatttcaagcttcttgtcttttaaaacggtatttagcaataacttcagagttccatattgagaaacagagaacagtcctcgagttaccatttctttgaagtgatcactcgcttcgagtaaacaaccttggcttgctaatccattgatcattatgacaaacgtatctactccaggactcaaaccgttttcttccatttcgttccataatctaacagcttcctttacttctcccaacttacaagccaatctgatgacgacattgtaaatgccaatatcaggatgatcctctatttgcctcatcttctccatcagctccaaacactcttcaaagcttacattcttctcatgagccaccattatatgcatataggtgagttcagacggcatgagcc

SEQ ID NO: 9849 - DNA, 273 bp, Arabidopsis thaliana landsberg
taactaaccttaaattcggcaggcttccagactagactttggcaaacatcacaacgtgcaagaccgtctaataaaacacctttcatatttatgcacacacaatgttacacattttatataatctactttgggaaaaccttgaaagatggggatagatctcaagagtttcggtactaaatgcatctatgtagggaagatgaatgatcattcaaagaagctgaatatcgcgaccgaggttctcagagagcttgtaaacatcgtgatgaaaagagt

SEQ ID NO: 9850 - DNA, 1829 bp, Arabidopsis thaliana landsberg
taagtctttagctaggtttttgatactgtctaatgctatttatgtttttgaggctcgtaggatagataaaattgcttacaggaatgtgagagtcacgggcatttcgcttagggtcggtagcggagaagacggtgtaaacgaggacaaaagtgccgataatctcagcaccaaccccaacaccaacattgtatccgtcggagagcatgttggctccaccaccgtagcggttgtaataagtcgactggaagactttcaccaaaccaacttcacaagtggctccgagacactgagccaccatgtacgacacagctctaaccaatgataccttgctagctaggaatagcccaaacgtcaccgcgggattgatgtgtccacctatacaaatatatatgataagtacgtataatttcataaaaccagctgatccagatgagatagatatttttttttttttttttggtgttttcacatgattaattgttttttgcaaaacttcgatttagtaattcaattagttaaattattgaaaatcgaaatgaaacattaattttatataaaaactaaccttggtttgaaaacaaaaaaaatcttagaacatacattatttggaattttaatttggatggaatttaatgttctagaaagctaagttttcttaccacatatgtatactggccaacattgtgtatcatcaatcatttaactactatagtttggttgatttggtatttttgaaattctgcttctttgttacgaggacatgtataggagcctcgaatgatgaagcatgtgcattttgctatgcaaatcagataatgcaaaaaatggttaaggaaagagagagagagagagagagagagaccagagatgccggcagtgcagtagacgaggatgaatatcatgccaccaaaggcccaagagatgcctaggaggccgacactggcacaagctccgccgccggcgttgatatcagtctggctcttaaagccgatgactgtcaaaacagtcacgtatagaaagagcaaagtagctatgaactcagcgatgacagctctgtagaaggaccacttcttgagctctctcacctcgaacgtcttcacaggcggtgggtctaagtagtccttgccggagagcgactcttcctccgtcaactcatccttcgtcattctttcagacttagccttcacggactcaaaaaagaaagagagagagagaagagagaaagtgagagactgttataagatgtgggtgatgtgcagagatggtgagtgggtctatttatggaaagctgtggctttaggtttttcctcttttgcaatgaggttaattaatttatcttcttcttttttatttattaaaaagttcgtaaaataagggaacactacaggtgtttatgattgtgattagtctatgaagactctattgatgtctaaagaatatgctttcaattgattttgatttggttattttgcaacaattttgttgggggaaaaaatcactaattcctctcgccttttttttgctggtattttcctattaagttattttacccacgaacaaacaagctagtttacataattacaatgggcaaacatttcatgtagactacttgatacgaggctttgtgttgtgcgcaatatcctcatagccggagctaaacctttaaagagaaattttaaaatataaattttgggtttttaatttttctttctaaccaagtaactttaatacccgaatatgtttaggtttagtataactgtcaaccattatttattttttcctgagagtcgccataatgacagaaaaatgatagaatggttgtattcatg

SEQ ID NO: 9851 - DNA, 1910 bp, Arabidopsis thaliana landsberg
ctttaaaatgactgtgacattccctaaatgactgtacaaagcagggattaatcaggtaagactgaggtcattatttgaactttgtccacaagatttgtatccagtcctttattggtaaagaaggatgaaactgcaaaatcatatccatcaattcacaggttactaattaagtcacaattgataattgggatgtcactcatatcagataaagctaaaaagtctataacaattaccaacaacaaaagaaccagtggattggattcatcttgtgtcaaagggttaaaaagtactattgaacttgagacgtcatacctgtgctgctaatagtcaaaacatccaagtacaaaagcaatgaactgaaactagcagcactttaataaaaaggacaaaactcaaactttggatgacataagtaatatgatgaggtcaaaatttccagaaacagatagaagaaaaggagagagcatccatatcaaataaagctaaaaacttgtaatagttataacaaaaagggatcactctgtataataataaaagctcaaaaacacaccaaaaggaccaggcaatttcattcccatcaacaacaaaaaaaaagataaatgaaaacgaagagtaatatataccaaactatataactcgattcaatttcatttcttgtttttttgttttgttgattaggaaatcgattaagctacagaagaacattcccttgcaaagtgaccttccttaccacacttgtagcacgcattatcattacctcctccaccgcttcctctctggtcacaatcacgagccaagtgaccagaaccaccacactggtaacaaccacgagaagactgtctcttagtcgcacactctcttgcaatgtgaccaactccaccacatgaataacaagttccacttccaccaccaccgcttctgacgtttccggcagcaaccttctgagtacaatccctagcaaagtgaccaacatcaccacaagtgtagcaaccatcgtttccacctttgaccgctccacgttggtctccgtttccaactgatttctgagtacaatccctagccaagtgaccaacatcaccgcaagtgtagcaaccatcgtttccacctttggtggctccacgttggtcaccgtttccagctgaagtacaatccctagcgaagtgaccagtatcaccacaattgtaacaaccttctcctcctctagatctacgttcaccacctccgccgccgccaccaataccacaatctttagagatatgacctaactcaccgcaattgtagcaaccgcttccaccgccgccgcgcctagcaccgttaccacgagagttattctccttcttgagagaaccaccaccaggagcagtaacattgacggctttagtcttaccgtcgcttccctgagtaatagcgaactcaaccgcatcgccgacggttaaactccggtaaccttcggagacaattgaagattgatgaacgaaaagctctacgctgccatcgtcaggagtaatgaaaccatagcctttagaagcgttgaaccagttcaccttcccggtagatctcgccgccgattgatcctctgaagccatcgttaaaaaaaaaagttgaagaagagattgagaaattagggttttttaagttgggaaatccttaggcgtgtgtgtgtatatatatatagaggtagagtgggattaaatctgtaattaagaggaaattaatgagaaaaccctaattttagtggggaatgtaattaaaccctaatttgactatgccgcctaattaaaaattttggtggaatattcttcgggactgggaaaatttgggaaatttgctacttcacttttcttttatctatgtccgtttatcagctgtgcacgcgtccacgcttgagttttaatcgtggtcgtatgtta

SEQ ID NO: 9852 - DNA, 1161 bp, Arabidopsis thaliana landsberg
tgcattggtgacaagaaaatcagcactcgacaaaaactcttgtcatcatctctatcaatgagatctacctcttcctgcaaacaaaaagaaacaaatttaatagatacactgttgaaagctcacagggcaagcagatcacaggacaagcggccgtggctttaaaaggtaatctggaactatatcaaagaaagataggtgattccagagtattagtccacagataggtcaaatgcataatcgttatcgcaattaaacacagctactagagacataattatacaagttcttaacagaacaaccagtgagtttccccgagaaatagcttgttggggatgagataagcaaagtacactgaatcatacttgcgagcaaatgagagcagtaaagaacatgtgcagtatcgtttaataaacagcaaattctccaatacagagaagaggggaagcatattatcttacaagtaaatgagagctgccaagagctcgagcggtgtcaacatacaaatgtctgcctaaaatgttgacttgaaccctaatgtataagctaagcattgtcacagaccacagagacaaaaccatcctcgtgaaacctggcaaataacatgaatatacaggtaagaaacagaatttgatagagtaagagtaggtgactgcagtgcatactcaaaatcttgagctcatcccagagctgaagtttctcaggtggactcagcattcctttcccttggttcagtctgtccataacatgagagacatcgatctcctcgctgatacggatactcaaaaactgcattgcgtgaggcagtgtggtcgaatccacaatcatctgaatactctcgaaatgtgctttcattctaaacaagagtacaaacaagacaggtccgttagagaatccataagaactgaagtctaaaggatcagattttatgagcacagaacttaactgggttttgatgatttcgtcattttcacgctcgtgagcgagttctcgttccaaatcagcaagcctacgagtatgggaattgtatagtttgtagagtaaatacccacttcccaaacaaccagccgtcaccaagaccttccttctatgcttcctccaaaaacccctaatttattccacaaggtattgaatcaattaaaaaccctaactttattcaccgaa

SEQ ID NO: 9853 - DNA, 1079 bp, Arabidopsis thaliana landsberg
  unsure (1)..(1079): unsure at all n locations
ctaattcatcggccaccaaaatattatctgtggtcaatctctcagagacaaaagcagctggatcacaggatacaatttggggaagaagaggttgcaatctcttaacaatgaccttggatattatcttatataaaacagagcacaagctaattggtcttaaatccaccatttctgtaggatgaatcgtttttggtattaagcataagtgagtaaaattccattccacaggtaaaactcccatctcaaaaaaacgctgcacctctgaaatcacttgaactccaacaatattccaatatctttgaaagaacagagcagacataccatcggcccccggagctctgtcagctttgattgagaaaacggcttctttaatatcctgggaggacaccttttccaaaagaccagtgttcatttcttcagtaactcgtggaatgaacccaatgaaccaatcttggaaggcaacaggattagaggatttgaaaaggttttgaaagtacttggccgccacatcccctttcgcagcctcagacttttggaaaactccatttgaatcctttaacttatcaatcctctttctagatctgttttctttcaccgcagcatgaaagtacttagaattcctgttgccacaacgaagccatctctttctcgatttctgatgccaaaaaagttcctcatctctataagccatagctaattctcttttaagaacatgaactttctgcaaactaggccacacttcagactggaccttctccaaagcattttcacacatatgaatcttgtcctgggcattcatattattatttctcttccaagagcttaaagcttttnnnnnnnnnnnnnnnnnnnnnnnnnnnnnnnnnnnnnaagaccgatttctagctttccaagcacctgaaatggcaatctgtacctcaggtttgaacaaaaatctcttatcgaaacggaattgtcctcttaagaatcttgagacgagatgagactgatcagaaccgggcgatgatcagatccacgcatgtcaagaaaaacttgattagaaagccggaagcaatcaaaccactctttattcccaaagc

SEQ ID NO: 9854 - DNA, 1261 bp, Arabidopsis thaliana landsberg
ctgctcttgatgataaccaaaccggtgaaacattttctcaacgtgttgaatggttttaccagagaagccctctccttctctcactctgtcaagatctctacgatggttacgccactctcttggaccgtttcaatcaaaaccctaaacaagtcattcctcatgacaatgataccgatactgacatcacttctgaagtagagagcatcttgtcctttcaacagatggaagtctccacttgtgatatgcaaaagaacattgaagacttagtctcgcagctcgttactgcaaacttggagaaagataccgcgaagcacatattacaacgcagagaacaaacgttgcaagaagcttgcaagacaattggcttgctaaagaagcttgtgatgttgcttgatatggagaaggaagtagctgtagaagaaaccgcaaatctcggacacaaacttacttccctcttggaagagaaccgagagctcgccagtgaagcgctgttcatgaaaaacgaagcagttaagcttgctaggtgcgttcttaagatgagggatgaacattttcacaagatgtgtcatctccagaaccaaatctacgagctgcagtcatcgagagagcctgtctacgaaaatgaatcctcgcagagctgctttggattggaaaatagtaagaaaaagagcaagaagagaaagatgagtgaaacaagaagtgaaactggagagaaaatgagatccaagtggttcaagagactcaataccatcaatccctttaccaaatgtagcattacgccattatcttctcccctctatcatgctgcactctaaattagttactactctttacattgtatttcttacgatggataataatgtctgcctatgttcttttgccttgttagacaagcaacatttaacatcaaaataaccttgtgattttaggtgcaaactaagtcgaacaagcaaattccggtaaaaatgttcgataatatattatgtacaccgaatatataagaaaaggttcaataagactacagactaaaaccctatgattcaccactcatctgaccacaatggagacattgttgttgtgagaaagtgggggaataacataccgaaagattactgtctaagtaggatcatctcgtgtgatgaattttgtgttcgtaacactctttctataccaggaataacataccgaaagattactgtctttgtcttaaaagtgacagatttcacgagcctgccctgaaccctgcaacataatactatga

SEQ ID NO: 9855 - DNA, 1655 bp, Arabidopsis thaliana landsberg
aaattttcaactttggaagatttttcttcaattttacagtttgggttcgaatcctgttaacttgtggcttgatcggaaaaattttgaagggcaaagtttctttaattgtctcatctctctgtttagattttgttgttgatggctttgtttcatggtgaagctggaatcgcggagaaaagggttgttgttatgtttatggaaagtccgtgtaattcgaatcagaccctttcttttggaaccattaaagtcacctcctttctctctctctcttttcgtttcttttaactagttttttgttcatctctctctcttatctatctacgatcaccgaatcatcagcttgatgtttatgatacatcaagtgttttgctctggatgatttattatctacatccatgttgttaccgtaagctttttttatgtggttgtctgtttctttctttctttctccgtgatgcttttttaactttcaacgacttgctttatgttttggtggaagacaatcttaaagcttccatgactttattgaagctattattttataggtttttctgtttggtgttagtggattattactatttgtatgcactttttaaccagatatctgtattgatacttgtttttgtcttgcagggaaagtgtttctttgattcatggatggatgtgctggtaaacgatctgttgaccggttggttgtgcctcggaaagccagtggtcttaccctgcgtgagaatatgaacaagacagatggtaagaatgttcctttctgcagccgagttggttgtactgcaaaggtaacttctaccaagagatctcggattggctctacggataacaatacaaaagttggtctgcctccggttccatctaccttaaatagaaaggaaattgttgggagctcatctcgtactcctggtggatttggatacttgagaaagccagccaaagttactgcaagaagacagccgtcatctagtttagacactgaatcttcggaaacgagttgtattcatgatgatccagctgcaacagagcccacacttccacgccaaaagactaaaagagtcacaatcaatgttcatcctcaaagcgctgtctctagagaagttgtaataacaaaggcaggaagctcaagtagaggaaccagcagaattagtcatccaaagtctgaattgggtacccgcgatgctctgacgggtccttctgtttctacatcttctggtaacagtgagcacactgtaagaggcggtttgagtaggcatagattgaggaacttgagctgcaattctgtgtctgatgttcttccaactaactcaaactcagcaacaaaaatcagtgtgactaaaaagaaaaacgctgatggagagagcagcttatctagcaaaggtagtaagactagtatgttggttccaaaggtaaggaatcaaatttcttctcatggcaatggcgtcacagtttctgataacagaagaaatcgagtagtaccaagtattagggacagcagtactgttgtttcaaatggttgtaggagagctggttattttggtagatcagagcgacttggagctactgcattctctgctacttctggacaaatgccttattctacaacaccaaccgatcccaatccttttttttcgttttgcccatcaaat

SEQ ID NO: 9856 - DNA, 1864 bp, Arabidopsis thaliana landsberg
gatggagcagggacataaacataaggctgtgttcctttcttcccatccacttcgactggttcaaccacttcagcttcaaacgtctttgcatcgtgagaatgtgccatctgctgttgctgcggctgcacctcagggcttgaccatttcccggaaagagctacatccatcatctcatatatcttcccacccagctctgctggattatcgggctgtagttttgagaaacaacaattaagttttaccagtatttactttatttcaattctagagacaacaaaaagttaagaatgttaatgtagaataggactcaccgtgaacccactagaaactagtgctgcgtcatacataagatctatggctctcattgcatcttcgtcatttgggttactattgtaagcagcctgcagggtgcaagaaaaaaacaagccaagctcaaaaagcggctcctagatttaattataatagccaggtacaagttatgatgaatggtgacttcacatttatgttcttgataattgagtggtcgggattgatctcaaacactcttctccctttcatgtagtcgaggcttattgtgtcaccagttgattgtgccttcattagcctgtccagataacatattctgtgttagttcaccaggagcaaaaaaggagaacggaaatccttgcttaagaaaaaggtcagatcttacctctccatattggctgaccaaccaaatttaccagatacaagaacacagggggaagaactaagacggttggaaatttgaacactggcaaccttgtcacccaatcgtttctttatccagtcacaagtctgtccaaactcttttttcactgctgcctctttctcctcgttcttgtctcctgtcaatacaaagatcaaagccagaatttgttattatacataagtgattacctgacatgctaaatcaaggaattacatcaggcacttgcctagatccaagtcttccttgctgatatctacaaaatccttctccttataagcttttaaactctgtacggcaacttcatcaataggctctaccaaatatagtacctacgttcacaatacaaagaaatacatgtcaatcacctctgagttaataggaatatttgcaaggaagaacaaaacgaggccccattcagaagaacaacacatacttcaagtcctttctccagcatcttttcgaggaaaggtgcattcttagcacttgtaatgctgtcagaagcaatgaagtatatggctttctgttcaggtttcatgttctcaacatactcatccaagctgatcatgtcattctcactctgggaggagaaaaatcgaagcagtggagctatacgcttgtggttttcacggtcttcgatgcaccctaatttcaagtgtttgccaaaattatcccaaaacttctcatagtcctgtataggttaacaatgccattctcattcgtcaggaaaatcatcaccagaacgtagcagtgatttctaaagggaattaaaaaaggttaaactgtaagcttaggggaacaagagttatgaaacatacttctctgttttcactcaaggatatacccaaaatcatatcaaaagccttcctcactagacgtttcttcatgatccgcaccttggagacacaatacaaaatcgtaagcttaacatagcattgcacttaaaacaaaacatatatcataaaggctttgcatacgaattggatatgagcgcttactatgcgactttcttgaagaatctcacgtgatacattaagtgggagatcatgcgagtccacaacacctttaacaaagctcaagtaccgaggaaactggccacaaacaccacaaaaatgatatcaatataattagaaagac

SEQ ID NO: 9857 - DNA, 1277 bp, Arabidopsis thaliana landsberg
gagtgatcatcaggccggctccgatcaacagcagcccatgagacgatatcaactccgttcacaacactctggaaaaactcagactcatacctgaccaaacaaaaatcaatactttagaaatcttttcacaagacaccaacataggaaaatccaagtagatggatgcatacttgatggggaagatatcgcgatggatttgctccaaacgatctagatcattagggtttataggtctatagtgaatacttgggcaaagagagattcctgcatcttccattgatgaatcatctatgaatcttcgaggaaatcgcgacattgtttggtatccgaagaaccagaaaagccacttcccattgtgaagtgccagatcactggatccgacccgttgaagtaaatggatccggatagatttaacgaatctggatctgagtgggtttgtttggatttgattggttaatcttcggcgaaggaatcaatcaagaaccgagtttcgagcatgggaaagaaaaaggtgcttgcttgctttgccctctcctctgtctcttggggctttttctcgttccaagtgaagcatcttggctcgtgtgctttgcgacaaccaatcacgtgcctcttttagaaggagagtactaatgtactatttatgaatggaatattcgattctcttaaatgaaaaattgttccattttcattaatataaccatttttaacaataaaaattcgtactgttttttctatctgaaaaaaatggatttgaaaaaattcgtactttcgattcataatctgctttttattattattcgttataagtctgtactatggtaagagaaccttaaaatattcccctccacaacaaaaaataaaaatcaaactggagaagagttaggcagtaaaggagaatttccttgccctattaactcgattaggcgggccaatacacttgttatgtgttttccacttttcttcgttacaaatttagattagtcttacatgatgagccgttagatatcatagaaagaaataatcttataaaatttgatagatttctataatccacaaatctggatcgatgtttatttcagatttataaatattgtctttaaaaaaaaattatttggccgtctcggcggcaagcagagagagagagactcaacgttttcgtaacaacaaaactttgagtagcagaaaattatccaaaaaaaaacgtgaaacgcaaatggaaaaaattgagaaaagtaacgcgagtccagtgccacgtatgaaaaaaagagcttagg

SEQ ID NO: 9858 - DNA, 468 bp, Arabidopsis thaliana landsberg
atttttttaattcacatcatttatcaaaaataggttgggagaaaccttactttattatataacataacattcacatatttagcaaaaagaaagaacgaagaaaaatgtaaacacaatacaagatatgagatatcatcatcacaaagaatccaataaaaaatcagtgtcacttattacaaaccacaacatcttcaactgccagatggcaccaccacagccactaccaatcttctattaggaccaaggaaatcttcgaaatctcgattaaactctctcaaccaatcagaattcactgacatgtacatttgataaccctctaacatgaacgccttctctgttataaaaccatattggttacaccatcatatacataactcacactctgtcttatactcctttcctttcattgtagttaacgaaaagatctccattatggcaacatcagctatccagcaattctccttcgcc

SEQ ID NO: 9859 - DNA, 1525 bp, Arabidopsis thaliana landsberg
  unsure (1)..(1525): unsure at all n locations
aaaagagtttgaattaagataacactgccttgtttcagaaatattgttatgtaatcaaagcacaacaaccgtacatcattcttgagctggaagattcttgtttttgagaaaacaaattctgaagatgttgtagaggtgaagagttggtgttagcattcttgccaggcttgatttcaccaagaatctaacaacaaaataagcctataagcatcaatatcaaactgaaatcaagaactctaaggtctatagttataccttgctgaaaatatctgttgttttactcagcgacgtgcaattcacagacaatgtatccactggtggcaaacctgcctgataaaatgcaccaatgttcaatctttccgtcgatgacattgcttagaaacttacaagttatggtataactacaaaaatcgatacctgagttgaccaatcaccaacttgttgtactactttctccatggacagtgattttccagttccaggacaaccacatatgtataaactcccagccttttgctgatctatgcagcctttcacaaactcgaaaatccgaatttgttcgtcctcacggcaaagaattgttgatggtgctttggacacgtgcaatgcctctttcacagctctcatttgctcttcatctatagactgatatatatatcatcatcacatatgattaacataagacaattgaagaatctaatggatcacgttggtttacctctaggactccacttagatttagtgcctaaacaatcagacacagccaaattcactggatatctcagaatttcattagaatcttccacaacttcctgcaaacaaataacatctgaggattgatacttattcgattccctaaagaaacttgatccaacaattgaacttatgcacatcaacaatttaccttttctgacattccgggattgggaacagaacttggtagatgagatttcaatttcttcggcgtagagactgaattaccagacaccgccgctgaatccgatctcatctttctcttccgcggaatctcatatgcggcagattcaaggctctcggatttcaccgtcgttccgatggctacaatatgcttgtaagaagacaaacttgtcccggcgttggtaggcatcgttgttaggtcacacaaggaaatcggaaacgaaatttggcagaggaatttactcgtgcttgcgaatcaatctcttggtcgatactactttgtgtaggagcgagaaagagatgaaatttgatagtagcgggaaacgtgaatcgcgacattttcggctcccgcctttgttcttctgatgcccttttgaacctacccagtttcgactaatttttattgggccgaattgtgtaaatgggccaattgttcacgctgaaatttgctttttgtttttgtttttgtgagagttggatttaagatccaaatactagtaatataatttaatagtttgtttatttgatattaattgaacaataaaacgacgtgacgaccaanaaaaaaaaagaacacttaaacgacgtg

SEQ ID NO: 9860 - DNA, 1976 bp, Arabidopsis thaliana landsberg
  unsure (1)..(1976): unsure at all n locations
tttgatctgtaattctaaaataaaaaaattgaactattggatcatctgattttcttgttatcaataacagataaccatggctaaaattgaagagataattccagagttagtatggttgtgacatcatgcatgataccatcaaaactggccaaacataaataaaagatttttaaatgaaaatcaaatacttgagaaaagagagcattgaaccatttttccaggctttttttcactattttcttaagagaataaatttgcttctgttgtttgtcctttaaataagaaaatttactcaaaaaacactttgagtcttcaacaagttgatgatattaagctaaaagtatatcataaaaattagtaaaccgcaaagcctcgcgcaattcgtctactaaaaaggcaattccaactatatcatatattttctattatttttgttggaccgtacattacttgtcattcaagtaaccatcacatagacataggaacttaggaaggatttggtagattttttgaattatatcgatagtgcgctcacgtaacacctagctagaatataatagtaataatatcttttattagtaactctcaaaatatatattttaaatccgcatgttggcaaatcgaaagggtcgtgaggatcactcattcgcggtttcttgtaaatatataatgaagttccaatgtttatttattttttcaaatgaaataaaaaacctaagaaaatatttgaacatcaaactaaattattattgttaaagaaaagtattttggcgatggttaaaaattaaaagagaagaacaaagaagggaaagctaccaaagctttcatatcaatggcagattctggcccagccagtttctggacgcgtgccaatgctatacttagaaaaaacttaacctatcaggttcgacattttcattttcccttaggaataccactattacatgtaaatatgcgaccatgtacgatttttgttacatgtaaattctctgtagtattgggaactctagggattagttttgatgtgttgtcttctttggtggttttgttttttgcagaaacggaatatatggagcaatgttcgacttattatgattcctttctacctctgcatagttcttgtgtttattcaagctttgtttgattcacaagtcaataactctttagataatcaatgtggttgtcaatgcattgacaaactcggagatggtaaatgccaaatgacctgtggtttagaatattcgactcgggatcaaggattcttttgtgctatcccaaaaccacaaccatggcctccattgattctaattccacgtcctgagtatcgtgctcttgatgctaatttcactaatgactcgtgcagacgaaaaaactcttgccctgtaactatacttttcactgggaataatcattctcttggagcaggtatttttctctttatcatgaagcatataattctacattgttttctcattggaactaatgtttatgttttctctagttttatcaagaaatcttctaaggaggccttttgcaatgaactcctctgaccttttgtttagtttagcgaataatgttttggtaagtttcatgttctagttcaatgtctgcattatgaaagtgtgtgaaatctctctgtcttatacttttttaacttgtattttttcaggctacaacatttaagggaagtgcaacaaattatcttgatgcagggattgtctcagatggtagcatatacaatattcaacctcggtgtcctccaaattctaacttttcaatctcaatcggacaatcacctctcaattttacgaaaggtataaagtttttaatcctttagacatcacttgagatgcatacttaactttatgctataggatattttactcttgttgtgatataaactccctttatgtacccccnccagatatgagatgtattcaaggattaaatctttggagaaataactccattgaggt

SEQ ID NO: 9861 - DNA, 1268 bp, Arabidopsis thaliana landsberg
gtctaattggaaacatacatagtcatacttgtttgtatatgttctcacttcatatgttttcttactgaccttcttaaatctcattcatctgcaggggttaaggccttacaatgcacttaccaagaaagtggtgtatgaaattaaggaactcggtaagaagatcaacaatctatgtggtatgtgcacattctttactgcttaagtgttgagattactttaattaacgagttttgtttattggcaatgatatatggttattggttggtgatatggaaattcgcaggtatcaaggagtttaatacaaaacttgcttatgtgattaaaagatagtctctttttttcgtttttcgtttttgtttacctgaatgtgcgttgttgttgtcatgttgtctgattctctgtttggtatcaaatcttttctttcttcctctttaatcaagaatgctttatttgatcagcatgattttgatgatactgatttatctcttgtttagctgttccgagcctattagattgttggatccaaagaagtttgcaggttcagttgtaagtttcttcctctttctcttaagttctaatgaaaattgtcctctttaatctgtgtagtaagttttaattattttgatatcttcgttgttagtataggtgtacatatctgaaaatatagctcttgtttttactggaacatgtaacatttaacattcttgttgtatagctagccttaaaatctgttactaatctattctgggtgttaatgtatttcagagctttggtgtgtgcgtgtatgtgtaagacgtggtgggtgcaagaggcgagacgcctaagggttgattgtgcaccaatgtggagagcgaattctgaagttacgttcatagctgatgcagtaggatccacaattgtttgctaatgacaagattgtattcatgtgaaccatttgggttttataagtacttagaacatcttatcttggtgtgtaatatgtagaacttgtctttgattcttagtgacaaattaatgaagtatttttcatttaataaatcttcttatacccaaattatatatatatatatatataattcaatctagtatgtataaaaccaaaacgaaacaattacatttatataaatgctatattaaaaaaaacataacaatttcaaaacgttgttaataatataagtatgacaataaaaagacgctattatacaatatttaattgcaaaaatataaacgctattatatatcacaatacgatagcagaacaaaaaaac

SEQ ID NO: 9862 - DNA, 1385 bp, Arabidopsis thaliana landsberg
  unsure (1)..(1385): unsure at all n locations
tacacattaatggatgagcattgcattctctatagggcactttatatcgaaagattttcaatcaaaacttagatagattcataaagcttgtaattaaagcatcaaacatatttgttaaccagttattatttttgaaatcgagtagtgttttgttgatgctacatattattccatcataaaaagaaaattaatgtgtgtgtaagtgtgtttgaaataagtcaatatcttagtacagtaattaactaattatacgaagaagaactataagggtaaaaacggtaattacaatatttggtcagccatagttattcccgctcgtctcttgaaaaaaattcaaaccggtaaaccattttggtcatacacgttacagtaacacggtggtctggtcttcaataataaccacgtcagcagcatacagtaaaaactactttaaatgtttttttttattctcacccaagaaaataatttatttttgttttgtcgttctccttcctaaataatttttcaactaccacaattaatttaaaaattaaaaatagagtatatttggaaaggcacaaaaaaaagaaacaaaattcaaaatctgaaatttctcagcctcctcgtttcttcacccagaggagagagaaatctgaggaattcgatcttcgcttaaagaagacgaaacaatctctctctctttctctcttcaatggtctcaccatctctgtctaccatatcctagccaaagaagaagacgagaagaagaagagagggtcacaacaatgctttattcttcttatgtctccagccatgtgagctcccactgacacattctctgcatcttcggaagttttgttttggtttgattcttctcaccgattcctgcgaccgagtttgaccctcgagtttcgaggttagtggatggcttcatcctcatcgagaactagaagcagtagacctccaagtcccgcttcttccacttcttcttctcatctcagcaaccgtctcattcctcgttctaactctacctctgcttcctcattgattacctccgccgccggaatcgcctcccgatctatgacgcctagtcgcaccttctccgactcgggccttatcggctccggcagctttggaattggatcgcctgttccctacccgtcagaggagcttctcggtgaccctatggacgatactattagctctgagcgggatagtatctccgtcaccgttcgttttcgtccgttgaggtatgctagatctgatctcgccatggaccagatctattgcagagattacagttttcatgtagatgcaattggnagcaattctttatctggggtttgcaattcaagnttctatctttgtggggttgcagtgatagagagtatcaagaggagatgaag

SEQ ID NO: 9863 - DNA, 787 bp, Arabidopsis thaliana landsberg
gagtttttagcaccaccaattcaaatatatggtataatcatgattggaactaatctaaatagaaccagaattattatgtgatatacggttactgaataaaaattgtacattatacccaatatataaatactttataaaatcaataatttgtaaacttttacatataatctatagtcattaaatataaaaattacttatttaaaaaccaaaatcgtcccacgagttaaaatctggtttctattaaaaacacatagattaagatataataaatgttttctaatttgtaaaaaattttaccaatagaaaaaaatactacataattcaaaaagccatcaacaaactaaataaacataaattatacatataaatctgagtaaatcttatattgtagaacaaaataaaaaccaaaatatcctataatttaggataaaggaagtaaaaataccataaatgaacacaattttttaaatatcatatgctttgggcagagagagtacaaaataacgatccacctaatttaacgccccacattaaacagaaaagacaatatatttagagcatgtgtgattatgatatgtgattcaacaaatcacccaattagattaccctccattcccccaccttccacgaggtggcgggggaaagattttaatcccaaattaatttggcaatgcttgtgtaaaacattattatgatttttgtttttattttatacatgtaaaaatctattaataaaattatcttatttgtaaaattgtttttaaatattttttctaaaatatatttt

SEQ ID NO: 9864 - DNA, 733 bp, Arabidopsis thaliana landsberg
  unsure (1)..(733): unsure at all n locations
ccccatatatcaatatcttataaaatcaataatttgtaacctttattttataatttatagccattaaatataaaaatgatttatttaaaaaccaaatcgtcccacaaatcgccgggcgaattaaaatctagtttttattaaaagcacataaatgaagaaataataaatgttttctaatttgtaaaaattcctaccaatagaatttgtttttgcagaattccaaaagtcatcaacaaactaaataaacataaattatgcatataaatctgagtaaatcttatattatggaacaaaagaaaagctaaaatatcctataatttaagacaaaaggagtattaattactaaatagtaaaaatactataaatgaacacaatttttcaacgaaaagtcataaagaattaaaacaacttttcaaacataataaataaatcaaaatatattttacaaaaattatgataaagatatctaactctcataattaaaatatttatgataaaaactcaatattttaaatggtgttatgttaaagagagacaatgacatagacatagaaagaaaaaaagagagacaatgacatagataataaggtatataaataaatgctatataacgaactaatgcaactttatatgaaaaaagtatcacacaaaaataataataaatatacatcattntctaagaaaagagaaaaataagtatagagttaaaaagacataaaagtgtaaatagaaa

SEQ ID NO: 9865 - DNA, 1905 bp, Arabidopsis thaliana landsberg
ttctttctctttctcttttcttccgcaaatctccgcaaaatcttccctcaaactcagatccgattcttctaattctttgcccccctagagattcttcttctttctccaagtaaaagaaaacaactttctttctcttttcttgcgaaagtcctcaactttcaccactaaatcagcttccttcaatcactgtgtttgctttggacccagtttctgatttagcgactagggttttgattggaaccgtattaagtatatgagaatcgggttttactggtgaatcggattatcatcggaattcggaaaaagatggatcggaatcaaaagatggatcacgttatcggcgggaagtttaagttgggtaggaagcttggaagtggatcattcggtgaactttatttaggtatcaaatcaatctattcacatcttgagagtgtttactagttcttgcattgggtttgtttagttgttgttgaagtgtaatctatgtgtgtatgatttagggatcaatattcaaactggagaagaagtcgcagttaagctggtaatactacgaatttgtttaagttatttcattcaaattttatagattttgtgctgaggaaggtttcaattttggataatgaatcaatgttatttgcagcttgttttaagtgagactagttttgattgggaatagaagtgtaatttgcagcttgttctcttcttattcctgatggttgctgctctgttatggaaagaaatggtgttaattatgcaagctccatttctgtctttgtggtctaataatggttctttttttgacactaggaacctgtgaagacgaggcatcctcaactgcagtatgaatcgaaaatatatatgtttcttcaaggaggaagtgagtttggtttgtctttctctgctagtttatatgaagttttagttccaagcctctgataccttgatatattttctttctgttaaatagcgggtgttccccatctgaaatggtttggagttgagggtgaatacagttgcatggttatcgatcttcttgggccaagcttggaggacttattcaattactgcaagcgaatattttcattaaaatctgttttaatgcttgcagatcaattggtaagtactgagtaatgagtatgccctttctttaagatgttaggttggtcgttgagagtatgttgtatcaatgcagatatgtagagttgagtatatgcattcgcggggttttcttcaccgcgatattaaaccagacaactttttgatgggtcttgggcgcagagcaaaccaggtaatctaccgattcagcatgagttggtgtatgttttgaagatgtctttagaataaatctgtgtgtgattcttagcataggagtagtactgaagccttctggtttactgaattaatttctaacctcaggtgtatatcattgattatggccttgctaaaaaatacaaggatcttcagacacaaaagcatataccatacaggtgagatatgcaaactcttacctacattttcagtcatccatgttttaggaacctgttgtagatatatgtttagttgatcttccgtgcctatcttattcatgaaacttgaattttatgctgcaccagtgttttcttatagatcgtgttcaatactttcctttgtgcactcttcttccagcttgctttattagtattccttgcaattttgcagggaaaacaagaatcttacaggaactgctcggtatgcaagtgtgaacacacaccttgggattggtaagagctgctttcatctcatacatccgtggatttcttgtcagaagcatttgatgaaaactcttatcttcaaatgctgatcattttttttatgcatacttacagagcaaagtagaagagatgatcggagtactgataggtgttg

SEQ ID NO: 9866 - DNA, 1099 bp, Arabidopsis thaliana landsberg
acacaactagatagtatataaaaatataagtaattcaaactaattttttatttagatatagcaaatttaaaaaaaaatgtgtgagctaaaaacaatacaaaaacagaaataaaattttaaaataaatttgggcgtagcccgtatttcctctagtttactgtaaaattagatcaagatcaacataactaaactttcaattttcatttaactagcgaagtttaaaggttttcagtaacaaaaccaacccgtataaataaattcggaccgagtcaacctgaataataacccaaaactctaaataacagatccgtacgtctgaaatgcaattaatggtgttcaaacaaaaacacaatttgacactaaccggtcaactaaagatccagttgaagtacatacttgatgatattcaaacaaaaacgacacaaactaaaaaagtctctagtgccagaaatttcaaaaagacaataacaactagcactctaaaaaccaacaaagtgactacgaaaattcaaaaaagctaatattccaaaacaaacaaaaaaaaaccaccctcgaaaatcttatctcaccaagtcaaactgcagaattaaaagatatgtcaagggaagataatagccaaaagagtgcaaccattaaacaagtgaaaacagagattgagttatgctgagaccaaagtgtttctcccttcgcttagtcgggaagaatttgttcgttgtctgcatctccttctgtctcaatggtaggctttgaaggtccagatccaggagcttgcttcttcttgattccactcactatatcatcgatccttagaagcatacacgctgcttctatagccgtcttgaaagtttgcgccttcacattgtacgaatcccatatctggaaaattgttaaaagcttttagtcaactctctgagtcacattggtttcatgttgtgagaatcaaccaaggttatgtgatttaatccttaccttgctctctttcatatcagctattgcaccagtgttcccgtcaataccagtccatgcgttttcaccatttgcatgctgcaccaaaaccgacaattgaagcattgagaaaagagttggtatatacttaaac

SEQ ID NO: 9867 - DNA, 601 bp, Arabidopsis thaliana landsberg
gtggaacttgaccaactaaataattatacgaaaggtcaagaagtgtgagacgaaaaaggtttcctaatgaagaaggaatatctccatagagactacaattactaagggttaagttatgaagatgttgaagtttgaaaagaccactatttggtttcaatgagttattaagaggaacatgactaaggttaagtgaaatcacctcgctagatatagcatcgcacgtgacaccctcccaagaacaacaatcaatgctcttgttccatgaacttaacgatacatcataaggaatttggttggattcatttacccgcggaaactcgtgtttgaactccagaagagcattcctttggtcatggcggcaatggcgaagcgtaggagaagcaagagtgtgtagaaagaatgaaaccatgaagaaaaaacagaagcaagattggcttggaatcatcattacttctttttttttttgttaggagtttgtgtggtagtttataggttatcctgatatggcttctttggctctgttcaaaaagcaaaaaaacgaaactcagttgcttaatttgacttgcgcaagtctttccaatgctctctttgactaatgatt

SEQ ID NO: 9868 - DNA, 1166 bp, Arabidopsis thaliana landsberg
aatgagttgttacgaagatctaatattttgagattgagaaatttagatatggattcagggattgggccatcgaaattgttatcagcaagactaagataaaaaagcctagaaggtaaagacgaattcccaaaatctatatgtcccgtgaagttgttgttactgtcccccaaattaacccatcgtaacgaaggaatcgtgaacaaggatgtaggaaaaggcccgaaaaagttcccaccccaaaattcctctaagttgtggaatcggctcatgtcgggtataagctcgggttcaaagtcattttctgtgatgtcgagttggatcaatttcgttaaattggcaaatgaaacagaagatttgccacttaagtggtttatggaaaggctcaggtaccttagtttggtcaagtttccaattgtagatggaacttgaccaactaatttattgaacgaaaggtcgagataggtgagatgagaaagggttcctaatgtaaaaggaatctctccagagtgattgcaaccactaagggttaggttttggagatattggagtttgaaaagaccactatttggttttaaagtgttgttaagattagcgccaagaagataaagtgaaatcacctggcatatttagcatcacacgtgacagactcccaagaacagcaatcactgctcttgttccatgacctcatattatcaaatctcccgaagttcatatctgctcccggaaactcgtgtttgaactccaaaagagcatccctctgatcatggcggcaacggtggaccgtaggagaagcaagagtgtgtagaaaaaacgaaaacaaggagatgaaatacaaggtaataacaacaataccattaaaggaataagattggcttggtatcatcattacttcttttgtttttaagttttagtttgtgtggttgtgataggttataattatggcttctgatctctctttataaagaaccaataacaaaaatcagttgtggagctcttgactttcggtgaacactagtactgtcgtcaactctgacattgacccatcacacactctattgacttgacattgtcgattcattatcttttttttataaatcaaaaattttaatgccttcattataaatttttaaggtataagttttcttggaatttcacaatcaaaatcg

SEQ ID NO: 9869 - DNA, 1674 bp, Arabidopsis thaliana landsberg
atatagttaattatactttagattttatgtgcttggtcattatgtagctcagaccactatatatacccttttcatgccaacaccatttaataacccatccaacccaaaagcatacaatacaatgtctactcttgttttattcctccaacttttttccatcctaccattagcacttgggttgaaccacccaaattgtgacctgaccaagactcaagaccaaggctctaccctaagaatcttccacatagacagcccttgctcccccttcaaatcatcatccccactctcatgggaagcgcgtgtgctccagacgctggctcaagaccaggcccgtctccagtacctgagcagcctcgtcgccgggagatctgtagtccccattgcctcagggcgtcaaatgttgcaaagcactacatacattgtcaaggctttgatcggtactccggctcagccgctgctcctagccatggacacgagcagtgacgtggcttggattccttgctccggatgcgttggctgtccttctaacacggccttttcccctgctaagtctacatccttcaagaacgttagctgcagcgctcctcagtgtaagcaggtatataattttgtacttacacacctacagtactacatatctaataaatatgtttttggaatgttttttgattaatttattttatcctcacacttacactttcatagcttcataaatgaaccggtagtattaaaaaagaaaaaatagtttatgaatgtctcaccatactatattgtagtcaaattttaatattagtaacctgcatttgttttcatcataaagatgtgagcatgagaatgttaattgctgccccaaaatgaaaatatatttgacaaaatatcagatctagaaattttttagttgatatacaaaaaggacagtttctattttattacgtgaaaaatgtattttcacagagagtgggttccacgtggttataattgataattccacccacattcaaagaaaaaacggtcacgggattacagaaccactaaacacttgaccgacacagagacactgtactgcattaacaacaattcacgtgaacacttgcttcaggtaccaaaccccacgtgtggagcacgcgcgtgctctttcaacctcacctatggaagctcctccattgcggctaacctctctcaagacacgatccgtcttgccgccgatccgatcaaagcttttacattcggatgcgtcaacaaagtcgccggtggaggaaccatcccaccacctcaaggcttgttgggcttgggacgaggcccactttcactcatgtcacaggctcagtctatttacaagtccactttctcttactgtttgccaagtttcaggtctctgaccttctctggttctctcagactcggccctacctcccagccccagcgcgtgaagtacactcaacttctcagaaaccctagaaggtcttctctgtactacgtcaacctcgttgcgatccgcgttggtcggaaagtcgtcgatttaccgccggcagctattgcttttaatccttcaaccggcgctggaaccatcttcgactccggtaattactcttgtccggtttggttccggttaggttttagttatctgtttcaattggtattaattgcgtattggtttaaactaaaaactaaatc

SEQ ID NO: 9870 - DNA, 1720 bp, Arabidopsis thaliana landsberg
gagaatatacctctttctaaacacatcatttatacagacaaaaccatacaatttcagttcattttcctgcaaaattctcgctgagaaacgagtcatttgctggaccgaatatctctatatccgtggctcggttcatgcgatgtagaccggtaaatttcgatttgaatatgtatatatccaatctttagtctcaatctgtttcatcttcttgtttagagtttattgttttcatgaccaaaaatcccgccaagggtaattgttgctggattggtccaagagagtagtagtatctgatttgaaacctctccaatcatcagatgatgtcaaacaactatcagctggttcaacaatgttcattaagtgatctcgttcttcctcaaacccaccaaaatactctctcttgatgttgttactataaccattatcatcatcttcataatcatgatgatcacacataaccccatgatgacccttatcatctttcatctccatctccggtctaacctcttccggtttacgcctccggttctcttcgttttctgattcatgatgtgtgctgcttagagcaaccaccgcttgatctccactacactgcctttcctcctcctgtgtcttcttttgcgtcgcctcttttagcctctgcaactacataaaggtatttaacaactcatcaacaatctattctctccttcaataaaccatcaaaacagagtttttcttgatcacctaatcagtccttaattgcaatataaccactaaagcacatattttatcacatatttaaaaccacagtttttcagtatacaaccacaaaatacacagattttaactaaccatgtaagaataaacagagtttagaacatacctcagagactaaagcttgtttttctttctttaaggactcgaactgagaagccaagttgtcgtagttttgtctgagaatgttgtactcagtctcgagctgcttggatttccaacgagccctcttgttctgaaaccatatagccacttgcctcggctgcaaccctagctctctagctaattgaaccttcttccttggctcaagccttgtctcagactcaaacatcatctccagtgacttgatctgctcgtcgctaaaccttctctgattgttcttgttgtggttgctcttcttcatcttcttcatggtcaagaatggctctgctgacatcatcgccggagaatattctccaccttctgtcatctcatcggaatttttcctcagaggatttatgttttctttatttttattttttggaatctctatgtttgtgtgatgttggctatctatatatgtgtgttgatgaggctgagattattatgttaacagttatataaaaatgtgatttgttgttcttttttgggagggctccttagcatataataagatataactttgggtttgctttatcgtaaattctttattcatttttgagtaaacgatttgtgggtcgacaggtagcaatagggcggattttggctgtttctagagtcctcgctatcacttgttaagtcgagtttcatttcaactcgaaactaatcatctaactactgattaataatttccacctttttatttcttttacttgtgacaaaattagtttcgacttaacaagtgttagaaaattaaatgatacaaaaaaatctgcatactacccaattaaccgcctactaaaacattctgggcgatgcgaaaaat

SEQ ID NO: 9871 - DNA, 664 bp, Arabidopsis thaliana landsberg
gggttagcaattcgagatctaaaagattttaacattgctttgttagccaaacagagttgattttaaaaattttgaaaaagaaaatggctgctaatgaagaagagccaatatgtcgtttgtctcatccaactcaccctcacaccctctcccgtagagccggaagaatccctccatcgggttgcttcgcatgcaacaaagaagaaccctcaccatgttctaccttccattactcctgcaccacttgtgatgtggagttccacgatatttgtcatgtgtatccgaggaagctcacacacccttatcaccttcaacatcctctcaccctcaccactcaaaacactgaaatagagatcatatctaaaacccccgaatatggttacatattcaaaaattgtaattggtgtggagatgatttgagagatggatctcaattctatcgttgttctatttgtaacttttgtttggatctctcttgctcccaaaattttccagctcttacctttacaaatccaaaaagccaccatcattccctccttttatttccttggccactcttaattccatgtgaagcttgcgggttgattagtttggtggaaccaagttatgcttgtttcccatgcaactatttggtttatgagagttgtatcgacttaccacgtgtcat

SEQ ID NO: 9872 - DNA, 1255 bp, Arabidopsis thaliana landsberg
acagaacataacagcggttatgtactccttgcatttgctcgtcgcattcgttgatgtttctcattcaagaatcaagaatcaagaatcaaacaaaagcgattctcatttctcaaatgatcaaaagaagagaaatgtaacgaagacaaagttactgtatatcttttatctgctctgatctaaactgatgtatagtcttcctctgttttctaatataattagatgtttcttaacatacaaactctataaactcgtgttttatttttactggtcaaggccgcaataatcagaactctctataaactcttgttttcttttttatgctatacaaaccagttaaagagcctctgttcttccagtcttgtactggatctcctccagtctaaagtttgattagcttatttacatcctgcaaagtaactaaagcccaaatcatctgacgagataaatatcggtattcgttcatcagttatcaagattctggctgatgagatctcatggccagtgtaggcctcactgatccctgcctccccatttcaaagttcccagagttgctgcactgatcctcgtatctaagcagctgtacggttccatgtgacattgggaaaaacctcatctgaatagcagagaagatgaagtaaggcatcattgtcgatagcactacaaagagagtggtgatccagtacgaaggcgcaggtgcaagagcttcaaggaagaccatataggcatctgtagacattcttattggaagggatccgtacaccatcaggaaaaggtaccatataacaacggatccccaaacgacaacatgttggatcaatgtgaagtaactgatcgtcaagaccatctgcaaactcacaacccacaccacacatgtgtacatcgttccccctagaatatctctccctgcggttttcccttcgtggttgaaagcttgagattcaagagaggttttgcacagaaagaaaatgattattgcgctgcagaagccatggaacatccagcttagtatccggcgccaactaaataggagattctgtacaccttcttggtacaatacggggaactgtgacagcaaacaaagcaaaactttggttaagaaattcacttgaccgctgaaagattaagcagctgttttgatttgataaatatataccttgagacaaaacggtgcagatacatcctggtcgaagatgcccaaacaaattacaggaagagacgtgaaaaagacactatatagagatagataccagtcatt

SEQ ID NO: 9873 - DNA, 1156 bp, Arabidopsis thaliana landsberg
gttacaaactggttcaatttgaagatggttgcgaggtgctcatcaatgcgatcaatggcaaatcttctcggtgtgaaattgctaatcttctgcatgatatagattattggtcttcaaagttttcatcagttacttttagattcactaatcgcctatgtaacaatatagctcatcatctagcttctcttcagagttcacaaaatcagtctttcaagcagattcatgtaatcagccactatggctaacaaatcttctttgtaaagatttacagtcttgaataaaattcagtttgcagaaaaaaaaaaaaaaccctgcaatatcgtgtggaaagtcattttgaataattttttgtgttatgtattgatttataaaaaatatttgattgtgtttatgtaataagttactacgataatatattcaaatattttaattattacataaattctaccaagtttaaagttataccgtaaatattttcaaaagatttttaaaagtatttctgaataaaattgtaaaaaaaagaatttatgattaaaaacattatcttataaagttaagaatatttttattaacaaatacataacaaagaaatataagaaagaaaagacagtccaaaacatcttgtaggaaagtgataaaataaaattctaagctaggaaaatcggattaaaccggagtttgatcagcaaccggttcgtttgaaattgcaaattttctcccaaatttgggaattgaataatttctttttttcatctctgtgaatgaattatgatcataactttgtgaaggttaatagaatttctatgcacctcaacgagaaaatttcttccatcgcccgaaacggacctattgaattcgtcatataaaacattatgacgaaacaatgcaatgaaatatagttaagagacataactttaaatgaaaaatgcaactataaaggcacgaccgtaaaataaaaaaaatacaactgtaattgaacaatataactgttgaaaaaaataaccgtacatatttttacgaaaagatgcgataaaaaaacataaccgagaaaaataattgtcaatattttgacagaaagttacgataaaaaatacaaccagaaaaaataaccatcgttaataaaaagttgagataaaataaaacaaaataaaataat

SEQ ID NO: 9874 - DNA, 1812 bp, Arabidopsis thaliana landsberg
atagtggtatattggatcaggccccatatgagtgaaaacccctaaatatacaaagatctttaaagacaaggttaagctgttgtttgatattcacaagcggaccacagagcatatgtacactccatgtataaacatatgcacatgtatatatgtgaatgtgatatatgagttacagaccaaagagatgtaaactgtttttgctatataggactctctacttacctactccagctccaattgatgtcttcatgattctcagtcttgtcacagacccgaggaacatcctgagaagatgaaaagatcgttttcattgaaatggatgtgccacattacaaatacagatgatgaatgggaagttataagggtagtcacttactgccaaggaacatctcctacaagcatccaatctccgtctttatcttgatatgtaatgatatattccgatgagccatccagtaatttcgaagtacatgtttccttaattgtcttgtatccttgtgtgttggatcctacaaatcgatcaatcaaaaccagtcaatttcaagagacacagaatttgaaaaacagaatcacatggaatctcatgaaacagaattagtaactgacttgttacaggagaaggaatctggaaaaacattagatccaaagttttctctaaggctgcataagaatccagagcattgagatcaaccttccttccaattataactccgtccattgtcaccttcacaagcatagaagtcctggacgatttgataaagcaagcatcatcgttcttagcagcaaccactacactttttgtagtctccttttgaatgccagaactcaagccgccttccgtagctaaagactttgcttgattgaccaaactgttgattctgtaagtccgtagaggcggccaacctacagcaacttgtctgctccattaccaaaagatattaaatcaaaagacgaacaagtataaaccaatatgattcaaaagtttaactaaacatttcagggaacactctatttgattcaatcctgtgattcattcattctcaaagtttaaggtctaaaagctctatcctctaagttgctttgattctgtaacaataagcaatctgagaccaatcattcatataggttataatataaagtctcgaagatgaattttttacctggttgcgtttgaggcggcagccggagaagaatcagcagagcgtttggtcccactttccctggtcagagaagaagacgaggaagacaaagacgatcgaaccttccgacgaccaatgctaagacccaaagctaggtcgagctctgtctctgacactgactcgtcggggcaagatgaatcctccgacgaatgtgcggcgttttcgtcttcttcagctggtagtccgatcatcaccgacccacttgacgaacaaacttcttgcaaaccattcattatcccaaattgccaaacgaatacacaaagcaagaacactaaaacccttgattcaaatccaattatcgatcaagtttgaagaaacccattaaccaagcaaaccaaaaaaaaggtttcaactttcaacacctctacgattctgaatttcgagacagaaaaaaaaaaaaaacttgaggtcacgcacggatccacagaactgaaattgagaactaaacgaggttttaatcttgattcgagggcgacttcgattctcggatcaaaaacaaggaatttttcttaaagagagagagaatgaaattggaggaacgaaaaatcggaaacggtacacgaatgtgtgcgttgcgtttggtggaggtttgttcgctatataactttattat

SEQ ID NO: 9875 - DNA, 1124 bp, Arabidopsis thaliana landsberg
acgagttaggaagcctacacgaagatacattgtagaactttcggaaacagatgataaacagcaaaatgacaagtcagtgattccttctaaagatcagaggttgtccgaaaaatctgaggtcaggtctatcagtgtctcctcagggaagagagttactgtcaccaggatggtatcccttgctggatctgaaattgaggttccttatgtttctcatgtccggagaagccgtccaagagagaacattatggctcttttggtatgtctcttggttactcatgctcctcaatatagtaaattaatctcatacctttcctttgaactgaaaaaagcttccaatcatctggctcgtgttacatctgtgccttgtgtcacatgccaaattctatctcaagaagcacagatgtaaaaataataaaataagtgatcatcttctatgccattattttgctttgctgttatgtcggaatgtaattaaggattttacaacattgtgtagggatgtcattccagttacttggaagataaagctagtgcagcagagagtaacctcaatctgagtccatcccagttaagcagtgaggttgtgaaccgagattcggtggaaaagtctgcttctcgaccggtccaaaacgaagtaagagatatctgttgtttaagttaccttactctcgtaattctcatttcgtactttgctgatagtagagatggtatagggttagatctcatttaccatctacctgatataagatgaatttggtgttccaggtatgacacagtttctcattgctttattggtttgcgaatgcagtttgctacaagtgacgagaacaatgtggagccagagcacatagactcatctggaaatagctcggatgagaataacattggtgtgccaatcatgcaaggtggtgcgcttagaaggaagcatcatcgagcttggactctgtctgagatagcaaaactagttgagggtgtatcaaaatatggagccgggaagtgggctgaaatcaaaatgcatatgtattgatcacactcctatcgcacctctgtagatctcaaggtcattcaacctttttaaccctctctgcttatactatcaaacaaggctttggtttaaacatttt

SEQ ID NO: 9876 - DNA, 1236 bp, Arabidopsis thaliana landsberg
tcacactcgaaaaagggtttactatagtaactgggatctcttcaccgctatgaaagcgagttggagagataccatgtgtgcctatatggccccggatcctcccacatcggaggacttgcccgaggtttgtgggtaaggtttccatatatatatgagcttaattatttatagctaataacatttttagaaaggtttttaaaaaatattttgtattatttttaaaaaagtgaattatagatttttttaagtaaatccatttgtatttttcatgaatctgaattgatgttttgatatgtggcagggagattatgatggagtatgcaaaggaaataatgaatttaggtgaattgatctttgagcttctatcagaggctctagggttgaataattctaatcacctcaaagacatggattgcagcaagtctttggtcttgttcggccagtactatccaccttgtccgcagcctgaccatactttaggcttaagcaagcacaccgatttttcttttctcaccattgttcttcaggggaatctcggtgggcttcaagttctccatgataaacaatattggatcgatattcctcccgtccctggggctcttgtcgttaacctcggagatcttctccaggttaaagaagtgactttttagctttgtaacattttagctctatctttgttaggaatatcatatatgaaataatatggaatttaaagtagtaagtaaaagatataggctagttatgatttgaatggagatgtgagttgattttttatttgaatttgtgcagcttataagcaatggcatgttcataagcgtggagcacagggtgatagcaaatagaccgtctgaaccgcggatttcagtgccatgtttcttcagcaccgtgatgagggagagccatcgagtatatggacccataaaagagcttctgtcagaacaaaaccctcccaagtatagggacaccaccatctccgagttcgcaagcatgtacgcgtctaaggagatcaatacctctgcgttactccgtttagagatctgatacatcgaccaaagaaaatgtctttgtattaaataatgttcgtatgcgtttactcaatttcaagatttgagacatcgagcaaataatctgtacctttgtaacgtaatgtgtgtatgtgtttcactccatgcacggatatgtcgacgtaaaacatccgtctaatgtacccttgtagcataatgtatgtatgtgtgt

SEQ ID NO: 9877 - DNA, 1196 bp, Arabidopsis thaliana landsberg
ctatgagtagtctttgagaagaagaaagttgattcgaaatctgaaaagcgaattggtaaaaaagacgtctcaatcttcaacctttgggcctctgtataacgctccaactacgttagtatgatcttctggattatcatccctttcttgcagccatgcataaccttccttctcctcttcactgctcaaaacgtcgtcctctgaaaacaacaacatgaacttttaatctatatctcttaagtatgtaaagactatcatggttagtaagtatagaaagctgacctgatgagagtttgtctaaagggaattctaggaaataagtgcaatgtctgccttctggattgcagtaaggaggtcctagcacgtctagcaccgcacatgctgttatagctgtgaaccgatgcatgttcccgccatcttccgggtacaaaatcgaggcgttacatggcgcggtgaatgttgaatccaccttcaatttcgctagcctggtttttgaatctctcactgcatttgagataagacagaaaaaaatcaatttcctcattttactatcatgaagtctaaaacagagagtagtattactgctttgtttggtaacactgcgtaaatagtatataaatgaatgttctaaatcatgaaaattcaacacgtaaaaaagttcatcacactatgtcacttcattcaccactttcgggtattaccaatcaagagcctataatgtttagctaaattgggatatttgatcttcaagataaaaagttaataaagtgatttccttttgttacttctatcacaatgcacagtcgaatatctaatgaaccctaataagccaaccagaaatcactgcaaggtaacaacgacaaacaagtttcagagctcacaaaagttttcttgggacgaaagtaaacttacttggagcatcaaccacccaatcatatgacttgatgtgcattgtaccaaagagaagcttactaaaaactgtcatccctggatggttatgaagaggaataacaccagaaggtggcaaacagaaaatcccaatctgcgataaaaccctaaccatgattacttataccacaagaaagagaacaatacaagtgagagagtgtttgttgtggaatttaccgagaattgatcacactggtgtagatgcagaatcgatattggtggcgaaaaccgagctttcacttcggagtttg

SEQ ID NO: 9878 - DNA, 1146 bp, Arabidopsis thaliana landsberg
gtaagatcgcataatctatcatgccatgctgtgtcatttcccgttccctaatgatctcgatcctgattcgatttatagaaataagaaatcttctcttgagaagatgggttatcgtggtgccttgtcaatcaaggcttatgttgataaggaaaagttcacggacggattggtcagcgtctacagtgatgctggaatcgaaatcatcatccccagggatgaatctgaatctgcaagagttcatagtttgttagttgacattgctatgtgggcattggaaaaccctgcgacttaattattgtgaaccattaaatttgatggtatctccaaaaacatcaaagatgattgtcttctatacgcatcatttgtagtattaaaaagcttaattatcaaatcatcacacaacaaaatccaattggcaataataacatggtaacagaattttaaaagatctatttgatgcacaccattccaaattttcaatgatacaaattcacaaattcacaaaatgcccacgatgactatattttcatttaatgaactatcgtgccttggggatcacctcagtgccaaagttcatgctcacttcaatagaaccctttgaatccatatccacactccctcctttccttgaaatctcatatttaagacaatcttttgaggtcatttacgactcgagacatgtttggtctttttgctgaagaaggattaacacaagacatggctaattcaagcgccttccagactgaagtgctgtcataatcttgttgaagggttggatcaattatatttctaatatctcctttttgaagcataagcgcaatccattcgactatgtgagttttttcacgcgtatgctggattatagggcagtttgttatgatctccagtaatacaattccaaaactataaacatcactcttttcactcagccaattagtttgataatacctacaaaacaagacatggagaaaaatcatattcaccaacattgactacttaaagaaatgggaagttgtaaagtaacctatggaatttcataatactcactcaggatcaagatatccgggagtgccagcaacaacggtggatacatatgtctcattggctgtgggaaaagatcttgaaagtccaaaatccgctagctgg

SEQ ID NO: 9879 - DNA, 974 bp, Arabidopsis thaliana landsberg
agctgtcaatgcagcactaggtacacactaattgactgataatttaagacaggtatatagtccggattggatttttttatagtattagatatgcctctaggaatcagcaagaaccatataatatcatgcatacggtgcagaggaaaataattctaagaaactcgttgaaacattgcattttagtgactcattaatttgccaaaaaatcataactcggcactaaaaatttgttatgtaggtttggagtacttacacactggatgcaaaccaccaatggttgcacagagatataaaaagtacaaacatacttttggatgaacgtttccaagccaaattagctgattttgggctttcgagatcttttcctaccgaaaacgaaacacatgtttcaactgttgtggctggaactcctggttatcttgatcccgagtgagtattttcttcatattttatgttagtccataaacatgcatcataccttttgatagttactagccattaaacaccttccatgttttgttttgtaggtactatcaaacaaattggttgacagagaaaagtgatgtttatagttttggaattgtattattggagatcatcacaaaccgtcctataattgagcaatctcgtgcaaagcctcacatagtagaatgggtcggatttattgtaagaacgggagatattggaaatattgttgatccaaatctccacggagcttacgacatcggttctgtctggaaggctattgaactagctatgtcatgtgtgaatatttcttcggcaagaagaccaagcatgtctcaagttgttagcgatcttaaagagtgtgtgatatctgaaaattcaaggacaggagagagtcgagaaatgaactcaatgagttccatggaattcagcatgggaattgacaccgaggtgatccctaaagcacgctaagtctttaaaatggaatttaccccaaagttggatttttg

SEQ ID NO: 9880 - DNA, 1313 bp, Arabidopsis thaliana landsberg
  unsure (1)..(1313): unsure at all n locations
caaaacacaggtggcccgcaggcgacacttcaaaatatctctttttaccaattctagaaattagatactagtactacgcgtcacttggctccaaccgtctacacaagataaaattacaagcctctcttattatcttctctttttctctctttgatgtactcagggaagagcatatcaaagttaaacgtgaggctggctcctgaaagacccgagcgccttaatcgcaccagccctcaacacaaactgatggtagaaagctgcgatggctgcaccagcaaacggacccacccagaatatccactgtagtaattatagaaaacactaataaattgaaaaccttggtaatatcaaaaacgaagaagtaaaatatatgatatagtataacgtacatgatggtcccaagctttgtccttgttgtagatgattgcagctccgagacttcttgcagggttgataccagtgcccgtgattgggattgtagctaagtgaacgatgaacactgcaaatccaattggcaatggagccaataccttcaatcaccacaccatcaccaccaacaacaaaaaataatgaaatgttactaatcacgagacaaatagtacagtccagaataatattcatatagttatgtttgggagtagtatacgtggttacaaatggagttgggaccatgtccaaataaaggacatatgttatggagagagacatgaaagacaaaaaaaagtttagatcatcgatgtcctttatgcattttattataatgacgaatctagaagctacagtcgcaatatatccgtgatatattgtacggtctattatattttttcttaattcgattctaaatatgaatttcgaatttaaattttgattttagtaaaaacaaaattgtcaacaagcatacaatttctacggctaaatctttatgataagtagagcgccgtataggacacgggtatgctactgtttccattaatgcgatgaatttctaaattatctaaccatgactaaacctctctctgttgtaacataatcatgtcacattcttttaaaataaataatcttaaggggaaaataataggcttacaggaacgtgagagtcacgcgcactcctcttgggatcagtggcagagaagacggtgtagactaagacgaatgtaccaatgatctcggctgcnnnnnnnnnnnnnnnnnnntaaccgtcagagagaccatttgcgccaccaccgtagcgggtgaagtaagcagactggaaagccttgaccaaagccacaccacatatggcaccgaggcactgagccaccatgtacatcact

SEQ ID NO: 9881 - DNA, 1339 bp, Arabidopsis thaliana landsberg
taaaatacaatcctcttctgttacaaaagattctctgttccatgatagagacgaaacattttttaacaatggctgagatgatatatatttggcttttctgcttcgagaggaacaagaggaagaaccatttgcttgacttcttgagaagattcagagtttctccgttctctatatgctctccatcggaaagtcaatataaccggctctcgggcccattggaaagagcatcatcctaagctctctaccaggtttgaccaagcttatagccttggagaacatttgatttcgatcttgacgctttaaattacctctacaagtgtttgctttcctgttgaacattctgggtgcaatcgagcggagatgatggcttgttgcttgcgaaataaacggcgcatgaaaggtagactctcatggaagtcaaagaagagagatttgtctcattcaggaaactgggcaccagaagatgacaatgatgaagggaaaatcgttttctttggaggaagtaactatacctttgatttggatgatttgttagctgcatctgcagaaattttggggaaaggcgctcatgttacaacctacaaagtagctgtggaagacacagccacggtagtagtgaagagattggaggaggtggttgttgggagaagagagtttgagcaacaaatggagatcgttggtagaatcaggcatgataatgtagccgagcttaaagcctactactattccaagatcgataagctcgctgtttacagttattacagtcaaggaaacctatttgagatgctgcacggtaagctatctttctgtattccgttgtctatgcttctttggtatgcaatatcgaaaaccaataactcaacttttgcaggagagagccaagtacctttagattgggagtcccggttaagaatcgccattggtgcagcaagagggttggctataatccatgaagcagacgacgggaagtttgtccacggtaacatcaaatcctccaatatcttcacgaactcaaaatgctacggctgcatctgcgatctcggcttaacacacatcacgaaatctctcccgcagactaccttacgttcttcgggttaccacgcacctgagataacagatacaagaaagtccacacagttctctgatgtatacagcttcggggtggtgttactcgagcttctaacagggaaatcacccgcgagtccgctatcactagacgaaaacatggacttggcgagctggataaggtcagtggtgtcgaaagagtggacaggagaagtattcgataatgagctaatgatgcaaatgggtatagaagaagagttggttgagatgttgc

SEQ ID NO: 9882 - DNA, 623 bp, Arabidopsis thaliana landsberg
gcatgtcgatgtcgattctagacttgagtctctaggagtgaggatagtagggatatggggtcctgcaggcgttggtaagactaccatagctagagctttatataatcaatatcatgaaaacttcaatctttctatatttatggagaatgttagagaaagttatggtgaagctgacctcgatgactatggtttgaagctgcgtttacaacaaagatttttatccaaacttcttgatcaaaagatttttatccaaacttcttgatcaatagaagaaaggctaaagagccaaaaagttctaattattcttgatgatgtggacaatattgagcaactcaaagccttggcaaaggaaagtcaatggtttggtaacaagagcagaattgtcgtgacaacccaaaacaaacaacttttggtttctcatgatatcaaccatatgtaccaggtggcttatccttcaaaacaagaagctcttactatattttgccagcatgcttttaagcaaagtccccatcagatgatttaaagcaccttgcaattgaatttacaactcttgctggtcatcttacgctggctctacgggttcttggttcgtttatgcgtggaaagggtaaggaagagtggga

SEQ ID NO: 9883 - DNA, 1322 bp, Arabidopsis thaliana landsberg
  unsure (1)..(1322): unsure at all n locations
ctcagtaattaaggatatcgatattttaccgtaatttaataaataaaatgagagtaactttttggttatttttgtttagttttggtctttgggcgaactaactttttcaggtactgtctgaagctatagcgtaaacatggaaattggaaaacaacgttgtcatttgtgttaagtggcatccactaagcttacttgtgtttgcttccttccctactctctcctgtggcgcgtgacttctactctagcaaatttgttggttggataccttcgtttagggtagcttcataaaaaacattttcttcttttgtgaaagaaaatatatacaaccttttgggactacgacccacatcaatttttttttaaattgctataaagtttattattactgatattgctattaaaaattagttatatatatttaattatttattgtcttattggagctaggttttggagctattattatatgattttgataataagatatgttattatgtttagaaagatatgttattactaatttgcgttcttttctaaataaaccaattatcaccatcattacccacaaaagaaggttaaactggtcattgcccaatagacatgagtagcgtgttacttagtttctcctattctggtgtcatatatttaataactttttctttagatgctagagaaaagactatccgtaaaaataatcagagactaaggctatctccaatggtgagatacccaacatgggttctctcaattttttaagaataaaattttcatttttttgagatgagagttttagtattgttttaggatttttagtgaactccaatggtagtatctcttcatgggattctctgggaaaaaagtaataataaaaattaatttatttcaattaatttaattgaattaatatataacttctttttattgcataaattatcaaaaacattcatgacacaaaacatacataatctgtatttttttttcacaacatacataatctgtattacaataaaataactctattcttcataacctaaagtttaggatcatacaagagaacaacaccaacatcctttaattagcagcctttgatacatctatgtggggtgtactgctctgtgataagcctttgctgcagaagcttcttttcaaggttaagcctttcttacttgtagtgaagccactcttttcagctgctcacttttcctagcatccacaccatatataacangagtcttaatctaagtctttaattcaagtgaccaaatctcagtaaaccaatgtaacaaacagagaaataaaagcataaaaagattaggagcagt

SEQ ID NO: 9884 - DNA, 1464 bp, Arabidopsis thaliana landsberg
cgtgtacactcaatgccatgacaaatagccaaccaaacaccaagcagcgttaagcaaatagctatatcaatggcaagaacaatcttcacttgacgccgccacttcctctcaatgctctgagagccaccagatcgtccccttcttggaacatacgttgctgattcagatgaagcattagaacattctgttacgtttcctctatcatttgattttcggtgttcctctatctcaatacctcttagtgagtgcgcatgatctctccctttcttcttatcttgcttgttggatcttcctaaaagcggagctttggagttagatgcgtagctttgttcagcaccatcaatggaaggtgatgataatggaagacaagtgtgatcaaactctaatgaagctatgagtcttcggacaatttggtcttgaacattgctaaaactgatactaccagagaaacttcctctagaattcttcttattagcttcttttaactcatctctcagtttttcaagaaaatcaagaacgctagatttcttgaaaacatcatcaacaatggcgaaataaacgaagtcatctttcatcaagaatccaaaagtcttcttacccctcgtttcgaagtaccacttgtgaaaaggtggagtcttttccaagcataacgctgcaagactctcgttgttgcggtggtctccggcattgttgtaagcgtacataatctgattgtctcttgagacacaacagtagtgaactgtgttttggattgaacccatgttggaactttagattaggggcaggcagcgatgagcaagagagtttcaaagaatatgtcagttatgaagtcaagtctctggtttaagatccttatctttgccaagaaacaacgaaaggaatcttgaaaaggaccaaacagaagatcgaatgttagagaaagagaaagtattaaagcagagagagaacaatacatgctctcttacccaacctttgactctgctttatctttttctctttccttttaccttatcttcttgtttttgactttttcagactaatgcaggtaagctaagatcaacccttttcgaatcagttttgaatatttgattatctgctgattttgtagcagagcactctttgtttttgcgcgcgagcaaacgcaaatgataatgggacaagtttccctgagaagaggtatttgccatccaaagtgtttgtttctactagggatcaatctctcattttcactcctagaaaatgtactagtgttacaagttacaaatgcaataaagcagcaagctttacgggatatggactgaacacatacggttaagcttaaccagttctacaactacaacatgcactcgatgtcccgatgttgtttcgttcgtcctcttccatttccttaaagccctctccatcttgatcactttgctgctcttggccatcatctatgttgtttactggctgagattccggttg

SEQ ID NO: 9885 - DNA, 1279 bp, Arabidopsis thaliana landsberg
cgctttagagttcccagatgtattctcaagctcgattcgacttatttcatctgcaatatattccatgttttccaagtgtcttttttgtttctcttcctcatttataagcatctccttctcctgctgtaagctcaaggctgattctctctcgttcctcaagtccctatcaatcttttgaatttcatgctcaactagatcaacaatcaagcgcaagttgtgttgcaactccggcattggaacatctgcttcttttgctttctcctctgcatctaaattttccaaatttgtcacaacccgaacttgtggtcctcgcatatcaataatggtctgcccaccaccaaaccccgcttcctgcttcttttccaacaactcctctgcagtgacataaactgccttcctcaccttcttctttttccaaagatttttccctcctctatcaccatggctctgttcattctcactgacactgactccaataatcttcttctcttcaaccttctttaaatcgggtaactttgcctccttgaaatcattataccccatacccatattcttcggcctcaactgcgcttcaataggagctacaataccttgctggttcttcccaagcccacctcccttgtaccccatcttttcaagcagcttcataccaattcctttagtagacttctcaaactgacctatatcactgcctaaagtattcttctttcctccctttgcaccaccaccctcttgacctctcttctccacctttgccttccctctcatctttgcccgatcagctatcttcttccccaatgcacccggtaaaagattgtcctcatcatcaaaaccattcgcattaaaccctaaccctaaacctgagctaccaatacccaatccacctctaacttcaacatcctcatcaatcatatcattatcttcgattttatccctatctttctcatcattatgttctctagaatccttatcaatctcttgattcggcataaccgtacctgtagatacaaaattgacaggcttggttaagtctgctttccttcccgaatcacgatccttacgcctcttcctacgactgccgccgccgccagaatcatcggaatccgaatcgctctcagcgaagattccataagtagcgtcgcttttggtttggttccgtttctccttcctcttctcgtatacgaactcgtcacctttccatcgacctccttcgtagtcattatccatactgaatctcttcatatcttgatactcatccatggcgaagaaactagatctg

SEQ ID NO: 9886 - DNA, 778 bp, Arabidopsis thaliana landsberg
gctttcgttgccaagttgtaattatttgggtttcgtttgatttgtttttggatcagaccgagtgttcctgcagggcttttcttttcttacaactctacattggttcctccttaccgtgttttggtggatactaacttcatcaacttctctatccagaataaggtcggttcatcttcaattgcatttctctatcacagagctataatcagaatgtgtatcgatctttgtagagtttatagtcttggtgaacctgattggaatctctcattgtttgaaatcctttttgacttattttgctctggtgtatctaatagatcgatcttgagaagggaatgagagactgtctgtacgcaaattgtgagttacttaaagattttgataggtctatataggttctctctcttgttaaccacctgtaattgtttctggtttgaaggcactccttgtatcacggattgtgtcatggctgagttagagaagttaggtcagaagtatcgtgtagctctaaggtaaatcttttagactttttgaacaaggcttttctgtttatggttttgtttcgtggattcgtaattggtttactataatatttggtaggattgcgaaagatcctcacttcgaaagactaccttgtatacacaaagggacatatgctgatgactgtctcgttgacagagttactcaggtaatacatcgttcccggcttgttgaactttgtattcaagactctgaaatgatataccgatgctctggtcccatggttcttggtgtagacctg

SEQ ID NO: 9887 - DNA, 527 bp, Arabidopsis thaliana landsberg
aggtacctaccaatcaattacattatctaaaatagagctgtaaccggaatgtgcatgataaagaaaatatcgattttggttgagttctttttgtcttgaataacttgattgaaatcttcttgtttattgtgcaaatggatatcgttttttacttagtttcttctgttttatgttatagattgatcttgagaagggaatgatggactgtttgtacgcaaaatgtgagttacttaaactatcttcagtttacagttatgcaaattctctttctctttgttaacctttgaatcgtttcggatttgaaggcactccttgtatcacggactgtgtcatggctgagctggagaagttaggtcagaagtatcgtgtagctctgaggtaaagctttttgacttcaaagaagagtttttcagtagaattgtatcatttttgtcgattcttaataagttacttttatatttggttaggattgcaaaagatccacgatttgaaagactaccttgtgtacacaaagggacatatgctga

SEQ ID NO: 9888 - DNA, 1749 bp, Arabidopsis thaliana landsberg
  unsure (1)..(1749): unsure at all n locations
ctttcattgatgctcggaaaagggtgacataatttcgatgaaaaaaatattacttagctgtttctatcaccacacacaaacgactgctgttgtggtacaagggacataaacttttccatttcaatctaaatatatgttcatttgaagatatctaatcatagatagctttggctgtttgctatcaaatgcatgagcaaaagcagccagacgcttaacagagaggaagcattttgaactgttaaaggattgatacctttttttatttcactctgaacgaatcgaatctgaaaccaaaattctcgacccttggagtttaggttggtagtggcaacctctccacctgttatctcagctaaatcctctccattgacctggataatgtatatgaaaaaaaacaagagcaaggacataagaaaagattaaaactaagagcactaagaataatttttattagaatgatactatcaaacctcaaacacctttggaaataataacaaacctgaaactttacaggccttacagtcctcccagttttagagatttcatcacactacaggttgacaaagaaaaatgaaacctccggcaaaggaagaccaaaataaagggatcaccacatgttgtattaatattagccaatgaaaacctggatgtaaggaaaatatatatccttaagtctgcactgaagttgatatatttctgggatcttacattctgattcaaatatctcaacctggaaataaacagaatagcagtttcaaataagcaaatgcatattataactcgttgtttcattaacataaaggaacatatattaaggccacgcaggagaaagtggacagatggttataggactttagaacagcaccaaagactttaatttatgcacagtcttatctatagagcataatgattcaatcaaaaggtatcactgaaggagatgaataaacaaacatggagaataattttgtttaaagtgataaactcaagacannnnnnnnnnnnnnnnnnnnnnngaacatttgtccccaagaaggtagcaacataaatcatggtttgtacctttgtgaagcttccatgagctgataacttgacttcctccaccagaggatccctcattccaccatcagcctttcaatttttttatatctaccatttaatgacatagactatgacgagcaataaaggaagatgaataaattattaccttccagttttgtcctaagatagaacgattgtcaatcaaagcttctcgattgagttgtaaggtgaatactttcttagactgtttcgtctttgaagacaccaaagtacgcctaatcatagaagagagttaaacgcaccaaggacggcagataatcattggttgacatcaacattaatcggtaagcagacaatgaattctcaccttcccaaatacatacaagcataaggacctccatatccaaacatcccaaagaatggctagatagcaaaagagtgaatcttcctcagattagcaaagtactcaatttagaaaaatagtataatgttttagtcttgtcgagttcataactgttcaattcaaatatgcacgtcttgattggtagaaagactcgtgataattaataaactgcaagcaaaaaatgttctaagattctgaggcagagttaactaccataaggttngnanggtttgcctccaacggcttcngatttgagagacctatgtaatgaagcccctattttttccctgcacagtgttacgaaaatg

SEQ ID NO: 9889 - DNA, 1848 bp, Arabidopsis thaliana landsberg
ccggccgggttcctctgttcttaaattctctctctagtctctaatggcggaccagaaagatcaagagccaaatcctcccgccggtacgtcagaacaaaacttccgatgagttgttttgtattgaattctcccattgtagcatttcgaaagcaatcttcagtaactagggtttccgagtatgaaataattagcttgggtttttggattcctctgtttttcgttttctttcttccattgatggcaacagctgctgataaagccagagattctcgtgatcttgattctgttatttctcgatcgtgatgcagcaaagccagagtgtctcccattaaagaagagagcaatggctgcaaagtcactcgttgacatagcatatgagtctgactccagcagcgatagcagtgacgaaggagatgtgccgtgtttacccaaggatgaggtcaatgaaaggaaactccaaaatctccagagaaaagctttctacaatcttctccaaactttcgctttcgaaaactccacaatgtcaaacgtaacaataacctttctcttggttaaatctttcttcttctttgctaaattattcgctctgtttctgaggcttgtggtcatgtctttaattgttttccagaagaggactgagatcataggaaaactgatgaacgagtgggggattgctaacgaaactcatatctcctttgcggatcagattcagaagaaacttctgactctaaaacaaacgtatgtatatcctcttgtcaaagctggaagatatgatctcttccttgtttaaaaatcatctttgtcttctcaggaagcattctggtgtgaaggaaacgcagataccagcgacgccattgaccaacactgtaaggcagagaatttgacatctctgatttggctttaattaccgcagagttttaactgtgtttacctttttctctgttttaaggcaacgccgagtacgttttttgttcctaaacctgtcaaaagctggggcagtgttaatccagagtctcttattggaaaatgggtcagtataaggcttcctgataaagctaagttcactgaatacatcatcaaagcatatgatgcggaaaaggtactaaaccctttcttatatctcatgccttgttccatcagactcaagccgttctaagactttgcaatatatctctccaggaaatgcatagcctattgaccgaaacctcgaacccaatggaggttgattgcattgacccgtttagatggatagatatcagagatgtaatacacaaactcttatcatctccatttcatcaaatcttcaaagtctttaatatcagaatgctgaaacatttgatctcaaacgaacttattgtagatttcgcctaacgatatcatgtgggaaggtggacaaaagccaaactttgctgctcccaaccaatctgctgcagctacaggtcaatgagcccttttctgaaaacattgacaaggtaactttgccaatcccaacacacacaatttcagtgaaactctaatggttttggcagaaatttaaccagtgaagctctcatggttttgatgcaggacaaagctgagaaagaccaagaccctcttttgcattttgttttgagatctttagttacttgtacaatcacattacacaggactctttttttttttggcgttgtttgctggaattagagaagaaaggggtcagtgttaaagtgtaaaaaaattaaacttttgtttttgtacattggttgcctttgcttcttgttagcttatctcatctataatcggaaaagttttcgttcccgttcattggtcccagtttatgtgctttatcgccggagctatatctataaa

SEQ ID NO: 9890 - DNA, 823 bp, Arabidopsis thaliana landsberg
ggtaaaagctggcgtgagcattgatccaaggaccaccggtgtaaactccgggaattttggcgttggccgtaaaggcagtaaccaccataaccgccataaatgtaattactttcgccgccatttgttgaccttggtacggaaaaaaggttttggtttttgggaaaagagacagagaagagaggaatgtgagagggagaggggaagctaggaaggctacttatggaggcttcaaatgactttacgcctttttttaattatttttctaatttaagtattcttttattaataaaaattatcaaataaaaaaaactatattgtaattccgtattttttccctcgtggatctaatataaatttattccaccgaattcacgagaatgcatacttaccaaagtgttcaatcactatttaaattgttttttaaatattaaattttaccccacaaaaaatacgaaaattatgttttatgagtataagatgataaatatccaatctttggtacttattccccaaaaaaaaatgaacacttgtttcaaactttctctaaagcaaaaagtgaatatctaaaaagaataaagaatacatcaaaaatttacgtacatgcaaaagtcggcctagtaactaaacaataggtaaaaatagtaaacgcgataaactataggtcaaagataatagatatggaattgattaatcggcccaaaataaaatacgtcttggcccagtaactaaacatttccggcggcttacgtggctttggtgcttaaagtcatctataccacgcgcaagtcatgcatgtcatattcacgcgatcataattcgcggc

SEQ ID NO: 9891 - DNA, 520 bp, Arabidopsis thaliana landsberg
  unsure (1)..(520): unsure at all n locations
ttgcatagcgagatcaaagtgctcacgaggaggattacaccaaccaccattgtcgctagcttgattaaagttaggagggcagaaattagtggcggagataagaattgatgggtttccaggaannnnnnnnnnnnnnnnnnnnntacacttaagctcaaagcaagagccacaactcaaaccattgttgaataaggcagtgcttaaagccgccgtgttcactccgtaaccttggctatacaaattcccgtacccacacgcaccacctacaaagtcgtatcattagtgaataatagaaacatttatgtctataatgaaaaaaaaacagaggaggtgggagagagtgtgtgtgtgtgtacccatagtgccagaagcgtcagcttcaccgtagaaggtggcgtgagcattgatccaaggaccaccggtgtaaactccggtgattttggcgttggccgtaaaggcagtaaccaccataaccgccataaatgtaattactctcgccgncatctgttgaccttggtac

SEQ ID NO: 9892 - DNA, 360 bp, Arabidopsis thaliana landsberg
acccccctaaagaaaatactcaaagcaagcccacactatggatacatcactagaccataacataatatgatagccaacctattatgataacgcacaacatcttgagaatagaccaacaggaaaagcaaccggcaacaccagcataaacatagaaaaaaaacgcatcggaaaccaaaaacactaacatacggcaaataaaacccacaaagacgaaaacatataacaaaaacgcaagaccgggcaatttaaacataaaataaacacatacattatacatgacaaccgacacacacacagatgcataaatcgtcgaataataacacacgattgaccacaacaacaaaacaaaggacacattac

SEQ ID NO: 9893 - DNA, 1931 bp, Arabidopsis thaliana landsberg
  unsure (1)..(1931): unsure at all n locations
ttagactcaccatatatgggttctattgagattggggagttagttgacgctttatagataacttgatatgatcattagtctgtctaatatatacaaattatagaccgaaaataataagataagaattatagttgcttaataggtatggaattagcaactacattttttttttatcagaaacgagtaacccctagactaaaacattccaattttatttgtaatattttaagacaaatttagcagttttatactattttatatattctagcaatataaaaaaagagtgaaacaataatagtctcctttatgtcaatttctctccaagatccttctcttttccacacaacttctggtcgaagattgaaaccaataataaatacaaaaataaaaattaatacttattgtctaagcacaaggacgagtaccatcatagaatctccatcattcatgtctataaatacatctagatactcacagacgaaactcacatctcccaccaatctcactcaaaagaaaatctaagaaaagattcttaattttctgaagtgaatgcaaagatgatgatggaagagaaacttgtgatcaacgaattggaactagggaaagagcttgctaaccgattgatgaacaatctcaaacacacttcttctgtcgattccaacaaaaccttgatctctgatatcctccgtatttaccagaatgccattttcatgttgagcttcaaccaagacaagaacatccttaagcgaagccttgagatcgatggaaaagattctaaaaacgtcttcaaaaagaggtaaattgagctaaaagattggttctttttctctctttcagttccaaactgtgctcatgtgtctgattcctctgttttttttttggtgattttcaggaaagtatcggagaagaacacagagaaagttaaggtttttgttgcaacagaacaagaaaatggctctattgatgatggtcactgctggagaaaatatgggcaaaaagagattcatggatccaaaaatcctaggtgattatcattcattcatcatctgggaatttcaaagttttaatttttcttttgctatatttgctaaatcctatgtctctgtttttggttacagagcatattacagatgcacgcatcgattcacacaagactgtttagcagtgaagcaagttcagaaatcagacacagatccttcccttttcgaagtgaagtatctcggaaaccacacttgtaacaacatcacatccccgaagacgacgacgaacttctctgtttcattgacgaacacgaacatctttgaaggaaacagagtacatgttacagagcaatcggaagacatgaaaccgaccaagtccgaagaagtgatgataagcctttgagatctggagaacaagaagaacattttcagaacgttttctttctctaaccatgagattgagaacggtgtgtgggaaagtaaccttttcttgggaaatttcgtggaagatctttctcctgcaacatcagggcctgcaattaccagcgaggttttatctgcacctgctgctgttgagaattccgaaactgcagattcgtatttctcgtctttggacaatattatcgatttcggacaggattggttgggcgtcgtagctttgaataattgatttggtgaatgtaatgtctctctcttaaggcagtaattatagaatggtcagtttaatttaaggggtattagttattacttattagtatagtaaaaattatttttgccgatggataaaaattggcttataggactaaagttacatgattttggccttttttcattgttttagcagggtttatgaantatganttccctatgaagttggattgactttatgacaattataaagaaggatttatatcggtttatctgtgagtaaaggtgtaaatctatgataaa

SEQ ID NO: 9894 - DNA, 2043 bp, Arabidopsis thaliana landsberg
  unsure (1)..(2043): unsure at all n locations
aaaatttaagttttaaatgaaaaataaacgtagaaaagattctaaaagagaaattatcaaagaagaggttggaaatgtatactaatgcaacaaaagaactccaatatgaacatttaagttacttaaagtggaattgaatattatcagaaaaagagtgaaattgatgtgaaataaagtcaaatgaattagatgcagtatcctttgtagttgcgacctaaatcatatccgtttttaatttttggtccaagtcaaaacctaaactacaacaaaattttcatcaattaaaatatataaacaaataataagattagaaaccaaaaagataatgcaatgcgaaattagcttgagaacaaatagttggaccgtacgtaaccagaattatgccgaatagatagacgtaactcactcttcactctcttcccgtgcattctccaaattttttttatttagcaaaattattcaaatctttaatttattcattttcaccaaaaaattattatagaatgaagacttcagtagtgaaaataataaaatggagttaaaatgcttgttagatttttaaaatggttcccgctaaattagtagtgtaaattcaaatagtaagggtctaaaaacagagtaaataataagcagagatagagataagacctggccaaggatggcttgagggagacggcgacgaagactatcttgaagttctttacctaaaggagctgcaccggaaagaacgaatctaacggaggagagatcataagaattaaccgtcgggtttttagctagagcgatcactagcggcggtacaagcgccgctattgtcactctatgtctttgaataagatccaataacgcaccgatctcaaacttatgcattaaaagaaccgtggcgcctattaaaggagtgttttaatagttaggtaacaaaacattaaagattatgaattgaggaatacgacgtcgtttagttaccggatcggagtgaattgaggaggacgctattgagagagtagatatggaaaagtggtaaaacgcagagtatgacgtcgtttgatttgaggtaaagatttgggttatctccatctacttgttgtgcaacgcttgtgattaagctcttgtgtgtcaaaacaactccttttggtaaccctgttgttcccgatgagaatgggagtgccgccgcatcgtcaccgccgatgtcgacggtttcttgaaatgggtttgtttcgtcgtcggtgatgagtgtcgagaatggtagacaattctccggtgttggttcatcggtggtgatcactgtgaggtttcctccgaggttttttagtttatcgacgtattgagagtgagtgattatgagtttggcaccggaagatttaagctgtttataaagctcttgtttaagtgtagaaagggcttgcgctggctgagacgcctccgatcatggaagcacccatgaaggagaaaacgaactcggctgagttttggagaaggatcatgatgacgccaccttttcttatacctaacttgcataacccggaagcgactctccgacagattaggtgtgcttcgccgcaggtgtagcttttcccggtggnnnnnnnnnnnnnnnnnnnnnngtcggaaacagatgagagtttttcgaagcagtaagtgtggagagggaggtggttagggatgtcaatgtccggaagctttgaccggaaaatgcgaggcgtaggaggagaatgaggaagcacatccccggagacgacggatgtatcggttggtttgtgaatctgaggttcgtgtagagctgcagttatcattttgatgtaaatgaacaagtgtctttttgtttaagttttgtgagaagaaagaagaatgtgaatgtgtttgtttgattatactctctatgagtttttagaaatgaatatatgtaaataatatatagaaatgtgagtgtgtaggtggtgatgatagaagagttctgtataatattacataaagattcgacgtatagttaagacataaatgtgttcggcaagggaagacagggagatcaaggagaagaaattg

SEQ ID NO: 9895 - DNA, 501 bp, Arabidopsis thaliana landsberg
taaagtttgctcgactaatatttattagattaatattccaattagataaaatgtgtagtgttcaacttgcgcttttataataaacattgacatggttaatattaacttaactactttttattgatttaatatttgtttagtataaacgcgtctcctatttagtttttctcgcctgtcgcccgtgttgtttcgcacgcgtcatcgcacgttgtgtgtgtgtcgcgcgtgcgatcatgcgcatcgcgcgcgtcgtccgcccctaagtcgcgtgtggttgtgcatcgttcgcgttttatttttgcacgtcgcgcgtcttgtcgtgtgtcgttaatttcaccccgttagaactctcatgtaaataaaatcactacttaactgatagttgttagtgtagcagattaatcgaaactaaatagtagttataattaataggattatgtcgattaatacttatttagtgtaaatacgatgacttctcgaccgtagccctgaccatcgtgt

SEQ ID NO: 9896 - DNA, 650 bp, Arabidopsis thaliana landsberg
tcgtatattttagataattaacttaaggtttgctcaactaatatttattagattaatattccaattagattaaatgtgtagtgtccaacttgtgttttttataatacacattaacatggctatattaacttaactactttttatttatttaatatttgtttagtataaacgtgtcctctatttagtattttctcgcatgtcgcgcgtgctgttctgcatgtgctggcgtgctggtttgcgcgtcgttcgcgcttgtcgcacgcgctgtttcgtgtgtcgtcagcgtgctatgtcgcgcgtatccacgtgtcgtttgcacgctgtcatgttgtttcacgcatcgtaaattcaccttgcttaaaatctctcgctttaattaaattaattatttaactgacaactgttaatgtagcagattaatcgaaactaaatagtagatattatttatatttgataatgttgaattaaatgttatagttaatatatgtttaacataaacccgttaacttcttgaccgtagcttcgagttcaacgttgctttccctcgtgtgacagtagaagctgagctctatttatcctgcacatttttataatgttttaccttgtatggtgtagatgtcttatacatatacatatatatatatatatat

SEQ ID NO: 9897 - DNA, 1230 bp, Arabidopsis thaliana landsberg
tggattatgcctcataacatctgttaccctgcattagagtacgatgattggcgtataataactggaagcgacccaaagaacacgtgagtttcgcttactctttactttctcctttgtgaactccctgggcttgtgacaatatatgtatttgccttgaactttttcggtgaatcaaccctgaaaacacttgttaaactttgcaggccttggtcgtatcacaacagtggatcctggccaacacttctttggcaggtatgcagatatatgtcagtaatttggattagagaaaaagtattaacaattctcggttatgcatatcatccttaacatctgaggatttctggtttataatagacttttgtgtgtgattttcgaaacagttcacattagcatgtatgaagatgggaagaccagagctagctgaaaaggctcttgcagtggctgagaagagactgttggcagatcgttggccagagtactacgacacccgatctggcaaattcattggaaagcagtctcgcctctaccagacatggacagtcgctggattcttgacttctaaactcctcctagcaaatccagagatggcatcactgttattctgggaagaagattacgaacttctcgatatttgtgcatgtggtcttagaaaatctgaccggaagaaatgctcccgagtcgctgccaagactcagattcttgttcgatgaatgcaaaacagtctcttttgcttctctgaacattcgaacacaataagctttttaggctatagatcttacagaaattggaaaatcattacagaaacttgactgtcacatattattattatttatctctgtttgtgtgtatatatatatgattgcaacagttttatatagttgcagctacgtagttggcaaagaaagtttttcttatgctagattttaccaaattgtcattttatctctaccaagcatttccctgagtaatttatgcttctacacgcacaggcctgattaaattgaacctaccaaaaaatttggttcggtctccggtatacaaagtaatctgaaaggttcacttttgcagttttgttattcggtttggtttggttattatctgaaattgtaccggaactcgatttgttacttactaatctgcgacttggcgtcgatcttgatctcataatgctttaacttttcgagtctgccactttagattttagtactaaacccgaattcagtaaaatta

SEQ ID NO: 9898 - DNA, 1642 bp, Arabidopsis thaliana landsberg
ttttgtcgtgtttcacgtgtttatgaaacgtaccggttcttgcttttagtcccacgcacgatctttttttatccatacttgattactttctcaattagtcgatcccacacaaattatatccggccaagcggctaagtccaccataaaaacgaattatatcgataaccggaatgttatcagaaatttacagtgtaatatttctggaatgactactaactttgacgttgttacgagtttaataatttttgaaaagactatataactctcaaaacgtacatgtaatttttaggaatgtccttggagaaaacaagtgttatatgtactatttcaacaattacatgtacgtgtaaattaaaaataatgcaaatgtcagtcaatatttcgaggaaacaatatatttctgttctcatctctaatcatttcctcaatcatataccataaaaggcataaacagaaccaaccaaccaacaagaagaatccaaagacatgaaacttctctttattgttctcatctcttttctttccctcctccaagcatcaaaaggattcgatttcgacgaaaaagaattagaaaccgaagagaacgtatggaagctctatgagaggtggagaggccaccactctgtatccagagcttctcatgaggcaataaagcggttcaacgtttttagacacaatgtccttcatgttcacaggactaacaagaagaacaagccttacaaactcaagatcaatagattcgccgacataacgcaccacgagtttagaagctcctacgctggctctaatgttaagcatcaccgaatgcttcgtggaccgaagcgcggatctggtggtttcatgtttgagaatgtgaccagagttccgagttctgttgattggcgagagaaaggagctgtcactgaagtcaagaatcaacaagattgtggtaagagactcttttcttgataattctttatatgctctgtttttttgctctgtttctgagtggatttaggctatctcggaaatattcaaagtacatagattataagatttggtttgatctttgatcaaacatatttcttgaaaatcctacacttaatatttattaaatcactatttttaaactaaaatctctaggaagttgctgggcgttttcaacggttgcagcagtggaagggataaacaagatcagaacaaacaaactggtttcattgtctgaacaagagctagttgattgtgacactgaagagaatcaaggttgtgcaggaggtctcatggaacctgcgtttgaatttataaagaacaatggtggcctcaaaaccgaagagacttatccttacgattccagtgacgttcagttctgtagagctacgagtattggtggagaaactgtaaccatcgatggacacgaacacgtccctgagaatgatgaggaagatcttctcaaagctgttgctcaccagcctgtctctgtagctattgatgctgggagctcagatttccagcttgactctgaggtaatctttggtagtttaagtttgcgacagaaaactagttatgaaaaaataatatatcaatgctaataagccaccaatagtcttatggtttagtatgcaagtctctattaatcaagatgtatatagagggacatcatcta

SEQ ID NO: 9899 - DNA, 534 bp, Arabidopsis thaliana landsberg
ttctaattttgattctctaaagagtttagtcttgcgtagatcaaagaagagagctccagatggggaaagtgggtttgtggtagaggccccttctttggaatacttggacattgatcaaacgggtgggttttgtgtcattgagaatggaatgcctaatcttgctgaggcatatgttagtgttcttcaccatcatccagtgaagttcctgagttctattacttcagtcaagcgtctctatttatgtttattaccacacaagtaagtaataatctgtttaactttactttgtttctatcatttaccgcagtaacattgtttattcagtattctgtcttgtatgcaggatatgtatcctattagatgtgtcttccaccgtcttgtacatatcacgctatgcacttgtgacgatgagtggttgaatctacttgcgtgtcttctcagaggttcccctaaactaatatctctcaaactttgaaaggtacatatatatattccatcccaattattagatcagtgtctttgatcaggttattt

SEQ ID NO: 9900 - DNA, 505 bp, Arabidopsis thaliana landsberg
  unsure (1)..(505): unsure at all n locations
gctcaagcaaaagccaacaagcaaaatctcggacacggacatcaaaaaggtggacaaaaaggctgctacaccatatttgatcaagaagaaaaagaatagaaaggtgacagcaatcaaggctaacaagcaagccaacaaaggtaagggggccaaacgcatctgggtgccaaaggaaataatttcatgaaaagcaccaagaaggtttggatcccaaaagggaagtgagaggaccgaatgtcaacggaaaatttggagacttggcaaagttgggatgtatatcatgggatacatcataatgaatcaagtttattgccaagtaagttagtgaaaaagtttggacccaaatttcccacccatgactaaggtacctagatttactatatttcttatttttagatatgcgtatctatctttcatgtatctagttttacctttcatgcctagtattacattttggaatntactttctgttaaatgcatacatactaggtaaatcacatgggag

SEQ ID NO: 9901 - DNA, 525 bp, Arabidopsis thaliana landsberg
acaagtcttacaaatgcaaggcaaagaccggtgataagcaaaagcaaaagctcaagtaaaagccatcaagcaaaatctccaacacatatatcaacaaggtggagaaaaaggctgctacaccatatttgatcaagaagaaaagtaatggaaaggtgaaatcaatcaaggccaacaagcaagccaacaaaggaaagccggccaaacacatctgggtgccaaaggaaattatttcaaccatgaaaagcaccaagaaggtttggatcccaagaggggagtgagaagtccgaagcaatataggaatttggagacttggcaaaattgggatgtatattatgggatgcatcattttggatcaagtctattgccaagtgggttagtgaatagtttggacctaaattccccacccatgactaaggtaactagatttattataattcgtgtttttagataagtgtgcaattctcatgtatctagtatgacctatcatacctagttttacatgatgttttttctgtaataaattgc

SEQ ID NO: 9902 - DNA, 1493 bp, Arabidopsis thaliana landsberg
tggaattttgctgttggtaatcataatgctcttttctgcaccatttctatacgtttaacaaatttcgggacgttggcatttttattggattccctcatccttccctgaatgaatcagctgagctttaaagcaaaaccagcgagatcgaagtacaaaatatacagagatctacatagtaaatacctcaagactctgatggaaattagaaatatcgtctggccccattccaggagggcaagcaatgtaaaagtatggctcaaatccatgaacaaagcaacgcacactgttacctgacaatataccagaaactcaaatccaacgaaatcgttccccacaaagagcaaaagaaaaagaggtttaaaaacactcaccttctctggtaaccccaaacatcctaatgattggagcttgccctgaggaacccggtaacagctccttatgactctccgcgattatagagtcaatctccaattgttggaaaactaaacaaatcaaaatacacaaatccaagtgttgagaaattttccagcaatcataagatgaagaagcccttatcaaactaagatagtactcaactgatactctgtgaattcgagagatacgcgggggagagcggaggtcgagcccaagccgaggaacgcgattcacgctcctcaatgtcacggaggattagggattcctcatcttcgtcgccgtacaagagagtttcgtccagaaacacgtcctcttccatcataaattcatcatctagggttccgatggccggagatggtgttgaatcaccagtggctcgatgcttacccgccggtggtggggtattcgaaggaggcggtcgctttttggaaataccggatctattcatggctttgggtgagcgggaaaagaagagaatgtgtgtgattttgtgagctcgtggaggtctgagagaagtagaaagtgagactatacaccactccgattcccgccagttttaagggttttgctattagagatttgatgtcaatgtgaagttttttaaggaacttttctttaagtccctagacaatgctattattaaccaaatcgttacggactttttcttattgtggttgcaattattttgaattaaaatatattttgtcggatgaccaatgtttaagacttttaagtgcttatacgaagttttgattgctaaaaaaaacgaataattgtagatcaaaagagacaaccttataatagagttcgatcgtgatacacatagaatcgttcattgttcatttgatctacaattataagagaattcgacctctctttaattattttatttttagaatatcaggattcatgaccaagacaattaggcaagtgatggtacacttggtagctaactagctaaggttgatgcccgatttcataatggaacttggtttatgttggaagcagaactcgaacatgtcgagcattttcaaatcaatagagtttccaaactctttgcagcaaattttgttgacctg

SEQ ID NO: 9903 - DNA, 914 bp, Arabidopsis thaliana landsberg
aaaaactctcgcattaaatgaggcttttttcttttggtgtcatgttttttaaagtttacaattataaaattagttacattatgtaaataaaatattgaatatttctaaaacaatttttttaaagaatataaaatttatataaatatttggcttaaattttaacatataaaactatgctatgtaatattacactatcagtattcctatttgtaaagtacgttcgataaactttatttgctactatcattacgtacttttgttgcatttttacgatttaaaattgttaacttcctcattccgaatcgcctcatctctgttcaaatcttatatatcagtttacgtaatttctgaatacgttatgttttcatactgtgtaaccacgttccaatacacgtcataaatattcacaatcaaaaatatttccccgcgctgtagcgcgggtccgatcctagtttgaggtaatttataggtaattttttagatagatttttttatttcaattcgatttcagattgattatataaggaaatatctatcaaaaaacacttttaacataatctaaacaactccgctaattggttttaaaaaatcgagtcatataccacacaatcattccttcaaataaggtaattactagatattgtagctttatcatgaaaagtaacaactaagtaaaacgacacaaaaactcaaaaataacagatttagatgattcgcagatgaatggtgatgagtagcaacggcatcaggtagtcgctgaaatttaacagcggcacctcaatcttcattggcgttcatcttctgcgacagtttttctttcaccaccggactaaacctttctgatgagtgaatattggaccaatttgaggaaaacattatccttcatttttaaactcgggagcatttaattacga

SEQ ID NO: 9904 - DNA, 534 bp, Arabidopsis thaliana landsberg
gttgcccttatactaatcagggatcccactgataatcagatattaaagcggtctaacaattttcactatttggatctacggttaatcagatcgttaacataaaaagatatagatttatttgactatcctgcttttcgcatagtggaccaaaatatcttgtaacttgagatccaaccaaattgtagtgttcgtttctaaacctatagttatttttagttatgattagcatgtttttttagttaacgctgcggcagtggcaactacggagtaaaacgacgtaatatgaaaattaacatttaagtaaaacgacaccaaaaattgaaaataacagatttagatgattcgtagatgacagacgatgagtcgcaacaacatcggatgagtcgctcaaatttaatagaagcaccttaatcttcatcggcgttcatcatgtacgacagtttttctctcatcactgtacattcttctctctacttaaatatttttctttttttctgccgctgccgcagtaaaagaacttgaccgatgttaatg

SEQ ID NO: 9905 - DNA, 567 bp, Arabidopsis thaliana landsberg
tcttttagttcacgctggggcagggggaacgtccgagtaaaacgacgtattatgaaaaataatagtcaagtaaaacgacaccaaaacttgaaaataacagatttagatgattcgcagatgatggacgatgagtcgcaacgacatcaaatgagtcgctcaaatttaacagcggcaccttaatcttcatcggcgttcatcggctacgacaatttttctcattttcttctttttccataattgattttcttcttttctcccgctaccgctgcgttaagtaaaagaacgtggccattacttatttttatttttgtattcccttgattttgtttcacaaattaatcattattgcaaacaataggttaatctgttcataacaaaaagtaccataggatattatcaaagttgacaaaaaaaataagaagatattatcaaaataatttgaaaaaacaaaaacatcaacttcgtacattgaatatataacgttgcatgataaaatccaaagcagcgtggaccagaaccaaaagaaaagtacttgcattatcacaatagtttggcttcttctctttt

SEQ ID NO: 9906 - DNA, 818 bp, Arabidopsis thaliana landsberg
aatcaagctattcataaaataaaaagacttatttctcaaaaaaaatggcgagttataatcttcgttcacaagttcgtcttatagcaataacaatagtaatcatcattactctctcaactccgatcacaaccaacacatcaccacaaccatggaatatcctttcacacaacgaattcgccggaaaactcacctcctcctcctcctccgtcgaatcagccgccacagatttcggccacgtcaccaaaatcttcccttccgccgtcttaaacccttcctccgttgaagacatcacagatctcataaaactctcttttgactctcaactgtcttttcctttagccgctcgtggtcacggacacagccaccgtggccaagcctcggctaaagacggagttgtggtcaacatgcggtccatggtaaaccgggatcgaggtatcaaggtgtctaggaccggtttatatgttgacgtggacgctgcgtggctatggattgaggtgttgaataaaactttggagttagggttaacgccggtttcttggacggattatttgtatttaacagtcggtgggacgttatcaaacggcggaattagtggacaaacgtttcggtacggtccacagatcactaatgttctagagatggatgttattactggtacgtaccacgatctttttcacacagagattaaaaaaaacagtaatagtgattttaacttcgtacgtttctgatacacaacaaagaacttcgtacgtttttcgaagttttttcgtctttttcattttagatctgcgcggccatttttggttatgctattgttt

SEQ ID NO: 9907 - DNA, 1532 bp, Arabidopsis thaliana landsberg
gcatcatgcaaatacagtcccggtcgttgatcaaagccctgtttcctaagaagcttcctagccttcaaaacaagatctttgttactaatctaacctttagtctccccaattataatctgtatagcattggttagtgctccataagccaattccgggtgacccggtgggcttgcgtctgaagaagtttgatcagtttggcaaccactgatcagtataccattatcaggaagtgcaccatttatagcacctgcatacacatcttggatcgcgggtttcacatcgtcgctaagcttctgctccagaaactcttgagctaggttctcaactgatcccaatacctcatctgaaacagtttgaatagtagtagtagtctcttgtaggttgcttagaatcacattcataaacttcttcacctttggacttgaatcatctccaaacatatcgaaaagggttgtcctgattttccccacttcgatatcatcgttgcctgtttcttgcttcagcatatcaatcaaagtctccaatggcagagatctgtttcccacttcaattatctctgcttctgtctccttgttgatcgttgaagagtctccagagtctttcttcttcttcgtgctctctcctatctgctctttggcttcatctatgagaccgccactgtgacaagagtcagatatgattgtgatgggacaatcctttggcaccatatccacaagatccctgaaatcatcatctgtaaaacagagtcaccttaataattcataacaactggaactggtaaggaaaatttaaaattgttacgtaaacatgaaaaattaaaagtcaactttagtttatgttttcacttaccggtgatgagattcatatcggaaggaacaatacactcatcgtaaccagtatcatcatcttctccagtttccgcgggtaacctagtcccatgtccactgtaatggacgaagagaacatcacccgatttagccggttcaacgagatctaacaacgcctgtctgatgttcttaccggtcggtttgatcgaagaactatcagtatcaatcaacattttgatgttctcctcggagaatccgtaccgttcgacgaggcttatccgcatccgacggacatcgttgacgcagcctcgtagctctgccttggttcccacgtagttgatcccaatcagtaaagctttcttggccattgttgatatttcaaactctgcttgacaatttttttctgatcgtaagatgattcatccttcatgggttttataatcatcttttaaattataattattgaaacctagtgtctttttgtatgactttttttctgtcgcgtttttgtatgacattaaaaaaagaaccttacaggatattggaaaattataagctctgattttactttattttttgtataaaataagctctattttttcaatctctttcttaaatttctaggtattaattaaaccccccaacaaagttatacaaattgtgtaagtaagtaatatttatattcatttggttgcatccatgtgt

SEQ ID NO: 9908 - DNA, 760 bp, Arabidopsis thaliana landsberg
gttaccattcaaactcgtcgaatgtgcaataatttattggttattgctttgatactttgttttgatctatagtaatttctcatgaaagtacctagagtttttagcattaaaatagagaaatttatagatgaaattaagtagtttctaaaacattggctaattaagttttgaaaactattgtctactttgctaaatttcgttttacttacttctatttcacgtaagttcggataagatagtcggactaatcctcatttagatatatacaagaaactatggatcgtttactttaagtatcgcactaatatcttctctaagtgtgggtgcttgctagcttgctgcttgggcgtgcgagtgtgaagtctagtattttgcaactttatgacttaactaacatttgaacttgccaacttggtttagtttaagtggctatctaattttatttcaattaacacatgcagtggaaatgtttgatgtcacagaagaaaataaaataactaatgactagcatccaaaatttatagtgatccatgtgataagatcaaccaaatgtttgtagcccatgatttttttattggtcgacaccaatattttttttttagttggattgacaggtttaatcagaattgacctaacccaacaaccaaatcaaagaagtagtggtaacatatattcttgtggcagcattactacgagattgaaaatgtgagtaataggtggatcatgacatgtttagtatgtctcagtaacatgtattgca

SEQ ID NO: 9909 - DNA, 1836 bp, Arabidopsis thaliana landsberg
cccattttaaatttaaaatttttattgccatgaaaatagtttaatcctttagatgattataatgatttgtttaaataggaattggaatcaagcaagattgggaagtatgcttcagcatagacccgtgtttgaccggagaagggaccctagaatgcaccaattggtgtagaaaccacataaatctttcattagttggttattgtcgaactgatcctgaacattgttgctgtgtggcagaaaaataatctaaacgaaagattaaaattttctataaaataataatatcactagtttcatctccaaagatttgtgaatttattagtttttcttctccttaatttgatttatctccaaagattaatcgtttctcactagtctagtgtctacatatatcgaagtcataatacaccaatcgtaccaaatcaaagttttggaaaaaagaaactcgagcgaattttgcatgcaaaataagtatagtgtataatcttgttttttttgttaacgtatagagtaaaaatctgttttaatgaaaaactgaattgtacatgtatcaatttgatcactaaaaagtaaaaacatacaacaaaagaaaaattggtaataacattagagagagtaaggaaaaaacacaatcgttgcatccatcgaaccggattgaaacgcaaaagtttaggaaatttggttttgtaccggtttgggaaagaacggttaccgcccagtttatcaggttgccatgacgatatctgacgtagtcgatgtgccatgttggggcgactaactttctaggagacttgtggtaaattgatttgaggacggaaatcggtctttttcgtcgaagtttctcaattatcggttgcggccacgaaacggtaggtcttgagcccgccgaatctaatgtccggtcactcagccagcatctatgaacaagcagcgatcttcttatatttatcggcatgtttttctgattttcttattttgtaattggatctgattttgatgttggttacggccaaactccttaaattgaattttaataaaaattatgaaaaagagacacattagagtaaattgaaccgaaccgatttgaaccgaagcggacttaaccaagaagaagcaggcgcgtcacttgttttcactcccaatatcgaattgaagaagataagagtagactagagtcttcttggttgtgattcttttccaatttcgtaattttaggtacctttttgctcttgttgctcttgtagattatgtttaatgggtatctcaaagattcatgctttacttgttaaatttctgggtttgggttcttataaccaattagctgatttttgaactgttttagaacttagatcttactcttagaggatagagacataaagaatctccattgtttgatatatcacttacgttgtcttcttgtctcattgattcgagcattgtagtcttttagttgccaaatgcaattgtgaaaatgtacaaaactgttcttgtttcatatctgcagtaaaattgtttttggtatttggtgttctgtagatttctcttgtttatgtctttcatgtttgtttaaattgggtttataaatgttttgtggataattcatttgacataataatgggtatgtttcagaaaagttgtagaagatggcgagtgtgtcgtggcgggctgtggctgtagctatggtggtggtgttgctgtcattgcagtggtttgcaaaagggtacccggaagaagatttggtggtgaggctgccaggtcaaccaactgttgggttcaaacaatacgcaggttatgtcgatgtcgatgtgaaagctggtcggagtctgttctattact

SEQ ID NO: 9910 - DNA, 884 bp, Arabidopsis thaliana landsberg
  unsure (1)..(884): unsure at all n locations
aaataacgatagcttcagataattaagcatccgatcaaattgtaattcatgcatttgtcccgtgactcccgtcaatcggaaggaacttataataattgaaatcatacttataataatttgttcaacccatttgcagaatataagaaacttataataattgaaatcatacttataatcatacttaacattatgactaatattcatcttattagagattatcttttacatatagaagaaaaaagataaggaaagtatccatcacgacaacttcttaaaatatctctaccctctcatttcttccatcggtttagtatcctgcattattgatcaccatgtaaaaaccatatcaatttcaatatatatgacacacacagaaaagtacatgcatgcatatattatatacacagacaaagaggtttataagagaaagagaattactgcgactgtggatttgattgaggaaagagtccttgtaaatggatgatgctcgcatgcggccatacactgtttgaaacaaggtgttttgaactcccagtcgctgcaagtgagttcacattttaatgtacatgaatgacttgctgcttctcctccaatggcagccatcaccaccaaaacgaacatcatcatcatcacactccattttttatccatttctcttgttataagtttgcaaagtttatatgtatatcagtatataatgtaatatatattcagtggcaagttctctatatatataaagaaaacgtcaccaactctttgtcttctttgtattaaattgtatgtgagtactatgaactctccatatgtcaagtctgaaaatnagtgttgaaaattgactttagaactctaaaaagaaaaacgctatgggagggataattttgact

SEQ ID NO: 9911 - DNA, 1061 bp, Arabidopsis thaliana landsberg
  unsure (1)..(1061): unsure at all n locations
tgagcataaaaaaaaacttatatttatgtattctgattatagatgttcttttacatgtaggaaacattttccatcatgacaattgacaactttagaactgaatcaactgatctctaccctctctttctctttcagccctctactcgatcttcatcctgcattatttatcaccatatataatgtcaatttcactatgatatacacacaaacataagtacataacatgtagagaaagagttagagagttacggcgagtgtgaagtttagtgcgaggtacttgtaggtggatgatgctcgcagcgctctttatagcaccgtttgacgcaagctgtagtggggagcagagttttgcagtgaaattcacatttaaaaacacatccaacactctttacttctcctccaatggcagcagccatcactacaaaaacgaatacaccatcatcaccacactccattggcttgaaaaagttataggtatatattcaatgaaaactatcatatcacataatataactatatagagaaaaagagagatttagtactgcgagtgtgaagttgagtaggtggataatgtcgtctacaactttccaaacacttggatgagcattttttagggaacatcgaatctttgcaggtgattgcacatttcgtttcacatgaaagatcttgtgcttctcctccaatggcagccatcaccacgaaaactaagtacaccatcatcaccacactccatttgctctccatttttcttcttatttggcttgaaaaagctttagagatatatatacactgaaaactaccatatcagataaaatccgacatatctaataccaaaatatgcaatcctcatttagaatgctatctcactaatttctattattttataatttacatcaaaatttgatacgatattttgttttctgaaatttagttccaaataaaattagagaagacctataattactaggactaaattatttttaactatttttatgtgatcctncatatanactgccattntnngtgtatttntaactttcatatacagagagaaaaaaaga

SEQ ID NO: 9912 - DNA, 1731 bp, Arabidopsis thaliana landsberg
cacgtgttccagccgcaagaatcgcgtatcgcatggcttcatgaatcttgagtggctctccgactggaattgcttcttctagagctttgttcactgattcggctttgctcatcatgtatggatcaaactcaaacgtaaagttggcatttgaaacgatacctccttcttcttcctcttctctttcttcgccttcttcgtcttcgacaatgggagaatcaagaaacgcggctacttcctttcgggataaaagagcggtcttgacacgagattctaaagaaggctggaagaggcggactagccttggtttaagattcgtgaagaagaagtttagggagagaatgaagagtgagagatagagaaaaagaatttgtggttccatttttcatcaaaatcaaatcaaaatttctatctcgggttatttgtcccggttgtcttatttatagggagatgatctatgtcaactgatgataacgtgactaatgtatacaaaaaaaaaacttaacggcttttcgtgggatcttggtaatctttcgtttggtttacttaatgtgtgtactctttaagatcggtttaaaactaagaaaattttggttttcgagtcggttccaaaaattttggctactcaagatcatgatgcattcgagtttggtgcagggaaaacaactaaatttacttggggttggggaaagagtttatggggccaaaagtttgaaacgtcttggcaacccaagaaatgtgttcaatattggttgatatagagataaaaaaaaaatcaccatgcaagtttgtttaccaatcttattgtaaattttgtttattttacatcaatgttaataagaataaatttcatttgatttggatttaaccttttatatttggtaatcttaattaactaatttgtatgagtttatgtttagataaatgtgatactgaagttatgtcacatatatatgactaatcacttactacattatattaaaccaaatctcaaattaagtcaagaaaacaaatcctctgataaaccaaaccggacttgagagtgatgatatcttcccgtaacctctagttgttgccgattaaagaaggaagacgtctaatcttcatgtcctcaattacgtaaaagaaagcagaacccaaaaaacatggacctcgtgagagacaatttcatcttctctgcacgtttcctttaaaaacttttaagcactaatcttcattaacacgcaatatttacttcaacttaatacaactttacgtcccttttaagcttacaatccaagattgtaaacctaaaccgtttttattttaatgaatatttacatttttttgccacaagaattctttttatgtcgggtttattttttattttatttatatggatttgattttttagtgtaagaatcctccagttcagacttagcataaaaaatttcatttataagcatttgtgttgtgaatcacgcatctggaatgaagcactgccaatgttgtcgggtttttatttatttagtatgaatttgaatttcattaaggaatgagagattttgtaaaatttccaaaaagagcttgccatgaaagttattccttaccaaaaatgctaaaaagcaagaagaacctaggataattttgaaagatcattcaagggtgagccaaccctgcattaggtcaccatagttttgtgctttgattgggtgagaattgtgtcacgaatcagtcgatcaatcgccttgatta

SEQ ID NO: 9913 - DNA, 620 bp, Arabidopsis thaliana landsberg
tgccaagggcatgcagagtaaagcaaaaagcagtaagggcaaagccacatgtaaggatgagcgaatgagcactggatcacctaactgcgcccaaataagaatacctattgttgcaacggaactttgcatggccaagatgtcaagtaccagaaaaatgaagagagttggattagtggccaaagttgccctgcccaagtgtggagcagagctgttaaacccacctggtattgtaaaacctgcagcaaacgtcattgtggctacaagagcagctaccaggagaagagtgttgacgtaatctctgttatttttagggtctagtggcactgacggttttgttaatgagtgtacagattcgaaaccccttgagtgaatagcgtgtaataagagcgccagtgtccacctctgtaactcaaaaaatgggggtcgagctataaatcatttatgtgatatcaaattttgttgtatgaaacgaaattatacatacctcctgaaagatgtagtggggtttcacctctctctcggcaatatccctagctcttaagccgtttttgttccgcactttcagtatcttgctactcctagcaagccaagtaatggatttaaagtgccagttcatgacg

SEQ ID NO: 9914 - DNA, 851 bp, Arabidopsis thaliana landsberg
cgattatagatgattagcttctaactgtggataattatttgccattaggtgagtccagagctctatggagataattacccaagattctttacttactggactgtgagtagttcctcctatgctaagcctttcatttttataaataataattatgctttttgtatttaaattctatatagttttaagttttctataattaattagttcttatgttttggcaacagaacgatgcatatcaagcaacaggttgctacaatctcttgtgttccggttttgtccaaaccaatagtgagattgcgattggagctgccatctctccctcgtcttcatacaagggtggacaattcgatattactctgctcatctggaaggtacaatataactgaactatctaatttataatcaaaatattatctcttctagtcacactttaactacaatattcattgatttctacctttgaaaattgggtatacagtacataaaaaaacaatccgatcaattgcatatgctttaattagaagatgctctatcttttctctttttttatcatttttaagaaaaagagaagtatacttgagtatcataccacttattacaactcttctttacttttgttctaagttattctttttcattctttgatacacttgtccccaaataggtcaacatacaactctcaaagcaaagctaggagcatggctcataagttatcaaattaatagtactatttattttctatagctagcctcacatgggtcataattaaaggcatccttagttctatttttatacaggacaaacaacccacagattaaaccatctattctttattgttaggtgcattaaaa

SEQ ID NO: 9915 - DNA, 1373 bp, Arabidopsis thaliana landsberg
gctaaattattcaaccaaacacggcaaatacacaatttattaattcttacacacaccaatagagagtttggttaattagatcatattataatgtaaattacctccacaaatcaacatgaaacttattaaaagaccaacaccatttgcaatcccggccatttctctttctctttctttattttctgcttcctttattcataatcatttcgttgttctatataaagaattttcgtttctttttaaagataaaaatactaggtgatccatagataatgacaatggaacacttcaaattagggggataaataataggagagataagtagaacagaaataaaaattcatttgattaatgtttattaataattgtttagtagggaataataataaaataaaataactaaaatggagaaggataaacttaattatggtagtagtctcaccaaattactagagaagctacgaacaagaacatctcaacacaaaaatcccaaatcgattatagtttaaatgatggaaaatgaatccaagttggtgttagacacggctttatggacttcatcatgcgatgatgtgctaattccctaaaatgctgaaacacacatgcaatgttttccaagagagaaattaatcttacatgtacttagttttggtttcatttatgttccgttgaaaaattaaacgcaacttgtagtaaaagtcaagcagtgtggaaaacgaacatattcgtgtctaaattatatataactgtgggaagagggaagttgtttaaacaagaaagaaacaaactgatttagaagagacaaatacaaaaacaaaaagatgagggtcgtattatttttattcatcttacttcacaaaggtttctccgtgtatatcatcatcaacgcccttcaatatatctctccacaacacaagatctcgtccccaaagagtatatttgagcttggaattttcaaacaggccctacgttccggtgtcggtgaccgatcatgtggtaccgaaagttgcctaacgaagttgtttgggttgccaacagagacactccagtctccaagcccatcggaacactaaaaatcttgaataacaacctccacctcattgatcatactagtaactctgtttggtcaactcaagtgactagccaaagtctaaagtcggaactgaccgtcgagcttcttgacaacggcaatttggtattgtggtactccaacaacaacgagacaagtggatttttatggcgaagcttcgactttccgacggatacattactccatgatatgaaagtgggttgggataagaagtcgggtctaaataggatattacaatcatggaaaaacaggaatgatccttcaactggcgattacacttata

SEQ ID NO: 9916 - DNA, 1571 bp, Arabidopsis thaliana landsberg
  unsure (1)..(1571): unsure at all n locations
atctacgtaccccagctcctctagtgatcagtttttgacatttttggacatacccaagaagaacagagagaggggcaaacctggtgaaagttctcgacctcgcccaagagacaggcaacttattcaagatcgaatcaaggaacttagagaacttgtgcctaatggatctaaggtgatttttctcttcctagctacaagattacttgcaccttcctttgtaatgattttaacttataatatgtttttgtcattcactaatatttttgtcacattttcagtgcagtatcgattctttgctagaacgaacgatcaaacacatgctctttttgcagaatgttactaagcatgctgaaaagctcagtaaaagtgctaatgaaaaggtaaaaatgtcagctttcttgataactgataatctctgttctatcctagaaatttttattccagcctccatagtttgtaaatgaacacattaagcagtttgttaggtttgattgattgatgtagcaaatagtgggtcaaatttctgaatccttgaatgagaagataggattattaggcacatggagatatatagaaaaactcaactgaaaatcagaagtaaatatcaaaattagcttatacctttgtaatctcagatgcaacaaaaggaaactggtatgcaaggttcaagctgcgcagtggaggttggaggtcatcttcaagtaagctcgatcatcgtggagaatctgaacaagcaggggatggtgcttatcgaggtatgtaatcttacattttgtctcttttctttggtttagtttaatctttgtttgaactcgagtcccaagttctgcgagtgtgtattaaaagtatttttgggtattggacagatgttatgtgaagaatgtggccattttcttgagatagcaaacgtcataaggagcttagacctcgtcatcctaagaggtttcaccgagactcagggcgagaaaacatggatatgctttgtaactgaggtaggaagtcgaattacccaattcatgaaagagattccaaagcaaatcaaagtattttccttggttttgattgaactttggattagtatgatatatatgactgactaacatcgagatactgatatatgaatggcagagccaaaacagcaaagtaatgcagaggatggacattttgtggtctctggtgcaaatatttcaaccaaaggccaatgagaaggggtaacaggcgtggttgcagagtttgcgtttacgtaagataaagaataggcttgtgtgggcttgtacagtgttgttgtgacactcactgcaatactttcatttgtttgttttgattttttgtataaaagataggacttcaaagttgagtgtttagtgtgtttatgatttgcatttgtttgcttttgagtttttggaccctttgaagtttgtatatatacatgacttgaaactttgattttcttcatacgtttgatttgcaagctgtggaattattaaataatggttagaaacttgcaagcatgcattgtaantatcataatcaaaacttgagtaacaacaaacactaaacccaaacaaaga

SEQ ID NO: 9917 - DNA, 1311 bp, Arabidopsis thaliana landsberg
gttggatgattaaatgacatttttcccatttctcttctcctctattctcacagcgcagttctcaaaggtgatttttttaatcatccttccgttgaccttatacaccatctccgaccctcctcttcgtagatatgctctgcttccatgcacattttgatgagggagaagacccatctattaataatttcttatgcattgtaaacatcgatctcaagaaaacattttctctacgtggtatctatggaacatgcagctgatattaattattggctgtgattaaactcaaagcttttataaactcgatgagagagtagtgatgaaactaaaacatattttatcatgatgcaagtggcaaagaaagttgacctcacgaagagatctctttgcattgatctggacatctggtgacaaaaatgcatcaccaatgttctttggcactacctttttactgctcttcaagttcatagccggatttaaaacaacaaacgaccagttagtataggcatcttgcttaaagattgtccagttcttcatcaacataatccatctttacacatcagttttcaacatgaaacctagctctgataatggttcctccctcttaacactcaggaaagggaaacacaaaatgaataagagaaagcaaatttaattactttagcttgagtttataggttttaaccttcatgacctgagttgaataaaccacggtttcttgacctatttgcttccataatttcttctccaacacttctttcttctccggccgcaaccatggtttttttaacattttttacactttcgagatcgggaacaacgtttaggtttcttgcacctttttctaactgaaatttatttaaaacttttggctttctctatggtcagactaaaaattcatgtctctatatataacaagttttttatcaccacaaaaaatgattaaaagttatatatagtaacaccataggctaaacaaagttcatattcgatgactccgttgtgtgtgttctatttcagttttcttgtgaggaagaaatattgtattaagggtttttattttgtcacactagtacttaaggcaaatgatccgggaacagcttaattgaaaaccatgataaagtcgcagagaaaacaataagataattaaaaaggctcaaatggccatcaaagtttaaacgcataagataagagacaaccataaagaagagagtctcatcatttggctccacttgggtccttcttgacaacactcttgataactccaacaccaacggtttgcctcatgtccctaatagcaaaaactgagagcac

SEQ ID NO: 9918 - DNA, 2257 bp, Arabidopsis thaliana landsberg
attttttttctccttctccccggcgaatcctactattatcgattaactaatttgatgtcttttttttttctatgcacaaattcaacttgattatttaggtatacaagtaaataaaagatttatcataaaattacacatgtaaaagtttgaaacaaatttaattattcataactcacataagacatgtaaaaaaaaacaaaaaaaacaaatgtcacttagtgaaatggataccaaactttatgatttataataccttgttgtaatttaaatatctgaatttccaaagtgtaggtgactgtgtaattcacaaaaattgagtaaaagtttaaaaaaataaggaggaacaaaccatctttcttcaaagagtggactagacaaaaacaaaaaagcaaaaccaccacaatggaataaaaagtggttctgtttcttaaagaataaaaaccattacaaaacaaaaccaccattttctctctctctctctcctcgccagcttctgcaattcgaaagttcttcgcatcatcttgctgtcaccactctctcgcgaatcgaatcacgattcttcaatcttcttcttctctattgcgatctctctgaattttgtagcttcacgatttcaatatctctactttcatcaccaatcgttgggggtttagggtttttgcatcgacgccatctatcgagctccggagaagcatactcatcttctattttggctaaatccgaggtgggttttgctcaggttttgctcttttaggtttctgttgggttttaatcggatttttttccgtatgattctgaaattgctaaaaccctaaattgaacatgtttttgggcgtgcttcgttgtaggtcaacttaatctctacgaaatagcttttgagtgatgattccgatggataattattgcgtaccgagcactagcacgaccggtttagtgttttcggcgacttcgagcatgaatgcttcttctggatttcatcttactgtaaattctccgacttccgttaccggactcaaacatgaagcttctttggctgttgattggtctgttgaggaacagtatatattggagaaaggtctttcaaagtaagtatttttgttattctccattgttcttcgttctctgcaaattttctcacttcgtagctattatacaatgttagagtagataaatttttatatgtagatgaaggaaaaggttttgcatttatgtttcatatgaactgttatagctcgtgttgttatctggaatcataagctgattcagattcttatagatgtattttgtatcagaaaatttctacgaaagatggctgagtttttctctgtgttagtttcttacctttcgctgttttatgttgttcgagtttgtcttttattgttttgtttgcctaaaacctttgtcatgtcttttgtagatttaaagatgaaccacaagtcacaaagtatgtaaagatcgcagcaactctaccagataaaagtgtacgggatgtagcaatgagatgtaaatggatgacggtaagttcccaatgcattgtcattaagtttcataagtggcttgcagacttcttattagttgttattcaaagagatcttggtaacgtcatttagcttgggagatgaaaaaaggaggaaaaacatagtgacgctactttgggtgtatgctttgttaaagataaagtcctatgggaaaagttcttttatatttttttggctataaggtaggcttaaagttctattgctatattgatgaaaagacaccttaccatatcataaaggttgtttaaagtatggttaagagtgtgcaaggagagtaataacaagtattgctgacgatagatctggctttctgttagctctggagtcatgttggaacttgatttgaccctaaagcttgatttgatttctgtagttaccctgaaactaatatcgccaaacgagtgatgtcagatagccttgggcttttttcgactttctgaagtttattttgatatgttactttctatgaaggataagatttctatgagcgatggttaaacattggttatatcctctgcagtatggcctacactgtagtgttaagattcatataataaatggcgaaaaaaagtagacagattatagtgccaaatattaccttattggcttatccatactatctatcctgtcatataatatttttatgaagttgggctgaagaaatagatagatcttttatgacttgagttgtacaagcagatatttgactcatacaaaca

SEQ ID NO: 9919 - DNA, 1399 bp, Arabidopsis thaliana landsberg
ggaaagcaccccgtgccttacatatagagctcatatcagatttgaaatataagaaatggattacaagaaaaacaccaatagctgcggatcaagagccatgtctatatctagtttacaagcttaagaatattaccaagaattcctctatacgcagcttgcacggtaactgctgcgatctcttgatgaatcatctctgattcggatagcgaatcatcaggaacagaagcaacatcttgagaatctgttggttggacctcagaaacttgtatctcgtcgtccgaaacatcttcatgttttagattctgcgtctctacaataccactggtatagactgctgcatttccaattgatggaagatccgaaacaacatcggattcttcaatctttgatataaccactacttcttttccattcacaattctctgcacgtgataaaccatagagaattgttgtcaggaacaattagaaacagacaacaaagggaaatgaaatcagaaagtgacaccatagacaatagtagacgacacaaaattagtgggaaatttgcaatgtctaaagtgaaaaaactagtaaaagagatgtcaagcagtcaaggtcctctacgagaaccactactgtaatcaacctgagaaatttaactatgcaagcttgaaattcatttgttttatcatacaacattgtgcggaagtgtgttacctccttatctttagaaccactagatttagatggtttctttccaagtagtacactttttaaccaccttgcaggctttcccattatgtccacaaccaaaattcaaaacacctgcattagtccgaacaatcacaaaatattatggtcaagcaataacacaagactataacacaacacacactttcattactaaagattgcaattttcatattttggttctatctagagcttttagacattaaagagatacataagctctttgtaacaggattcatcatactaagttcaatggatcagccatttgtttataactatgtatagatcactatcaaacataaaatcattcttttataagtacatgagctaaggatttggatttttttataaaaagattaaatagtagtaatccacaatcattaaccaatgaaatcaaacaagaaagagaaagaaaatgcaatgatcatcctaatctaaaatcaacaaaatctccaaaattgcaaaaacgtataaaactccagaaatgaaataaccaaaaccagatctggaactcaccttgcaagtaaatgtacctgatctcaaatccacactacctgatctcaaaatctacaataaagaatcatacaaaatgaaataaagatccgagtaatgtctgtctccaaatagagaatctggtcggatctaatgtctgatttccgacaaaaactaa

SEQ ID NO: 9920 - DNA, 1193 bp, Arabidopsis thaliana landsberg
attcatacttagataaagtcagagaaatcgctgaacagttgcgtcgtttgaaaaatgggaaatctgattatgaggttgtcacaaaggtgttaggctcgctctcagagtcgcatgaagatttagctacgctgttagaggaacaagtagatctgaagaaggtgtctcttaagagtcttgctgagtttttttaacagatatgaatcagaaaagagagagagtcaaagcagtaatgaattacctgtgtatgaaatgttatctctcactcttggtcctgtgacattttatgaggacatgtggctattatccagcggtaccacgaatcacatgtctccatatctgaaatttttcaccactctagacagaagacacagggctccggtgaaattgatcaacggatcaattatcatgttaaaaggtagaggagatgtcaaagtcatgaccaaagaagggaagaggaagacgatcaagaatgtgctttttgttccggatctcgacagaaacgtgttgagtcttggtcagctaggacacttaggctacataatgataatgaatagagacaaatgcattcttaagggtcagagaactgagaaagtatttggggaagccgtgaaggaagagggaggttttgttctgcgttatcaggtgattgaaggtaatttcacttctacttaacgagctgctttgccactatgaataaattggtagtagacttaactagtaaggtgtggacaaatcaagtgtttcatttgtttgtttgttccattttctctaagtttgttcatctaagaaaagctgattcatattctgctattgtaatatgaattagtctggttggttttactctagtagtaaaaaactatgttgttattaacaatgcagtgcttttgtcaagttttattaatggtgaaaaggagacgaattggaagggtttttagtaaatttatcaaatatatgattacaggaccaagcttgagataatttagcgaaatataaaggagatagacatggcagggcaagggcatttttgaccgtagtaccattgtgacataaattcatgcatgcatatcaatgaaatggatgtggtagttcatcacgtatctcatcattacaaggggcaaaaattgcaaatactaaaacagacttatatggtaagtatactttattcccttaacaggatcaacccacttaaattg

SEQ ID NO: 9921 - DNA, 859 bp, Arabidopsis thaliana landsberg
actgtgtaggcaaaatcatcacatcgagcgaagcgttaagctggctctgttttacgactggctcttctttgacgaaagaatcgataatattatgaatgttgaacctgctgctctcttgatggtatggtcaataccgcagtatccacacatcactcactccttacttgaattcttacttcatcttgtcgaaacttatgacataacccgtcgcgatacgattgtaagaggtttgacgtcagcattcagagaaattgagcgaaaaggagttattcggtcgctggatatattcctaacaaatcctgcacttgcaccagatttgaagaagaagctagcaaatctgttgtcatgtcatcaggagaagacggttcatgtgaatctcaatcaagttagtgttctttctaagcaaacagttctttcttcggaagctaatttaaaagattgcagcaccaaaattgttgatactcctgaccagaagttggacaattccgttgaaaatccagcaaaaaaccataaggttgaactgttcaaagagtttataagaccctcacggtgaacaaaacccttagtctatgttgtgaatcttctataaatcttccagccggaatcgaagctggactctctctactaacgatcaagagactcacactcgagaaaaccatacaatcaaacacttggaacgaagacggagaagaatgacacccacgtgattcagtgattgatcctatgtctcggcgagaacagagactagcaatccactatctcaagtatacaagatcatcaagagttctaccagaggttcacgactaagtgttctcactccacagataattgaatgaacacagcttagagatgatctttc

SEQ ID NO: 9922 - DNA, 1819 bp, Arabidopsis thaliana landsberg
  unsure (1)..(1819): unsure at all n locations
cacatgggaatggggctttgaagatggagatattcatgtgacccgcacatgtcctctcctctcttttccttgttcccatgcaagaagngcccactgtatccttcttcttttccttccttatctccacgcgcgtggtcgttttcatttcgtccgtactacgtaattacgacaaaacttactcttataccatcaggcattagtccattaccaggcaccacccgaatggcctataagcataagtgcataactatagggtttgtcgtcgtctacttgaatttttcttttggaaatttaagctcacataaaatagtttatactctttattcttgttggagaaaataagactggtaactatgcaaaacaacgtatagcagctattacatttatggctaaaccagatcacaaaccatttagagtttaaattaaagttcgaataatattttagcaagtaatccggcttgataaataaatgagacacttgctaaaagtaatccggcttgtattaacaacgcatatcctaatacaataataaatcattgttgtataattagttaattactatgtcaaacgtctagctcttaaacaaacaaatttaacgtgccaaatctcatttatcaaacaaacaaaaaaatccaatctagatgcgaggttgatccacttaagtgagtgatgagtccactaaagtctaaaccagtcgacatggcgcgtgaaagctcttcttctaaagatccaaatctgtggaagcaaccaaagtaagagataattaaataaatctccacaatccgaaacacgaggataataaaattaaaaataacgcacaactggacccagctttgatggcaataccgctcaattaaccatttcccaatttctaaatgtagaatttattttatatcgtttcaatttttacatcgttttttatagacaaaccaaaccaaaattcgttcataaccgaacctttcactaatgtaagcaaacaatgtaacataaagcatagcaaaccaaatcaaaccgatagagtattgtctctaaactcgcaacaaaccaaaataaaatcaggttgaaccgaccacatttcaacatttttgtctactaaatccatcatcactcatatatatatatatacacacacacagttacacatatccacattccttacttgttcattattctctcagactcatcattcatctctctctttctttcaatggaagaaactctagccactcccgacgccacgagacgctctctgtcaccgtcatgctcagccaccgtgaaatcacgcgccgctggtttcgagcgcagaaccaaacggagattgtcagagactaacgcaagcgtacgtgaagaccgagaagaagcagaagaagaagaagatgaggtcaaggaaaagattgaggcgttgcagaggattatccccggaggagcggcgcttggtgtggacgcgctcttcgaagagacagctggttacattctgtctctacaatgtcagatcaaaaccattaaagtccttacttcgtttcttcaacgcatagatcaagaagacatgaagttcggaggttgaagattatcacaccaagactgctcttctttcttcgattcctaaaaacaaaaaaaaacgtttttttttttcaaatcttttatttccttttttataacatggattttagctttgatatatgaggaaagagactcaacatttttttcttcgaattttttttttctttagtaggagtataatctttaattttaatgttctgatttatttattaatgcgtttcacggttatgagaagtgttcattaacgaaaattagcatt

SEQ ID NO: 9923 - DNA, 1434 bp, Arabidopsis thaliana landsberg
ggtaacaacggacgagtaagacgtggtggcggaattgatgctaacagagctactaaacccgtggatgatgctccccgtgtgtctgttactgcgtaaatgtgcttttgaaacaaaaagctctattggttttagagagtttaggcgtagagcaatggcaaaaaaaaaaaactattattctcttttcactgtgtcgccattttattaattggagtcaaaacttgagagcaagagagtttcgtcggttcttgcttgtctattttttcttcactgctaatgaaatctctttcttcatgtggctaattctaagctttactgattctgaatttcttttcgagagactgatcataagagaaatgttgtattagccaagcagttatgaatctcataatacgatgtcaaacaaattaaaaatggcataatgtgactttataattaagctttgattatatgttgccaatagaacaacgatagctatgaacaaaatacaagtattctactaaaccccccaaaaatatatagataaacacaaacaaaaactaaggtaaaaacttcgtagagctgaagtaacagacaacatatgctttcagattttgatgataaagaaaattttcatagttcagaggccaaaattgcaagcctgaacaaactcgaggtcatagtcgacgtgtttggtccaaagtggtcgaaactggttcatagctatgtcaagccatggcttcatgttaccgttgaagtgtaccactgcagcgttgcggatctcatccatgctaatgctcggattgtaacccagcccaagcacatgccatgatttgtccagcggctttgtggttgagtaaaaggtgatcagtcccggtggtaacgtccccagtttccatagagccctgttctcgttctgcaattcaaataaacacaacaaagttttaaaaaaacatcacacaatgaaaagcattgtcaaatggcgaaaagaatatcagaaagggtaccagattttgccagtagtgatattcttctgtgcacttctctcttctccaagcatcaagatcaaagaagttcattccatacgcccacgcacatgctttgggattaaacttctctttgatcaaaggatgtgagaaattcatgtattgagcgtaccgatgaaacgacccaaaacaagtctctacagctccattcactttcccatccatatcgatctcccacagacccgttaaatccttctgcacaaccacatcatcgtccaaaaacagtatcctatgtagtttcgggtacatctcaggtaaataaaacctcaagtgattcaatatagacaaatacttgggattcctgaacttcatattcgtagtatctttcgtcgcattctcgagcttattctcgaaatagaacttctgaagattcgcagactccaattgcttcaacacaggcacatacgaagag

SEQ ID NO: 9924 - DNA, 1065 bp, Arabidopsis thaliana landsberg
atctaatagcagggtattgttatacacaatttgtgatttaaatgataacaaaacaaaataaacccaataatttgttttcaattcaataagcctcttggttcaataatttctcattcaatgtttatacttgtaagttgtaatctttggctcaaattcttcactctacaaactatagacgatggtaaaattaaatgcaaaatccactttgagaggaaaataacaaaaatggtaaacggaaccctctaaatcattaagcaggtaaaggtcaacataatgacgcgccacctccttaaaagacacgccacgtagacaattcctcagaatctgattggctgatcttacgttgaaacaagtcaccaaaacccatcaaaatgctcttaaaacctcccacactctcacacgcgcgcgtggagtctctcttgtcttcgtttgtgtttgttttttttggactttgaccttccttggctaggacttgagaccaaaaaaaagaaaaggagaaggagaccgtcgttgttctccgatggcgattaacagaattgctcatggttctctgtttctgacggtagtcttgttctttctgacggttaattacggcgaagctatatggttgacgattccgacgacgggtggaacgaagtgtgtctccgaggagatacagagcaacgtcgtcgttttggctgattactatgtcgtcgatgagcataatcctgaaaatacacctgctgtttcttctaaggtaaggttcctattgtgcttggaattgaatcgcttcaaaattgaatcttttgtaggagattgattggttcaattttgcgcgtctttacttcgatttttagggttttaatggttttgttatgtggtttaatcatcaaactgtgaattctctgtcggtgacttgttacggatcatattcattgatatgtataaagttttgaaattttttaaagatgcagatttgttgttgcatgttaatgtggctttatatttgcagatttggtttgaatgttcttaaagctaatcattgtcataagatttttgcatggtgtctctgaattttctgtgatt

SEQ ID NO: 9925 - DNA, 979 bp, Arabidopsis thaliana landsberg
agaggtgaaaaactccgcggagtcatctagccggttgaagcctccaaataaagagttatcagagggcaaaacgattttgtactttccgggaacagagcaaccgatacggtagtcagagtaactgttggtccagtggaagttgaagacgaagagcaagttacctctctcgaatacaatgactctgtctccttcatccttgcgggatatgtactggtgctctgaagtcatgaaaccatacgtctcctctagattttgcattgctcgatcaaactcttgtagtccatggtatctaagatattctgcatctcccagatcaaacctacgtcggcatttatcataactaccattattcccagcgatgactctgccatcaggaaggtgctggtcggtccttgggaagtcgatccattctgggtgtccaaattcgtttcccatgaaattgaggtatccttctccacccaatcccatcgtaatgagacggatcattttgtgtaaagcaatcccacggtctacacgcggagtggcctgtctatcaacggccatgaaatcatacatgtcctatataatcaagtaaaaaacataagatttagtcgaacaatttatctgaattacaaccagacctaagagttcaaagacagtaagatgttagttattctgtttgctgagtctatcagcaaccaaaatggtaccttatccattagccagaaagctatcgttttgtctccaacaagggcttgatcatgactctctgcatagacgacacatttttctccccacctcctgttggtaagcgtgaaagttatatcaccaacctgccagtcctcgtctctcttcctagagattacaacacgccatatcagttcagtatcatataacaacgtcttacttaataatctcactgaaaagccaagacgtcctgagaacatacttaagaagctcaatccatttatctgccactgcaatgtgtagacggtagcaa

SEQ ID NO: 9926 - DNA, 1348 bp, Arabidopsis thaliana landsberg
aatacgcaatattaaacggatctccatcacatatattttattgtttggttatgactgttaaagtacatatatgtaatgacggtttcagtttcgctttgttaaaaaattatgattaacaagtggaacatgacttgtaatcacgtacttgattagttatgtgtgttaatctccgattatacactaactttgactcgtgttattttatttaacaccacaaataattctacttaaatattaaacaaaagctttgactcatactctctttcgactaaaatttttggtctacgagtcatacacgcgtatacttttcaaatatactattcacatgttcacttggtaatctcatttaatgcataatcatgcaagctgtacgttaacgatcaatggcaatttcttgtaaatttgcaacacgctcatgggtaatttcgtcttggttttgttatataaataccccatcaattgctctccaacatgcattgtctgaaaccaaacaaagaaaatacacgaaggaaggaaaagaaaagtaaaaagaaaagctttctgcaaaatccaaacatgtccgccaagatttcaatattccaagctcttgtctttctattctaccggtttatcctccggcgatatcggaactctaaaccaaaataccaaaatggcccttcttctctcctccaatccgacctatcacgccacacattgatcttcaacgtagaaggagctcttctcaaatccgactctctcttcccttacttcatgttagtagcatttgaggcgggaggcgtaataaggtcatttctcctcttcattctctatccattgataagcttgatgagccatgagatgggtgtcaaagtgatggtaatggtgagcttcttcgggatcaaaaaagaaggttttcgagcggggagagcggttttgcctaaatactttctagaagatgtcggactcgagatgttcgaagtgttgaagagaggagggaagaaaatcggagtgagtgatgatcttcctcaagttatgatcgaagggttcttgagagattacttggagattgacgttgtggtcgggagagaaatgaaagtcgttggaggttattatctaggtatcatggaggataaaaccaaacatgatcttgtctttgatgagttagttcgtaaagagagactaaacaccggtcgtgttattggcatcacttccttcaatacatctcttcaccgatatctattctctcagttttgccaggtcagtctctttatcattattttgtttgcctttacgtttacaaacaatatatttgttaagagtttttttttggaaatactaaacgagaatgttttaattactaaatattgct

SEQ ID NO: 9927 - DNA, 1738 bp, Arabidopsis thaliana landsberg
tagtttatgtgagtcactagataaaacggtaaaagttttcattatgacttcagttaacaatagtcaactctttatactttatactgtagtgttttcttatctccatttttctttttgtgtacatcttgtagaaaatcttcccactataacttcttcttcttatttttaaaaaatactaatctactattatgttgttggacacaaaaaaaaactaaactaatctactatgttgtatggataatctttttttgttgatagtctcattataaattaaaacgaatacttcacagttcactagatgattaaatatttgactcaatttgccaaatatgattatagaagaacttttctatataacataccttcaagtggatgaaaatgtgagattttttcttcataaatgttttttttcagtgaccttatatttttctttattaacctgctttttcttcaatatgactcaaattttatttatttatctatcctatttgtaaaaataatcagcaaaacatcctctcttaactacgattttaccaatattttgtttgccgtttttgaacaaaaatttggctatctacgtaataaaccttaacaagagtttatcaattttgatctaaatgatgaataaattatgaacctcaaaatctggacttggatccgccacttactagagtcacacaaacgtcaaaagaaggacccacgtgaaaaaccaaaaccaaaaccaaaaccaaagtaaaaaagcacgtaacggtaaaacacatgaataacttggctataaataaatagcaaggctttagtcatgaatgagcactcaattcgatcactaactctcactcttagtacaaatattttcaagaatggtttctccttctttttcaaccaagcttgtcttctttgcttgctttgttctgttcacattctcacacaaactcgtgacaggagaatccgacaaagttgagctcaatctttactacgaatcactttgtcccggttgtcagagtttcatcgtcgatgaactagtcaaagtctttgactccgatctcgatacaatcaccgatgtcaagctcgttccattcggtaacgccaaagtctccaataatctgaccgtcatttgccaggttctgttcaattttctcacccttcttgttcctatttatatcatcaaagatcatcatcacttgtatatgtttattttaaactctatctctaataaaatttatcgtttggtaaatttctgtagcatggtgaagaggaatgcaaactcaacgctcttgaagcttgcgtcattaacactttgcctaacccggtatgcattttatctcttaatgttttggtgcattcaggtaaaatgatagttaattacaattttaatttgataaaaatgtgatggttttttggaacgcagaaatcgcagtacaagttcatacgatgcgttgaaaacaatacggataactgggaatcatcatgtttaaagggctatggaaatgagaaagccatcaatgattgttacaatagtgatctctctaagaaggtataggtttatgtgaataataataatacattcataaaaagataaacatacattgtataattatataaccttataattaccattattttttttgtcctaatttaccagctcatacttggatatgcaaaacaaaccttgagtcttaagccgaaacatgaattcgtccatgggtcacaatcaacagcaaaccactcttaccgtatatat

SEQ ID NO: 9928 - DNA, 528 bp, Arabidopsis thaliana landsberg
agatccaaagttctaaaggaccgagaaagtggttagagcccgaagtgattacgctggtgcctctttatctactgctgcagcattcaccatcttgttcaagcaaggatatctcgtattcctggtaagataacacaaaccaagacactctaaacaaaatctctgtattgagctaaaaattggtatgtgaatgaatcttttgtttgagtgtttagaggatcccgaattctgtatcgaaggatcaagtgccggatgagaaaacagtattcaagatccatcacccaaatgggaagaaatcatggaatgtggtttatctggagaggtttggagctttctctggtggatggcgtcgtgtggttaaagagtatccccttgctgttggtgatacctgcaaattcacattcatcaaaccaaaggagctacttctagttgtctccaaaccctaatgaggatggatgtgagggtgtcttggagaagaattactacgtaaaagaactttattgtcttaagctttatgtaatgactttagtt

SEQ ID NO: 9929 - DNA, 1394 bp, Arabidopsis thaliana landsberg
tatcggcttttgattggttatttggtcggctcctcgaaaaactgtagcaaagtttgcgagggatttgcgggtcgttttaagtttatatatacaacgcgacccagaccaaaaaccctaatttccttcttcttctttcttcgtctccgtctccgtctccaaacaacgcaccggttccattcttgttcgtctccgtctccgtctccgatcttcttctccagttccttctttttccatcttcgtctccatctccatctccgtctccgaccttcttctccgtctccaatcttcttcgccgcctctctagtcccatcgatctcaaaatgcaaggtaaagaatcttctctagtcccatcgatctcaaaatgcaaggtaaagaatcttctttcgtttagggtttcatgcaagtcgatttccttagatatgattagggtttttcttgtacttaatcatttttgtctaagtttctaattagggtctcgaatttcatgcaaggtgaagattgaatgttctgaatcgccgcctctttccttcttctccggcaataacccgatctactaagccgtctctccctcttctccggcgataacccgatctactaagctgtctcaccctcttctccggcgataacccaatcttcttcgccgcctcttgagtcccatcgatttgcaaggtaaagaatcatcaaacgtttagactttcatgcaagtcaattttatctgtgtttctaattagggtctcgaattttgagttgggtttcattagatctagttagggtttcgcttgtttctgtacatctaatgactttgatctgttggatttcattagatcatattagggttttatattttgtgttggatttcactaatgttttcttttcatttgcaagatgagcttcttgggaaacgagtatacaaggtatctgtctcatcagcagcaacaacaaccagtgtctcctcaccacgagtgtaagtgatgggaacacctcagcggttggaggaaatcaccgttcctttgcacctcagacgccaaccagtcagaaccttcctccaaatggtgcttctactcaaccggaaaatcagcagcctgcaccttctgtcaatcctactaatcctctagctgtcaggctcaacaacatgacaatataagagttgcttgaaagttctgggcgtgcgtctttgcccagattagaccctaagcgtccgccgggaacattctggtaagtataagtgaaagttttggtttaagctatgttattactgcatgacttgtatctgtctgattgaatatatgcttgtaggttcggccatgactattcagttgcagccattgtccggagtcatactttcaaagagatttgaaatctcctcatgctattggttcgcagacaccagtgac

SEQ ID NO: 9930 - DNA, 1642 bp, Arabidopsis thaliana landsberg
  unsure (1)..(1642): unsure at all n locations
gagagatattcatcagattttggatgatcagctgttataactttaaagtggaacgcaaatggagagctcagagcgtgaagcaaaacgattagcttgcacaacacaaaacaaatacagatggtgcataaaaaattaagaagaggttgcagtaccaggccatggtgaggtgtatgtcaagacacgcatgctttcaccccatttgcaaaagtacggactgatccgatactgaagaagccatttaaaatggagatccaatttcttgtaccaatcttcacttccatgttcaacagcaaaacgatcctcaataacagtgtcagagacaccaataacagcagggagtgatggagtcactggaataataaattcccaaactgtcaatcttagcttgatacgcagtgaaaggtttgaaacaacatcttcttccatcatatcagttgatccattcgtagaaatgaactccgaaaatgatggagagaagagaattcttcttaatgacgaacttgcacatttaattctttctacctaaaagataagctgcagatcattgacgcgtaaaatatttatcaaaggtgaggcaataaagtacaaggaaagtaaatattaccacttcatccatgggttttccctctattggttccataatatcaagacaggtattaagttccacacagagctgatccttctcatgctttgccaagtgagaagaaccgctgttaccaaacacataattggttataagtatgtcaaatccatgatgaacaaaataatcagtttcacactggcataagtggacctgtacgaatcctaaagtagatcaaagaaatggtatacagagagagactcaccctccatcagttttcatagcagtaataatgatctctccttcatattgaccaggaggctgcccagtaggaacgtctattgagacccaaatgacacttgtttctctacaacaggaagcattccggctatgtcagtctcaggaaataagacagcaatgtcaccacataccagattaagaaattggactagtgagtggtcgtaccctggaaataagctaagttgagaaacaggcaaatcaaggggcaccaaagcatcaggaacgcctaagacaggcaccactcgccgcaactttagtgactggccaacaaccaatctgccatgatacaggaaccatgtcaaaatatgaaaatattacatttgataccaaagatatcatttacatgttctccaaagaagaggataaacatgatcaaggtttaacagctcacctatctccagcagaagagcataagtcactgcactgaacctgaacaatcccggaagggctggaagcagcccaagaaactttaggacgcatggctatctgaaaactttctctttcatttctagccgccaaaagatttatctgtagaaacacaatatggaagccatatgtaactcatgcatcaactcataagaaacagaacgataaatcagttattgatataactcctctaaaagagatcttctgtatcatccccacggaccccacctttcaaactagttcatagaataggaccaggtaccattccactagaatatttacagctaattcagagttaaagcttttggactccatanacacctaacagaacataag

SEQ ID NO: 9931 - DNA, 1446 bp, Arabidopsis thaliana landsberg
cgatcaccggagtaactgtgacaatatcttgattgctattacttcatcactcagttcgattttcccacttagtccacgagaaacattacgctctccgattggtaaagcagaagtaaatgagcgagatattctaggaatttcttttgcagataaatcaggagatgggccaagatcaatttttgcatctgtaaataagagaacgcctatgaaatgagtgatttcgtcttcttcacggatagggactagacgcagcttgttcatcaagggagatccatctttccgaaagttgagcaactcgccttgaaactcgatgccattttctagacattgtcgcatcttcgctacaattgtagaatctaccattggatgccttcttttagtaaatggccctctacattgcaagaaacggctgccaaataaaaaacaacagcacatatcagatacaagaccctcctattcaattcatcgaatagataactaacaactaaacagatacagtactttggcgaacaattcctcacacacaagtattgaacaaagactaaactatatgcataattaacatggaataccagatcaaaagccgctaaaacccaagagaaacatattcaacagaaacatatatacttagacaaaaacgcattacaattcaatattacaaaaatcaataatcccaaggctttcataaaccaatcaagacatgtgaaaaactatcaaagttcgagttcctaaacactaatccacagacataggaaacattacaaactgaacctcacattatagcttagttcctccacaacaaacttctaattcaataaccaacccatgattccaaaatggttctagctaataatacctaacataatcaacaagaaccataataatgaatcgaaatataaatttctttctgtcaaaacagctttcaacaaagctttctagtaacatcgtaccaataccacaaatgagacaaaattcgctacagtaaaacaaaatcaacaccacaaatttagggtaaaagtcaagaagagcaaactcaccaatttcgaccaataacttcttcagctcgataaccagtaacaatctcaaaaacagtgttaacataaatgatagggttgtcaggttcaagagcatcgctgaccacaaacccacacggcgccgtgccaggaagactacctaccggaaacggaatcgctccgttatctccaccgaaccatccatcctccgccacttcatctccgccgctgagatcggaatcactatcccactccatttgattttgcatacacacccacaaaataaagctttaagcccactaatcttcttcctcagcaacaggagaagagacccagaagaacaaagtttgattttgaatcgaggaatctgatatcctgacgtaatcgaagtctccacaggaaaaaagttccaaactttagacaaacccagaaa

SEQ ID NO: 9932 - DNA, 1384 bp, Arabidopsis thaliana landsberg
tgctgcgactggtcatgagaagatacaccggattcgtaaactgtcgtcccttgtatcacggtggattcctgctggtccggattcaatctggcgccttcggctatctattaaacccaaaaacaaaagttttcttgttattcacgttatcttagttatacaatgaagaaaagagtagatattgagattaagatttggaacagaacgtggctaacctttgctcgcaggtacatgttattgtgttgcaactccatttcctacacatgatttatgggaaaactcaaaccctcacaaagacgaagaaagatctaattacttggaatgggagaaacgttcttaccctcttctgcatatactctatctctgccactaacagctcattctgcaaaattctcacaaaagggtgatgaactatataaactaagggactatatatagagagagagacagagacacagagagagagcaacgtagattttacctttttggagcggacacggctgattcctttttcaagacgtccttctaggtttttgagttccttgaagttcaaggaaccaagtgattccccaacaatatgccttcaatttgtaaacatgaacattaaacaaaacaacttctaaagaaaactacaagcggacttttggaccgacaccaaattaagtgacctaataccaaatcgaagagttcatgaaaagttaatgaattacctatttgaattctgaatatctcgaatctgcctccgaagcttagaggcttcttgctgatagtacttcaaaaatccatgtattcaaacaccataacgaaaccgtttcaatgcatttccaagaactctctctttttgtaggttatattttttgttgatcatatatataatgaaaagaagaagataaaacaaagagaatcaaacaatataaattggtacctgagtattagcttcggtgacggaaggagggttgacggcatcggaacaagctttcttgtacctttcaattgtacccctcacactaataagtaagatcgcggaaaaaacattagatgtatacattgtaggaaattcttgattaattagagttaatttcgaaatgttttttttcctgaaaagggaaggctttggagtttggaccaatatctgaccagtacgaggagaaaatttataaatttattctaacacatggcttgaatagatccacaagtttttttttttttttcttaattcacaaggtattataaacaaacaatgtcttaaagtaaggatatataaacatactagtaaatattatggtttcgaaattggtaattagggtttgaggaggaattagaccatgtatcgtgtatattacatgattcaatgtcatcatgaaggtatctttaaaggatttttttt

SEQ ID NO: 9933 - DNA, 2320 bp, Arabidopsis thaliana landsberg
  unsure (1)..(2320): unsure at all n locations
agcccttccttaacttgattgtctggtgttcatcgaaaccctacaatttattgaagaccagcgattttcattatggtattggcagagtaaggacgacaaggttctgaagattgattaaaaaaaatctgactcgtcctagcatgataaccataagaagtgtttcttaaaaatgtaaggaagacaaggataactgattaaaaatctgaattgctctagctagataaccatattaagtccttattaatttgtcaatgatatatagttttacaatacaagtaagcacttaccatcccaccaagttcatcctcttcatccagtctcgacatctttccattcacattaaactctaaatctacttcatcctgaccctatgattagagaagccaaatacaaataagaacatcatattacggtacatgcatgtctcaagaatcaacacttttttttgtttatttcttgaaaataaaggaaacatacctctttctgctgctgcagacgttttaagtaagtagactgttttctgcggagctccatggaaaggttctgaagatctgttgcaagagaacgctgtcaaaagcagtatgccaaaaagtaggtcaagtccattggagagccccactatacatgtacacagaactttatcctcatgctacaaactcaaaacatagaataacccaaagtacattatatagagggaaaaaaaaacacttcatacattttgctgactgataatgtcaactagataggtagtcaaaacatatgagagtgatttaacccaaaattcctaactttcttctctaaaagcacaaaagaaaaggtaatgaccatgcattctttattgttaacaagctcgattctgaaaaagtgtccaacaacctacctgcacatttttcctgagatttgattcttcagaaggccctctagtagataacatctgcaatctcttttctgacttcctcaacaaatctgtgatctcatgagtgagcatctcgacttcacgatgaatccctttgttatctccaaatgtaggcataagagcctttgaatgtgcctttgctagttcattcattttgtctcgcaccttttgtatattaaaagttatctcctcagaatcatcaacccaagctggtggcataccaattgtgaaggcatcactactgcaaacattcacaacaacacttaaatcatttgctcattctgttacctaattcgtttagggttctaattctgtatctcaaatcaatcccatgattacaattcgtttctatatataagttcatagaatttcccaggttttgcagaatcaaacaacacattatattattaccttgatggaccaggatcataggaattcaaaggagcataagaggagtgattggaccgggaaaatgaaccgctaaccatttcgatcaccggaccaccgaacgaatcagacgccgataaagataatggagcacgcgcgctcttacacgcatccctgtgtttccggtacaccgtcgttcgattcctcgtcgccatcaatgccaaatcaattgattctcaacagaatctcgaaagtaaaatttcccggagaaaataaacaaaatcggagcttttgtcgtcggcaaaagcaaacgaatctgaatcgcaaaatcgtttctcattagcgcgtgttacagacttagcaacgaaggagaagtatttgggcctttttaggcccatttatatattgggcttatagtccacttgcgcgatagggtcaatataagtgtgtggagcacacgttttaagacggtggcgcaaagacgaaaatgcccgtagattcgtggcggctaaaagtcaacagagggacgttggtggttcagggtaaaagaggctatagtgaccggttaggggtagtttggtcattggatttagctcaatagattcgtgtccatggattccctcatgtcgccagagaaaaagaccacatttaaaggtcttgcctttttggtgtgtttcctcgcactttcaggctgaacaaagtactgacagatgctaataaatacacggaggaagaatatgctcctttaattattatctgagatttttcaattcaagttgtgtggattcagaatcaaaatggaagaagatttgttgggcatttgtgggtttgattcgtcgaagaaatatcgattaagaagaacttgccaagtatcagtcgggttagtgtaaagatccattctttttcccaattgcatttagctttngtttagggtttatgctttatatgcaggtggttttaanttccttatcaaaattcatttcttttggcccttaaggtctagtgagtttaaaattt

SEQ ID NO: 9934 - DNA, 1507 bp, Arabidopsis thaliana landsberg
aaagattgttctctcttggaagttgtgttgattattaattcataaacggataaaccgtttgtttactagtataattcatataaaccaaaagtgaaaagaaaaaacccttataaaaagtaaaaattaaaaattatggaaatataaaaatgaagttccaagtaaattattaataatcaatacctgatcccatggccagggccacaagcgacattctcgatccagaggccgttagtgccgggaccgatggagacccaatcatcgccggtggagattttggagttgaggatggagacggtagatgatgactgcacgtggatcccatcagtgtttggactgtttccgtctgcagaaactttgactccgtcgagctttacgttactgcagccgttaatcgcgacgtgaaacatctgactgttaagtgacgtcagcccggagatcaccacgttgcgtgagctctgaaaccctatgctctgtttgcaatttgttgctcacgtgtcaatttcatttatccgaaaacaataggaagtatataataaagattatcactaaatcaatgactctatgattggtacatgtgaatgaggattctacgttaattaacgtgagaagtcaacgacacataatatttatatgaatgtaactctatgttagcagaaaaatggagaaaaaattgcggaatttgcggaagcgcatcgataaaacggcgataattcattttcaaaatatacctactaagaaaatgcttttaaatgatttcaacaatataagtttaacaataagacaaaattgatggacttttatacatgtaacaatttttttaccattttccctacttattgattagaatttctatggcaacaatattttgtaggttggcataatttaaaattataaatgcataattaacaaataacatcaagacgttaaaatggtaagttcttaccgtggcgccactcgggcaattcttgccggactttttgcaagaccatagagaagctccctgggcgtcaagaactccgccgtagacagagaggccgtcgagatgctggaacaaaatccaatagttttctttaccgatgactcgataatccgatggagccacaagtgtaccttggatacggaacgtgacggacttgcgtttacacttggaaccgtcaaaaataatgcttcttaacaaaaaccgtcccttaggtaccaaaatggtgaccggtttgaccgatgcacatgctttggcccacaggacggttaaggccttggtcgagtcggttttgccgtcgggtttggctccgtaagagaggatattgtaggtttgagctgaggaagatgagaccgagaggagaaagaggagaactatgagaagtgaagaatgcattgctttgaaagtgagagatagagggagaagttgaaaagtggtgatgggtgtgtgggatttgaaacggtttagtgtaaggtatatatagtatttgcgtatttgtgaaatggattgttttttgttgattaacatttg

SEQ ID NO: 9935 - DNA, 515 bp, Arabidopsis thaliana landsberg
  unsure (1)..(515): unsure at all n locations
tcaggttgagaaatctgagcaggagctcgcagaaggcaggttgcatccttaatcacattcttttacctaataatatttatgattctattaatcaccatggtatgattaggttaaattgataggacctaataggttacctagttttgtttatcctacaccttgcatacaaataaattattgggtagtcttgctatttctctacttgcttttgggattaatgttatatttgaattatgatcctatcttattactgttatcagctttattactatatatgataagatcattttgttaattgaaacatggagcgaccactagagacaacagtgctaccataagactatatggttatggccttggtcaattaattatgaaagctagtgtgagacaatcctttcccgaaaggggcaagcgaagaataagtcgttgcagagcataatgtcggctgtaattactgcgatggggttatagaccgtggaaaaagcatatgcttncttcttctgaaccatgagttt

SEQ ID NO: 9936 - DNA, 1378 bp, Arabidopsis thaliana landsberg
ataactggtaagtccgaaccgaacaattacaaatttgcaggtaagagaagaataaggaacaagattgggtcgacgaagaagacgacgggttggctatacctgacaaagcatactatctgatgcccacgatactctccctttcttcgttttcttcatcattactatttctcttacaaaaattcaatcgcaaactctttctaaagtctattcactaaccactttctcagattctatacgaaacgagaaatcagatgttagaccaaactcgacaatgagaaagacagatatgaataagaagagaggcgtcggcgatacgttttgtgttctgtgggagagatagaacagagagagagaaaaccctaaccacaatttttatgactttttgactttcccagtggagaaagataaatactatcaaatagagaggcgctgattggctcccattcctaatctttttttttattactctcaccgatttaatttcccccactcatattcttttaatattcacaattactccttttaacgttacgtgttttttatttttacgctttcatttttgaattttgaatctaatagataggacatgcaagttgagatcgtgtgggggaaaaaaaaatcaatggtattataaggccgagtataatataactaaatgggtaacttaaggcaaattactaaagtccacaatgatgtttagtctgaacgcaacccgtagagctatatatatatataagcccaataaaattagcagtaatttaaagcccatcttggcccaatagatagtaaaatattcgtaatcggtcaacgcttgccggcgatttgccatacaagtacaactttacgtagccatacagattcacctttaaagtttacggaagtaaccctctctctctgtcttcttcgtccatgggctttattatatataagtcatcgaatcagttgacgctagaatcaaaaacagaaagcgcgacgtgcccaatcatttcttctgatccgatctgactctcttccacccacccatcaatggcgtccagatctctcaatggcgattccgacattgtgaagccgaggaagattgcactggtcaccggaatcactggccaagatggatcttacctgaccgagttcctgctcgagaaaggctacgaagttcacggcctcatccgacgatcctccacattttaacactcagcgactcaaccatatctacgttgatccccacaacgtcaacaaagctctcatgaagctccactacggtgatctctctgatgcctcctccctccgccgttggctcgacgtcatcaagcctgacgaggtctacaaccttgctgctcagtcccacgttgccgtctccttcgagatccttgattacact

SEQ ID NO: 9937 - DNA, 1791 bp, Arabidopsis thaliana landsberg
  unsure (1)..(1791): unsure at all n locations
aaaaatttggtagtcaaatgaaataataaaagtgttggtgggtttttttagactgaggttcattatcttgggagacttcatcatatgaatcttgtgaagctaattggatattgcttagagggagagaaaagacttttggtttacgagtacatgcctaaaggaagcctggagaaccatctatttcgaagtaagtaaggatcgatttgggctgagctagagttacattcaagttatcctatattgactatcgggagtttttcatttttggtggttttgcttgtgtaggaggcgcagagccaattccgtggaagactaggatgaaagtagcttttagcgcagcgagaggactatctttcctccacgaagctaaagtcatataccgagacttcaaggcctctaatattctacttgatgtggtacgccatctactatcaatgcttgtccatattttatttaggaagttgttaaagcaaaagaaaatagaaagctccactttattaaatctagagtagtatactaatatatgaaagatatgaatcattttcctcattgccagttggttttgagttaaaaattcataaatccgaatatagtattaagttctagtttgaccgaagtagattatttgtcgagtttagagcgtgctttgattcgagattcgtcaaagagccatcatctcattacgactaaaatataaatgaaaaagcactccaatggaaaatagtgaaattagaattctaaacatataatttctaaataaatacgtaagtctatatagaaaaaagtaaaaaccgagttttcttgccacttacggacgtgtacactagaaatatataacattgattcccaaaatcttaaaatcgtcttgtaaatgcaggatttcaatgcaaagctatctgattttgggttggcaaaagctggaccaacaggagatagaacacatgtgacaactcaagtgataggcacacaagggtacgcagctccggaatacatagcaaccggcccgttaacctccaagagtgatgtctatagctttggagtggtgttgctcgaactactctcgggtcgtcccaccctagacaaatcgaaagtaggagtggaacgtaacctggtggattgggcaataccttatttggtggacagaagaaaagtgtttagaataatggacacaaagcttggaggacagtaccctcacaaaggggcttgtgcagctgccaacatcgcattgcggtgtctcaataccgaacctaagctcagaccggatatggctgatgtcttatccactttacaacagcttgagacttcttcaaaaaagatgggttctactcaaaatatagtcatgtctccttcatctcatatgtcgtagtataacaaggttcgagatatttctgcgtttaaggtgggaagtaggagatctaaggacccttttgagtctgattatatacttttgcatagtgtgttaatagtttggtactttctcttaagattatagaatgtctggttgaaatgtagatgtatatattatggaaaagccaatgtcatttaatattttgaattcctattttatataattaacctttagttagtttaatagtataattagtaattaagaaataataattttagtaggaaaatttattggcaattaaatgattgaattgcattggtttaccagcaatttaacaccatttttgttaaagtttataaacgattacgtttaagatcaaatcatcacttagtggtatatcatagtttattctntacgaatacctttgcacaatacacaatctc

SEQ ID NO: 9938 - DNA, 1686 bp, Arabidopsis thaliana landsberg
  unsure (1)..(1686): unsure at all n locations
gacccatatattgcatcaaagacgagagacaattgttgaaccttgcattttgacatcctttacacgctaaatttattttccatctcctgcaacttgcaaagtacagacctcagattagcaaaattcgaaaatacaactatgtaagcaaagaggcaaacttccaaagagctgggatttttgagtgtaccgggtaaatgcaaatataaacctttatgacttgagatgcttcgcttgattccattgctccagtagagaattaacaccttcctcaagngtagccttcctgtcttctctgaagttccatagctctgaggagatgtaccttccactcggattatactcgtttatctccagcaatgcatttgccactgcttggtacgcatcatcccccagttcattcttcagggttcttaacttctcgtcatcctcatcaattacttcctgacatagatatcaacagcttcagggttctacatatcaaacaccataacatgcataaacaaatctgcatatgcagctggtagttgtacgcatgcacttgaatggaggtcttctgctagtaacacttacgaaacatattatttaggatgagaaataaaaaacattgaattagtgatatacaggagaaggaataccactattgtttctgcagtctcaagctttatccgtttaaaaggatgccaatctgggtccttaagatattcctcccaaagctggataacttcaactgcccaatcctctagatcttcttgacagtactttattctcattgctttcataaacggtttggtgtcaagctcccccattctcttaacaccaatatgcaatcccatgtctatcaaattctatacatgcaatcaaagttaagaaaaaaattagaggaaaattcaagtagtgtcttttctgttgttaatgcatccaaccactctagcctaccatgtcagttatattcgagtttatcactcagtacatgcaaagagtcacctagctcctctatgagacgaaagttcaaagaaaattgtttgaatatacgtacgcttatcaatgctctccgagcttcttgaagttcatcattgctcttccgctcttgaacaacaagatcttgattgaattgatttaagtgtgcaagctctccttctgtctcactaaggtctctgaggaaggtctccaccttgttcacaatttcagaaccactgtccaattccacgagtctcatcacgctcagctgacttttcagttgctggacctccagttcaagctcctgcttctgatcaagctgcctttctagtgcagcaattctcttatgaagcttttccttttgcatctaaggttaaaaacacggtaggaccctgtcacataaagttaaagagccaacctttttaaagaaggaagcattcccagaccttgtgatctacagccaatctttgcgctttctctctggtcttttgttgttccaaggcagatagttgaacataactatttatagcagcattctgaaaataatgtcattgaattttagaagacgaaagaggcaatccagaaatcagtttaagaaatgagcttgttagcatatacctgttcaagttcttttgccactattttcctctgcgtttcattctctgcctcacgttttgccaactccaactctctaatttcaagttcctttatctgagactccagctgcac

SEQ ID NO: 9939 - DNA, 582 bp, Arabidopsis thaliana landsberg
cagagttaatacgtttacattaaaataaataaaatttgttgttaatctaataattttgacgttcataaacatacacacacacgtgagaggcaaaaactgtatctcagccgcaagaatctcgtctcctgttttattacaaggtcaacttctggtctctctcttcaacttcttaatcttaacttaatttctaaaaatctaaaaatttattagattctgatttcaaatctaaaaccaataaaataattccacaaacgaaacttcaaaaattcaaaataaataataaaaacaaatatctagaacctcggttttatgatcacacacctcacatagaagcttctttctccttcactataaaatctaactctgatcatcactaaaactcataccatcacgtgttctaagatttgcaacaatggcgtcgatgatcagttcctctgatcaccgtctttcgacaagcaagagacgtttgaagccattgctgttaagagattacttactcgatgatctcagttcttgttcatccaacggtttcaaatcattcccacgtcgtcaaactccttctgcatcttccaccgttcgtcg

SEQ ID NO: 9940 - DNA, 1647 bp, Arabidopsis thaliana landsberg
gatatttctaggatatccacagggaacaaaaggttataaagtttggctgctagaagaattaaaggttgtgatcagcagaaatgttgtgtttcaagaagaggttgtgtacaaggaccttcagaaacaggaaactaaaagtgttgaagagaaacctgcagttgcagacactacagtgttggagttgaataagaagaccgaaaatgtcagagaaaagtcagttgaaggtgaagctattgaagtagtttcaagtgactctgaatcagaaactgaagaaggacctgttgaaacaattgagagcagtcctcagagttatcgattggctcgatatagagtaagaagaatcattaaagctccagtaaaattctctgactactcacagtttgcatttgctcttatgatggctgaagaagtgaatactattgaagaacctagttgttttcatgaagctcttgaaagtaatcagtgggaaagttggaattctggtatgaaagatgaaatggaatccttactgaagaatgagacctgggaaatagttgatcggcctgataaacagaaagtgataagtagtagatggttgtataagaagaaacctgggattccaggtgttgaaccagaaaggtttaaagctcgtctagttgcaagagggttcactcagagaaaaagaatcgactatgatgaggtatttgctcctgtagtaaaacatatttctataaggattctaatgtctgttgttgtcaaagatgacttagaattggagcagatggatgtaaagactgcattcttacatggtgagattgatcaaccattgtatatggagcaactagaggggtatgttcatgatgagaataaagatcaggtatgtttgcttaaaagagcactgtatggactcaaacaagccccaaggcaatggaacagaaaattcaatgcttttatgattgatcatggttttgtgagaagtggacatgactcgtgtgtctacgtgaaagaagtcagctcaggtgagtatgtttacttactcatatacgttcatgatatgctaatagcagcaaagagtgttgcagagataaacaagataaagaaagatctgagtgaaggttttgagatgaaggacatgggagcagcaagtcgaattctgggtattgacatcagcaggaatcgatcagaaggtactctagaactatctcagtcaggatacttaaacagagttcttgacaggtttcacatgagtgaagctaaaggagtaagcacaccaatgggagcacattttaaacttgcatctgttacaagtgaagaagagtgtgttgacacagagaaggtaccatatgcaagtgccattggaagcatcatgtatgcgatggtggggacacgacctgatgtagctcaagctataggtgtgttaagcaggttcatgggaaatcctggaaaagtccactggacagcagtaaaatggctgcttcgttacctgaagaactctagtgatctgaaactgatatacactcaaggaaaagatcttcaagctcagggttatagtgactctgattatgctgcagaccttgatagaagacggcctacaacaggatttgttttcactataggaggaaacacaatgagttggaaatcgaacctgcagagtatagttgctttgtc

SEQ ID NO: 9941 - DNA, 1287 bp, Arabidopsis thaliana landsberg
tgtatgttcctttcaggccagttctttaacacatctagaatctttcccctgttatgaataaaatggttatgacatatgagtaaagctaaaagaggggggggggggggggagggaattgaaaataataagatacagttacaagcaatatatacttgtcttttaaactgatgaataaaccctgaggtcgcctgaaaatacttccaaatttctgacaagcttcaccaacagttggagtataaacaataggaagtagctcctcaacattatctatcaatagcttgtaaaacagtctctcgtttctttcctgtttcaagtccaataacagattcatttttctctgaaatactaaacagaaaatttgtagattacatagacaagattttcacctgaagttctgtcagagccatgtacttttgtaatgggaattgatattgtcggatattgttcaacagcctcttctcctaaatcatttgaaatcccaaaaaaaccattgacacaagttttttatgtatctatatccattagcgcaaccatacagaataaccaaatcaccaagtttttacctgaagcttttgatcaagaacaactggagggagaagaccacgcaagtaatgagtgtctctctctttctcagtgaaagcaagtcctttgttgtagcgaggatctctcagcaatgaatatccactgaaacaagaaacagagttactaacttgagtgttaatttaaacacttagttatattaccacggagaagttatgttgctacctagaaacagagagagaccaaggagttatgttgtgctcaatggtggctgaatcttctccatacacatcaacaacgccaccatcaacagaggatttcaagtctgagttggtcactttctccatcttgaaaggatcaatgaaaacaatcccaaaaacaaaaagcgaaaagaagtagatttttctaggatcacaaaggaagaaacttaatggaaagaagaaaggtctggaaaagacaaatggaagcttgaggatgcagagaggtgtcacactgaagaagacagctttgtacaccaaatggactctgaaagtgccacgtacaattaattgaaattaaatataagcattagttttctttatttattccataagcaaacatacacacggaattacttgtacactagatgacaaatcttaagttataacttaaacaaaggaaggacaccacatagcttctgctataagttcggctacctaagtcagatacttgtctaacgcatcttatgatacatgaagacaacaaaca

SEQ ID NO: 9942 - DNA, 539 bp, Arabidopsis thaliana landsberg
  unsure (1)..(539): unsure at all n locations
cagtcaaagatgtcacaaagattcagaactttgactagtttagaggcaagaacataaggaacaaccataggggggtggtttctttgtgcacgggttcaatcgccctttgggatgtaaagacattcttatttcggaatagactaaagactggctcaggacactgagggaggctatgtgccaaaggtccagaactctagcggtttatcaacaaaaaaaaagaaagaagaagaagatacagtacctcggttaatttgttcaaagttctgtcgatttgcataaagtgtgcctgtaaaacaataacaaaataaatcaaatggttgtcggtaaaaatatatatatatgtgcaacattcatgcaataaacaacctcaagcaacatttcaacttcttcaacatcatttttgtcgtccccacgaaccgtggctgacctcaccaaatggctctttgctctggaaatcttagcacctattgttggngacgtaggnnnnnnnnnnnnnnnnnnnnnnnnnnnnnnnnnnnnnnnnnnnnnnnnnnngagct

SEQ ID NO: 9943 - DNA, 2876 bp, Arabidopsis thaliana landsberg
  unsure (1)..(2876): unsure at all n locations
gttgtcaatgtcggagacatcttagaggtaagttataaggacgagagagcctattcctggtatcatttgtgaatggctctgatgattggtaattaatgtagatcataacgaatagcacataccgaagtatagagcatcgtggagttgtgaactcagagaaagagagactttcggtggcggcattccacaatattggattgggtaaagaaattggtccgatgagaagtctcgtggaaaggcacaaggctgcatttttcaaaagcgtgactactgaagagtatttccatggcttgttttcccgtgagctcgatggaaaagcttaccttgatgttatgagactctaaaggaaacaattcataaaattattggcttgtgccccaagaaaacaatcacattttctgacccttcctattgtagtgtatatactctgtttctcctctgtttcatgcttttgcaaataggcaacatctctctctctctctctttcactttttctcatctgtttttttgaaagatcaagaaacctgactataatatgagtgataacagaaacctgaagaagagtgcccttccatctccaaatccctatagagggccttttattcataagtcctctctctatttagagccacgagagagattaccactgccaaaaaaatcaaacagcttcacatattttgagatatcatgtcaacggattagtagcttccatgaactggaagcagtgagactagagaagactcgttcaagtgttgtggtccgcagagaaacaccaacgacgtcgtacttcacttattgctccagtctttgagcaaaacgctaaaaccttttggttaagggtgtcaaaatgggtcaaaatttatgggtcaactcaactcaactcaaacccatgaatcctaatgagttgaaaattttgactcaaatgagttgatgggtcaaatgagttgattagtcaattggtttgatgagtccattgagctgggttgtaatggttaatggtttcaatggtttacccaattaacccatcaagttttgtaaaattgaattaaaccaactaaaatctctaaaccaatgccaatttaagtttaaccaacacaactaaaccgatttaataaaattaatatttttccaaatttcttaaatatacaagcgatgaaattgagaaaaaagtaaactcgtaattttccaccaaaaaacttaaacccgtaattttcctgccagtaacgtatttccgtaattttcccgccaaaaacgtaaacgcatgattttatcgtcaaaaacgtaaacctgtgattttccaccaaaaacataaacccgtaattttccttccgaaaacgtaaatccgtaaaaagtggaatccgtaaatatttatagtttgatgataatgaattaataattatttattattgttttataataataattaattaaattattacttaaatgggttaacccatttaacatttcaacccgtcaaattaaatgatattggggttggncncnnnccctttctcaccctgagttggattaacccataactcatttaaccctaaactcatttgattatgagttgagttacctattttgacacccctaattatatatagcaactttatctttaaataaccatataattcctagatgatatttttgtgctcaaacgttagtaagttactaacatacatcatctggtaacaacgattgtatatggcaccgacgttggataacatcaagggaaatttgcaagtataacctaaaaaaatttaatagtttggaaacaaacacttcaaaaaccataaggtgatattgtgtatattatatgtaataaatacaattatatcctctcctcttctttcttctgcatgaacatcttctctcttctttcttcttttcttccactaccaccacaaccaccactacctttaaaaccattgtcgctttgtatttcgtatgcggagccacatcgccgaaaaatcgtcaccggagccatcatcaccattgtactattctattttgctgttagatttttgaaaattgaaagttgagatgatttcattttgtttaatgatttttgtttgggttctatgtatagtatcttagggtttagttttcttagatcaatatatatttgtaattatcttttcgtcaccggcaccgccattgtcgtcaccatcgccactaacaccgcgattgttgccgtcaccatcaccaccgacactgccactgtnnnnnnnnnnnnnnnnnnnngcaccaccactgttgtcgtcactatcgccatcggcaccaccactgttatcatcactattaccatcggcaccgctattgttgtcgtcaccatcgccaccggcaccgccactgttgtcttactatcgccatcggcaccgccactgttatcatcactattaccatcggcacggccactgttgtcgtcatcatcaccatcggtactgtcattgttactattaccatcatcgccatcttcgccaccatcacgctagccaacacttttctcttttatgtatgtccataaaccgaaaagagtgtcaaggatcacgtcactcttcttctcttttcacgcgcgtgttctcatgttttaacgaggagttacttgacttttcatccttctctagtgttatttacttagttttacatattaaggtgctatattcttaaatagattatcaaacatggtcatttctgcaaatcaccctaagagtttttagttttttttttttttcttttttttttggtaaaagattttttagttttcgtatcacacagattcttctcaaatttagatttattagaaaatgagttattagagaaaagttgggagcaagtattcctcttgtttgagggaagaatgtacgcatgaa

SEQ ID NO: 9944 - DNA, 1759 bp, Arabidopsis thaliana landsberg
tggcatgctcattgtaacttgtgagatcatatatggttttgaaattggctagtttactaatagtttaacccatctagatgtatagttttggtaggttacaaatagtttacgagttgattagtcgaatattaagtttgtgtggcaaacattgtatggcatagattgtggtgaagtctgagacattagtggtacaaggtgttattgaccacagactgtgtgaagttgaagcctttttctctgtatctcgttttataatatctgaacttacaagttgttgcgctgtccacagacatgattgaagaattaatcagcaggggacaacagcttgatgctgttcattttacttatgaagttgggcttgtggataagttccctcctgttcctttgctcaaagcttatctaagggacgcaaagaagtcagcagcttctatcatggaggactctagcaatactggccgagctacggtatctactcattgcatctactcatttctatcgcagctaaatatttttatctgtgcgtccctgaaagttaatatcttccttgttatgttttctcctaagcatcttgtggcgcgcaaagagcaatcagcacttagagcagtcttaaaatgcatagaagaatacaaactcgaggaagaattcccacccgagaatctcaagaagaggttggatcagctagagaagaccaaaaccgagaagagaaaaccagccgtgattcccgccaacaagagaacccgagcaagctacagcggtccaatgccaccagccaaagcagggcgtatcacaaacgcttacgtctcctctttcccaccgcctccaccaacattcatcagatcccaaagtcactcacctcaatacggtgtaccagcatacaccacatccccacctaccatctacagcaacaggagccctccataccaatactcacccgaggcggttcatggttcttaccaaacctctccggtcagttatccgacagcatatggtacctactgcagtccggtggctgctccaccccctccagtttaccatcctcacccgcaccaccaccaccatattcagcatgcttactactgattagacaatgacaaaggaaaaaagaagatggtaagtaaccaaccactgatctctggtgtctacgttttgtctctacctcgtttttgttgtaatctctctttttttatatcgtatcatttgtagctaacactctcactctttctggttctgaattagtctacccttgtgtgtttattaatctaaattatacatatctattcactttcctaatgtttcaatcaacgaatttagttcagtacttaatagattcatcttaaaccaggaatgtttcactgtgattatgttatgtatcactgtttgtattggctcattgaaatcaagatttcgaagtctcatagcaagattcgttacaaagtgttcgtattacaccaaaaaaagacttctttagtctaaatcaagaagatgattagtcgttggcagtggcgagctggagagacaagagttcttcctcagggatcatcttaatgtgacaatcagaagttggatacgaagcacatagaagcgtgtagccacgttcaaccacatcatcacttagcatcccaccactttgatccaccgttccggtcacgagtttcgctggacaagtcatacaaacaccgagattgcagtcgtagggaacgtcaaggccagagtcaagagccttagatagattcgtttcgtctggttcgacttccaattc

SEQ ID NO: 9945 - DNA, 478 bp, Arabidopsis thaliana landsberg
  unsure (1)..(478): unsure at all n locations
ccgcgtatatcctagggccggggggcctccgtcttcgggacggggcgccccacaattcgcaccgccccatcctccgcttcgcgcacaaccacggcaaggtcctgccctcgcacatccaaagcaaaaggcagacttcgtactttccgccctcctagggagggcatctcacgagggcgtacttcgcccaacgcccatccatgcgccaagggccacaccccatacgctatgaactcctcaactagatcacgcccactactcgtacgggcagcgatccgaagggccctggcattctcatcatcctctgctacttcaaatggcgggtacgccacataataatgagagcacataatggctgcggggagccctgngcggtctttgacttcggcctctcaaacatagaaccagtcattccaccagttgccccacttattttgggcacaggggaccagcttcacgacttacatcgaagtcttcccgg

SEQ ID NO: 9946 - DNA, 2104 bp, Arabidopsis thaliana landsberg
cacagtgaagctcatttgtcctttgtgtgtgtaggttagaaactcgtggtctcccaagagattgggtgtaactaacttctcccatccagacttctccatgaagtagaatctcgggttcttggagatttttactttccaagagtttccccattgcactctgaacttcatgtctccggagagctcattgtcagagaagtttatcacaaagtcgtacggaatcgctcgctgtggttatattaaagaaagatgaaaagatataagtaagatacatgtctgatattaatataaaacagtgaaaaatcagtgagcttttacacatcccatcaagaatctgagtacaaagtttcaaatctaaccatgaaatcagtgagctataacacacaaatgacaaacacaacaagacggtgaaaatgaacagaacagatctcatccacaagaaataaagtacacatcttcacattcagacagagaactgagaactaagagaagcacaggaccatgaaaaaagttcctcagaaaagaaaaacaaaagctttttctagacccataaagacagttaacgacaagattcaaacctttaagaaaccgaaagtttaacctttctagactaagctaattcaacaacataaagagtttagaacatagtttaccgtgtcctctgaagacatgtcggaacgcttaagaactttgaagaagctttctgcttcctctcttctttgcaccaaagaaaatcagggttacttgccatctctctcctttgaaatgttatgattcaagctctcacctacaagttttgctccttcaacttgctcgtctctctcactctctatctcctctcgtaatatttttctctctgtcttgttgagccgttgaatatgtagcaaagcaccacttaaaatttcaaagatatgattcaatcaaagtggtcaaagtgaaaaaagctttcctctcaatactgaaactgtagtacaattgtgacttcatcctttttggatgtgttcatttaattcatagcatgcgattattatgcataacagatgaatctcttttggcgataatacatttcggtgactggaaataagaagtacgacactaggcaagtactgtaattatacttttctgtttaggtaatgactggattggattatttcttttttttgataaatgtatgaagaagagtataaaagaaattataacttatttggcaaccacttaaggtggtgaagttgtctccaagaacatataagaaaaaggttaggatttcatttgatatcaaacaaaagttcagcaattgacatttgccacatcttaatctatgcaatgtcattccaaatccaattattctaccgctaacttcataattaaaggccatatattcagcagccctacatttataattgacctgtaatatggcaacaaaaagaacatctgatctagagactctgtagaactgttagaattgaaagatcagaggaagtgatgagtaggatactcatgttcataaccattgtagtcataatagagcctttcccctttcgatatatcgcgtgtagccactagaagaactcgacattcgccgtttatgctatacctcacgcatttgcagttctgcttcttcttagcaaccctgcaacaatcagtgtgatgtgatgattcaatgttataaaccagtttagtggggggaaaacaattttgaatttgttgcttacggattgtgattgttaatgccattaatgaagcgagatatgtttccaaacttgtctggacagataacaagagtctttgaaggatcttctgataaaaggagagtcatgatgctgtcacaatcgtctttttctcggtttttcaagtaatcaacatcccctgtatattcagctatgaatgttaagtccttaataggaccatttgcttcaactgtgtaactgtacaaacggaataaccaaagaacatgtttacaacttcactttgtcattatgggaaggttgatcgaaggaatagagagagattctcttttaagcggttcaaataccacaacgagaggagggcattttccttgtctatacatagattgacattgttcaatgtctttaattctctttgcata

SEQ ID NO: 9947 - DNA, 588 bp, Arabidopsis thaliana landsberg
tgttgacccttatattcgacagggctatcgataaatctctcggggttgaaatcgttaggtttttcccagcaattaggatcgcgtcctattgaataagtattgatctcgatcatcgtgttcttgggaatattgtagccttgaatctttaagtcagacattgtctctctaggtagccagagaggagctggaggatgtaatctgaatgtttcttcgatcacaagtttcaagtagtgaaccttttcgagatcttgttccgtgattttttctttgttgtctccgagtatttctcgaatctcttgttgaagtttcttcatcactcttggatgtctggctagctctgtcatcgcccatatcattgtgatcgctcctgcgttcactcccgctaaaaactcgtcctatatttttaaaatatatatattagttacatatgtagttgactttctaatagcaaaaaaaagagtttataatacatatttgattgtctacttaatttctatgcatataccccttaaaagattgtaatactccccgacatgactcctttaagaaaaacgtagaaaacttgaaaggaacggtccaggccctgtt

SEQ ID NO: 9948 - DNA, 812 bp, Arabidopsis thaliana landsberg
cgcaagatcacttccgatcatctaaaggagtcatgtcggttagtgtgtatgatttcttaactggtactctggttggatactggaggggatttgaatagcaatctttatagcttgcggagcaactaaaaatttagcttctacatttcatttcaaaccacaatcatgaattcttacgtatgttatttattcaggatgtgtttttagcgggagtgaacgcgggagtgatcacaatgatatggacgatgacagagctaaccagacatccaagagtgatgaagaaacttcaaaaaaaagattcgagcaacactcggttccaacaaagagagaatcacagaagaagatctagagaaagttgagtacctaaagatggtgatcgaggaaacattcagactacacccacctgctccactcttgctcccaagattaacaatgtccgacgtcacaattcaaggctacaacattcccaaaaacaccatgattgagatcaacacttataccataggtcgtgatccaaaatgttggactaaccctgaagcattcattcctgagaggttttccgacacctctataaactacaagggtcagcatttcgagctcttgccctttggagctggtcgtaggagctgtcccggaatgtccttgggaatcaccattcttgaggtaggcctttttaaccttctttatttctttgattggcgtttgcccaatggaatgaccattgctgacattgacatggaagaagttgcagctttaaacatagctaaggagagtacctcttgagctcgtgaccaactcttcatcattcgtgaacg

SEQ ID NO: 9949 - DNA, 716 bp, Arabidopsis thaliana landsberg
cggtgaatttcacggcagatccggctggaaatgtgaatggatcgttgcttggatatatgaggccgtgtgagtatatattccgggaggagtttccactcacatacttttagtttttctctttgattatgaatctttctcttttacgagtacttacctttagggttagtgaatttaattttctccgttttcaaattgttttatatttttttgggttgaatataagatagtattaagagctttgttatattgtaactcttttttagcttaagggtctccgcaatcacattcttagaattttcctgatgggtgcaaaaaaaattcaatcgagtgattttttgagttaatgtagaactaatgatttaaccaaattagtaaccaagacggagaacataccaactgcttgaaaaccttctcttgatatttaccaaacttaacaatattttgtatgcaggagaacagcaaaaatcaccaatatcaatactggaccacttattttcctttaatggttacttaaaaggcatctaatctttttttcttagaaactaaaaataatggtttaaattatatttgaatataatttaatatatatatatatatataattaatactattgactggcatatatttaatctgaatgcaatacacaaatttattcgtttcttaatttctagttttctacttgtaaaaatataaaacgataagcgtagctcagtagc

SEQ ID NO: 9950 - DNA, 1250 bp, Arabidopsis thaliana landsberg
gtttgggagagaaactctttcaattgacctttctgaattaaaggaagatctatgttgttagagtttgtagtattaggtttccttgttgtcatgtaaaacactggcttttggacctgaatttctttctaataaaatcagtgcctctcatttattatcgctcgagttgataacaatgttatgcaaaaataaaaagttgtgaaagagtgaaagaatcactcacaaaacaggcaattgatgggaagaaattgcggaactgcatatttattgtgcggagttatgattacaccaaaaccatatagcatagaagatagccaaataggtttaaaaagaacaccaaattgatgtttgttttcacaaaaaggaaaaatttagacataacataacacattgagaaaagtacacaagttctattgaaaaagaatagacatgaagagctatacaaaccaaaaggcgaagaagaagaatgagaagaaaaaacaattagctcatcttaggaaaatgaaaccacaccctccaagcatcaccatcctaaccgtaataactcggagaacccaaaagaaaaattttaatgagaattaaaaggaaagaaaataacactacaaccaccaccaaacgaacccaccagcaagatcacattttttccagattcatgaaaaatatttaatgaacccaaactaggatgttggtgatgatgatgatgatgactcaaaccggtatggcatcaacattggatgagtcttcacatctcaatactattccttcaagacttgttgggaatgtgcatctcctccattgccaaccagctgctagtggctctgatgatggaactatcatcaacacattatcgtttctctgcaccactccaatcacactcactgtacttccttcttttatatacctgaaattgaaacccagcatcgagtatcaggatcgaagcttctgttaagtttttattactttaggagttgttaatgaagtgcttgttcattacccttctttgagccgcattattcgatcatcgcttgttagattcttcttgcctaaccatcgtacaaaatcgggagacacttgctcgcttccttgcttgaagtcgatgacaacagaatcatctacaagaggtgttacctttgcaccgcttccggttttgactaacgctctgagcccagactggaaatcagagatgtaaaagtccaccacatgtctctgcaacataacattacaccgaagtgttttgatgggttggaggaaga

SEQ ID NO: 9951 - DNA, 1451 bp, Arabidopsis thaliana landsberg
gcctgatttggagagtccccagattggtccgtagagattcttgatcgaaaggttgaggcttttcagaggtctagaagatttgttaatcacagttgttgagtatctgtagtaagtccttccctttgagacccatgaactagttatcttctgaactatagccactggaccagaagctgcacaagtaattaacagtgtcaagtctctgttccatagacactcaaagattcacatgtagtcaaaagaagcatacatacctcggactggagtagtcactttcggtctacgaataggcattggtcttcggacaacaggagcaggaaccactgcagtgaaaccaagaacaagataagtaaactactttgagtttcaaacttctcctcaatgacattggaatggttttgaatatcagacacaaacctggaaggaactggctataaccggaatggccactgctgagacgagcaagtacaccaaggagtggtgcattgttgtaagtagcaggctcagtctgctcatagttatctctcctgtcagcgaaattgtcgtaagcatcagggccaccgacaatagcaccagtgagaaggttcgggtcactgcctttacggatgaaccaagtggcatatccacctctgcatgtgacaaatgtgcggtccaccttgacagagacgatagaagagcctctgtggtgaactctctgagggaaattgttaccataaccaaccatgtagctcgttgctctcgggttatctccaagaatataatccacctgagatttggcaaaggaaagaagctgcgaaggtgcgacatttcccgcggcacatctcaagttgcttcgagaagaagttaggtaatctgagtaaaccgtggtcaagaaggaagcgcttgtgacaaactgcatattgttccaacgttgtctgaaaatcaaaccacctggtgtcttctgaatgttcctcgagcttttacccaacaaggaacacataaaggaatcagctttctcttgatacttcctgaacacaggtgcgtgacgtcctgctttgccttgcatcaaaaactgtcaaagaaagaaacaaaataaccggtttagtatcaaaccaagattgtcaaaaccggttaaccacaaaattcaaaaattgggttacgctactaatactaaccttggcaacgagggtttgaacaccagcgttcttaacgtcccaaccaaactcagtcatggaccaaccggtaccacccatggggtcaccggtgcgacccaagtagtccaagtagaactgattgttcgaagcttggtatagccacgcagcggcccacaataactcgtcctgatcattgaaattaagaacagtttcagacatcggaacaattgataaagcacttaattttaatctcagattacaaaacctgtgggaacttacattgtaaccgctgacggatcggtagtatttttgggcaac

SEQ ID NO: 9952 - DNA, 1291 bp, Arabidopsis thaliana landsberg
accagagcaatgaataatctatccaagagcttgaaaaaatggcaatgaagactgataaatcatacaagtatttaccttaatgaatccgatttccttggcgttgctacggaaacactgtcggcagcagttgagaccatacttcctgattagcccatgggagtttccacacacacggctacaaaacaaatacatgaatgtttaagatgctccaaatcaacacaactattaacagtaatccatatatttattaacaaaacaatgttttaacgtaaactaaagtaaaaaatggaatgaagaaatctaacaagtcaactcaaacagagcggaggaacatatcaattttctatcccatggaaactattaagattaatacaagatcttcatggataaagtgttctgctttacacacctaaaccaccacacttaactatccctaagcaaaatttcacatcaaaagtttcacataatcaataaggatcaggttcagataaaaaatcttcctatgttgaaaatctttcgaatgataaacatgataaaagttcttaggcaatcccaatttctctaaactaaacagaatttttattttaaaagaaaagaaagccgagagatgagaaaaagatagtaccataagcgagaaccaggaccgtatttcttaggatgagaattccagacgttggagtgacccatgattgtcgactgctctctgctaacagctcaaagcgattagatcaagaagacgaaatatgtgcggctcgagagagagagctatataaccaaatttgtaaaccctagttatttgtggtcttcaaatatatatgggccttatatatatgggcctaaacacaagtagactagcccattctcagcactaactctgccacatcttccttatattattgaacgttatataccaagcttgtcatttttctacctaatttaacactaactctgccacatcttccttatattattgaacgttatataccaagcttgtcatttttctacctaatttaacactaactcatacgtttaagcatgcctaccattttctgccgtcaataatataacagagcctgcccttttttggcacaaaccaaagtgacattttcctatcaaaatttgataaatgaggtcagagccaaaaatgtagtagaaaaattggtgatggttatcatacacaatgagggattgaactctcaacttatttaccagccttctgaaatcaaactcaaaatcctcaattcagttactacatatattcgaaaacaaaatcaaatcttatcaacaggag

SEQ ID NO: 9953 - DNA, 903 bp, Arabidopsis thaliana landsberg
tgctcttcatggcttgtaaacacagaaaacttgatggataatctcaattggaggcctcctctttcaaccggagagcctgccatggatacaggtgactggagaacgcaattgccgcctgattctcgtcagaagatcgtcaacaagatgtaagtcactctagcggcgttgttttgtctatgccagtcaaatactacagaaatagaaggttattatgttccttgaccaatagttagtttgtttgttttacttatttgcttgccacttgcgcagaatggaaacactaaagaagcaccttccattttccggaccagagggaattaacgagctcaggagaattgcagctagattcgaggagaaaattttcagcggtgctcttaaccaggttattatgaacatatattcttgtttcgttagtatggtaaatatagagatttgtgaggcaatggactccacaacatggaaaagaactgactttcgttatctgtaaagctaagccacaatatgttgggtatgaaatccatgtataccttcctgatactcttttatatcgcctttcagactgattaccttcggaaaatatcaatgaagatgctgacaatggagactaaatcacaaaatgcagctggttcttccgcagctatccctgccgctaataatggcacatccatagattcgagtaatcacgattctcaagcatgaattgcttaagtctgtttatctggttttatggctaattgttcctgttatttgatgctgtttaacctttccttgaatagtacccaccaatcaaggccaacttcttccaggatcgttatcaaccaatcaatctcaagcacctcagccgttgctgtcccaaaccatgcagaataatacctcctctggaatgacgggttctactgcttt

SEQ ID NO: 9954 - DNA, 760 bp, Arabidopsis thaliana landsberg
gcacaccaaaacaagcttctgctatacgttacatgaaggacttataaatgtgggagaaagaaaatgcctttactaacctgtaaccaacggtggggtgttatcatcagcggaggaagaaccagctgcattttgtgatttagtctccatattcagcatcttcatacatatttgacgaaggtactcagtctaaagatcgaaacaaaagtaattaatctcaagccaaagaatgatcaatgatgtaaaacaaataatgagctttatgagtagcaaaaaaaactcagttcattgccaaattgtggagtcactgcctcagaagaaaaacagagaatcacctgattagaggcattgttgaatagtttctcctcaaatctgactgcaattttcctaagctcgttagttccctctggtctaataaatggaagttgcttcaactgtgtttccattctacacgagcgatcagtcaaatcaacaaagtaaagtaaaaaaccttatttgcaaatttgatgtaacaaaaacacgaggtttaataatcataataaactcacatcttattgacgattctcgagcgtgaagcatatggaaattgagatctccagtctcctgttgtgtccatggtgatggatctcttctctgtatgtaactcaacttaaaacagatcagatatgtgaaaatcagaccaaattgtcttataacacaacgattattgaaagcatagatttgatcctagacaaaacttgatgacactagatcacacaaaaaa

SEQ ID NO: 9955 - DNA, 1453 bp, Arabidopsis thaliana landsberg
  unsure (1)..(1453): unsure at all n locations
atttatttatataaaaaaaaaataaaaaaaattacattcttagagagaaaattattcagaaaatttttataaacaaataaaaattagtttaaagatttactcccataaacttgttgtacaagcaagagattgtgtattaatttgaaaacaaagtaaagagaaaccaacaaaaaaaaaaaaaaaccaatcaatgtgattaaacgaagaacgtgattttagtttactcgcagcaacaggtcccaagtgctcaagggaaagtgatctatgtccgtagatcagcttaaaaaggaaaatgcaggagcggccaaagcaatagacgcaagtggtccattaagcaagctcttagcaatccatcggtaggcggcttcggtcaaatgaaaaccgtcccacgtcacatactcagaaggaactcgacaatgtttcactcctctagacccacatggcttatcaacagtgaaggtctctccataaatccttcaaaagagtaaatttggtaatataaataattgtgacaatactgtatatatgttagttaaggggacggaataagaaagggcaacatatttcgtcggttcaaggtaaaaatgtaacacaatgtcgtagtagtcagtgtatctgatagtagcaataggatagagtttttggagtctattgagttctgtctgaagctgctcattgtggtactgagaaaactcattaggccacttcaaacatccggttaaagcatcgtagtccttcatatctgttgtcctaaatctcgttaaatatgcagcagaacatccagttggaaactttcctggcactagaaacgttctggctcccaaattgaacaattcctgtaccatgttgttcatgcttgcaaggttcaattcttagtctcccaaacaaaacaagaaaaagggaaggatcattgaacaggatttaagaaagatttttattaccacaattgttgagcaaatagcattgataacaagggggactattttttttaatctccgggatgctttttccaatcaagaatccgtagttatagtcattacctccaatctcaccaacaataaacagcgagttttcgagaatctctctgcaatcttgaaaacaagtaaagattggcttatgcttgtcccttgtgttccaagatgagttgagatttgtgaggaatcacctgaaggaaagccacagaggtttggtaaaattttcttgaagatgcttagctgaacaatcaagcttacattagtcatgtaattagcagtaattcctttctcttgaagcaattcaggctccaccgcggttgctccagccaccgcgaagttgattccattctcaaagctttgattattatgtccaaagtaaggggaaatatatggtaccccaagaattcagctgtcaaattaagttgactaattggatcttgattttttttntttttctttttttttttgaacacttgttg

SEQ ID NO: 9956 - DNA, 522 bp, Arabidopsis thaliana landsberg
atcaaggatctggagatgcccttcttacaacttcacactctctgtcatttggtctcctttccttgtaaaagctgaaacctttgagaacggagttcctttctcagacattcgagtacacctcgacaagctagaccagaaatggactgatcagtacatcaatttcgactacgttgtcatctccggtggaaaatggttcctcaaaacaacaatcttccatgaaaacagcaccgtaaccggatgccattactgccaagggaagaacaatatgaccgaactcggttatctatactcgtaccgaaaggttcttcgtttggttttagactttgtcgctgaaccgaaccataaagctcaggttctcttcagaacaacaacacctgatcatttcgagaatggagagtgggactctggtggtttctgtaaccgaacaatgccgtttacggaaggcagcgaaggagagatgaagagcgaggatgtatcgatgcgtgatatcgagccttgagagttctataagactactactac

SEQ ID NO: 9957 - DNA, 2076 bp, Arabidopsis thaliana landsberg
cctaagtttcaatacacaatgatcataacagtattgcaaatcatttatatatcagccaaaccaaaggatactctggagatatataagatgtctgaattgtacattttataccaaccttcaatttccaatcacaagccaaaagaaaaaaggaaagcaaaacaaagttgtatagaatggggactataagagctcgtaaaaacataaaaggaaactatattgataccattaacaatgttcttttaatctatctttttaactttttagtggtcgcatgttcttgtttttgttttcgttttttggttttaaagtgttcgcatgttcatgcgtgtcctcatcaacaagctctttgacctaattcgttactttaatcttttctactttatattattcctcggagttttctatataatatcttttttatttgattcctcctcaccctcatatctttatgtgttttcagttccttttgattttgtggtacgtaattaaaccgtctattaaaaaaaaccataagattgtaatgatttgtcactaaattaattgtgattggtatagcgactattcatcacagtatgaaaatgatacatacatgttagtgttcgttactaatgccatagtggcaacataaatgaccatcaatagtataagctccttgtcactgattagtgattacgatagaaacttgtttacaacaatcagaacaacaataaatatgtttgtcgacacctattgccaaattggagttactatgaatatgtatttctcaatgtgtataagattggcaatatatatattcagaagacaaaagtgcatattacatgatgtatacatgtaacgtggatatgatgaaagaagattatatacttgtatagtatctatcacaatcaaataagctggctttgagcggacacattcgtcaatccctagagaggttgcagttttgtgggacttttacctattcatttttcaagaaaaaatagaaataatattatttttgatttttcatgtaatttccaagtaaaaacttttgtaggttttttttttccacaactttttaaggttttttaacggacataatattgactaaggaaattctaaatgttccttacttccttgtacgaatatatttttacaagaaaatccaacgtaaacgagacaaaaattcaaagctagcaacaattttagaaaattaataatccccagaaagaaatgctctgtgtctttttttttgtccacgagggtatttaagtaatttgagagaaacaaaataaagaaagttacaagattccagttttgcccttttacatacgatgggcccctgagaatcccagatgatcgtaagccttctgaaacgagtgatcatgagattcggtatcgtacgccgacataggaaacgccactccacccgcgtactctagcatatccccaggtctgacgctaacgtgtcccccatgacccgtgagtccaagaaagtctctggtcaaacggtcagctttctgccacgtggacgtaaacccatcaacaactagctggtcgtactcagacgaagaagctgacgtcatcatgactcggtcaacaccaagaaactcgttgacgttcgtcaaatgtcggtgatgaccaatggatcgagtctgtcctccgccgccgaaagtagtggagctgagagaggtggccttttggagaagagccgtcgcggaaagagctgccgttggaggcgttgaaagagcggcggtggaaagtgatggttcgatgaaaagaggtgatgacgtgaagagcaaggaggaagatttattgaacataaaatgatggccttggaaattagggttagggtttgtgagattggaggaagaagttgagtggagtcttgcactttcttctgctaatgcatcacaaaacgctctatgcgttatgaaagtgtctttcctgtttataaaatatatatatcacaaacaaacaaaaacaaatattagatagaaacataaacaatatatgtatgtatgatcaataatgatgcaattgtaacattaaaccaaaaataaaatgatgcaattgcaagtagtgaaatagtttggagtg

SEQ ID NO: 9958 - DNA, 1429 bp, Arabidopsis thaliana landsberg
  unsure (1)..(1429): unsure at all n locations
cttcataaactcagataattgtcgaatagcatatatatgtatcctatcctttttattgtagtaattttggattaatcttgtcacatagacggtataaaaccactttcttatttatttactttgtcaacaaaaaaagaaccatttattgttattgtgtaacggtattgaagttaagaacacacaaaaagggatacgtatgtctaagtccaaccgtaaacgcattctgaccgaatatttgtatgaacgcattccgaccgaataaattactactacaagcattttgtagatatgaacgaatttatttgtaaagtataattgttgaggtatcaatatagccaaatgttacgcagaattgacaaactgtcaccttgatttaagccttcatgccaccgtcaccaatgtaattaagttgacaaacaaacaaaacttattataagttataaaccaaaattgaatagtttcttatgtcgtgtgtacgtaccttttaacggtgaattgagctttttagggaaacctcctaaattcttccaaatagtacacatttaactaatcaatcagtcaaaaacaaataagatatacatagagagagagaaagaaaaggacagtttttgtgatacatgttcttcttcttcatcctctcaaaatttcaacttcatcttctccctcatcacatttttccctgtccctttgtaatcatgattcttcttttgccatcattaccttctaaaggagccttctctctcctctctttaaacgaataatgcaaagggaacacaaaactcacaacaaactttctttcatctatataacgcctctctatatctcacccattaatcaaacacgtctcacttatctctcttcttcatttcttctctcttcaagctccaagatgtgtttaagttcttcagaaacattttcagacacacccacgagattagttttatacctcaaaacacaaagtcacgttcgtatccctcgtctctccaggttagttcaatctccatcatcatatatacaccccctctaggagattctcatcgactatgtaattacgttctgaatcactattatttttcctttttttcaggaggagacggatgtggcgggaagagaaaaagatggagatgatcaatctaaagctttacgtggagaatcaaaacatcataagagagaacgagaaacttaagaagaaagctcttcttcttcaccaagaaaacaaaactctcttctctctgcttcagaccaaaaaactctcctctgtccataaataaaatcttaccatcatcaccaatcactaagatcatcatattcttctttctttactgaaataataataagatctcaaggctccaagaaaaaaaaaacaganacattgtggttttacaagcaagggtttagttattattagtgggtatacatctaattttta

SEQ ID NO: 9959 - DNA, 1538 bp, Arabidopsis thaliana landsberg
tgtaaagaataaattatgcacattgacattttcttattttctcagttgggtacaaaaattgacccaaagagttttctaagtaattacctggataatagtagcagccttcatttgctttctaaacctgaactcattgcgagcaaccattccccttagcgctgtttgaactgttattgttgaatgtctaattcttaaataagattctctggcaatatgtcttctgaaaatcttctgaatcttcaccgctgctgcctggcgtcgcatttcctcataaaggttgcatgccaatttgccttgcatgcaacaaaaacgtttgagaagctcaactccaaaaataatacaatccactaatatatttcacatctgcatggaaaaatgaaacaacggaccataacaagccactaatttcatgtttacacacagaagcaagaaaattctgaatccaatatgctggacaactacaacaatagcaacataagagaagatcaaaattttgcaataaattacggaacaagatacctcggcagttagactgtaacacgatagcagctcctcgtagagcacggaattctttgcacgcaataaaagtacggctttgcctttgaattctcctagctgcatttccaagaacctcagctcttcttgcatccaactcagccatctgcccagccctaaggaatacttttgttttccctaactggaaatggcagcatgttggataaattagaaatagttcctaaaacatcaaaggaaccattacataatgcaattacaaatggcttacttcataaccctgtaagcctatcttatccagaagcattttgcatgcaactttgtcatcataactgcaaagaaaatagaaaccattagcttgtttcaaagaaagaaaaaactgcaagaaacaaaatagatcagttgtcttttcaaaaccaaggccatttttggattatacataactacgagcgaaaaaacagttgatatcaattgggacttactttccttccagaacttctggagcaagtacaccaaaacgattgagaaactcataaaacgtccgctttgtaggataacctgcacagctgattctaatagcttccagaacacccttaacaaaagaaagacaaatagtaagcttgtaagtttcataaccaaacatttaggttgaagagcctcaattataataccactgaacagacaaaaattatacggaaggttccaattgtacttacaccacaccgtaattgttgaattacgttcacattctcgaagatagcaggcttaagtacattatttggcttcacacatctgatatagtgaggttctgttgaactcagtgtctccatcaaagattgaagttgaagctgaaatttgacattgagaatttcttgttagatacagataaactcgctaacataaagggtgaaaacttgaaagccatagaataaaaataataattacaaagtcaatgtgaattaaagaaacaagttaatgatgtctgaaattctgaatcagtgatatggctgcttatcatgcacact

SEQ ID NO: 9960 - DNA, 1281 bp, Arabidopsis thaliana landsberg
cattataacattttgttcaattctccttctattattttttcctctccgtattgtcagtcatatttatttcctatttaagtatataagcgcgtataaataatacaataaaaatctatatacttagatttattgctttatttttgcattactaaatattttctcctcttatacaaaataaaaaagcacaaaattaaacttccaagaaaacgaaattttcttgttcgtcgagtttagtaagaacaagaagacatatatagtaagaccaccaaagagagcccttacataaaaatcattcctttttttttatatctgcaaattgcaatttctaatgcataaaaatctcatttggccacattttctcagaaaagcctaaagagcaaaagagttttctcttcaacagagatatatatatatataaccttaaaaagtctgtctttgttctgagaaacacaatgagtttaaccaatgagtttgagaaactttatcttctttcatatcatgtttagaagctctgcttgagggaatgagccgttcgacggcacatcaagaagaagatcctgatcagaaatatcattatcttcatagctaaacaccagaggtccaccacagctcacaggtttaaaggaagatacactattctctaaattctcttcggtgtgctttgatctaatcttcatcacttctttcgggcttctcatcacacctcttgtctctggagaatgcaaaactcaatataatcagaaacagatagatattatagcagaaagttatgaattgacatgattcaagaatcttaagtgacctgagaagttttggtttaagctttcacaaggtctttcaatggttacaagactattattattcgatggactcaagcttgagacccttgatgttgtagtaacacagtcttcaatctctcttctctgctcatgaagcaaagagttaagtgaacaaaagcaaaaggtatagaaaccattttttcaagaagagtatatgatgaaaaccttgagcatgtaatagctttccaacaaatgggatttgttaggatctgataaagcaagctttgcaagtgtcttaatgtcttcaagttttgcataagacgaatttgtctcaaaaacaccatctgccacaagttgctgaaacaaggataagttctctttgaattgagaactctcaaacatgcttctgaggctggcaaaagagaaaacatcaagtataagaactcgaagaagccgctgaaatcagtaaaacatagtaaagtttcattaagttaagatacct

SEQ ID NO: 9961 - DNA, 1388 bp, Arabidopsis thaliana landsberg
tggccatacgcacgatgatatacgttatcactttcgttttcacccgccaagaacttgtgtggatgcaagagcaagaggaatgagcttctccatttgcattgtcatctctatgagagtcttcgaagccacatctgtgtttttcccgaccaaattcttcactttggttgtatggtcggtacaagtcataacatcataggttgcgatatgtggatcgcgctcgagttcttcaaaagcgctcatgagagaatctccaatacttacaaaggcctcttggcacgtatggaactgtgtcttcaagctcggctccttattcgctgctccatttgcaaaactcgcagacttcttggcttggggtaggacaatgccgcggatcacggctgacgcaagtgggagctatatttgtcatattatttataaaaaaaaattgttttaagaatgagtcataaataaaaactatgatttttttatgttttgaaaaatggttctaatttctttcaaaccataacattcaataaattttatttttttcaaattttattagactgataatccatgattaaacaaaaaaataaaataggaaaacgtagatgataatgaaacatagtttcgaaaattcaattgacatgtaaaagttggataaaagtataaaattaaaatatatgcaatatctaaaactaatttgattggagatatgggttcagatattaccaagccagtggcagaagccgcaggaggataggcactcaatgtttgcaaacagaagggtttatcgacgacaaatgacatctggcataatttattaatgtattttgtggaggttaaggttaaggccgaaacaggggataagagaacttgcaatagaagtgccactgaaaggatcaagaaacaatgagaagaagaaatcatttcttcgtgggagaacgttttgtttctctcaacctataagttaaattaggattcaacttttggatttgctttttgatgtttgtggttattgtttataccagtcatatttatgtgcaaaggaacttttcttggaagtcatgaaatttattaccatctttagtaaaaaaacaaaatttgactggtattaattatattctttcatttttcattatgtgctgaaatctaggaaatctgactggtttgttgagattattctttccttatttttcatcttagtacagtctatacaatttgttgactagttttttattttattttggtcaagtttttttttactttttggtaactctttagatttttattaacgaaaagtttataagactactgtgatatatgctcaagggcgttagctccaagaagcaaaatgctcaattaccggcggcaccacggaaaaggattataccaaagggaggagaacaagt

SEQ ID NO: 9962 - DNA, 1007 bp, Arabidopsis thaliana landsberg
caaaaacattattgtaaatctatttattacacacacaaaattacttttaagttttacttggtaataatatttagatttatccaaatttcaatagccaaataagaaaaaaaaaagagaaaaagcatataagaaagaaagcatctttggacttgtctgattttctctatagacgcaatcaccgccgattctctctctctctctctcgagtctctcgacggtcgcatatcaaaagtccatttctttcttctctttggaggatcagcaactatggatgaagagtacgaagtcatagttctgggtactggtctcaaggagtgcatccttagtggtcttctctccgtcgatggtcttaaggtctctctctctctttttgaatccatgcttgatctggagattttcaatactcttaattcgttacttacatgatgaacaacggatctagctgagattattatctccgattgtgtgatttaaagctggttgctttgtgagcttcaacatgagaatcaattggcttcgcgattttgacaatgatctgaatttaatgcatttagttagttattgagattgcgtaaaaagactaaattttcatcatctccactcctatatcttctatgtgattgattagctgactttgtcgccaagtttacttctttttataagtaatctaatggtctactaatttcatctatattccaattaggtacttcacatggacaggaatgactactacggtggagagtcaacttctcttaatctcaatcaggtcaatatttttgttaaatatatatgaagactttttgtggtaagttataatcagcgagagttattgaatgttgctttgttttaaacagctgtggaagaagttcaggggagaagagaaggctcctgctcatttaggttctagcagagactacaatgttgacatgatgccaaaggttatcaatattagctactttccagcttatctagcttccttgtaccatatgaatactaactgtctctgc

SEQ ID NO: 9963 - DNA, 794 bp, Arabidopsis thaliana landsberg
tgttccgtccatataaacggcgtttcttggacaatcattaagcggctccagcggcatggcttgtaacccgaacccgtactctcctgcgtccatgtaagtcttaaagtaccaagcttccgatggatccatgtacggaacaaaaagctccgacacgaaacctttgtacatcacttcacgtgtttcttgtgtatccgggtcgtgtattttgacctgggatataatcagaccggctctcgggtctggttttaaatgaaattcccaatttgcccattttactaaatggttatcttcgataacgaagcttggtccacgtggctgctcgagtgatattgtattgaggggtctggttttgtcatggtttggaagagtagaatatcgataatcggtattagttgaaccgggtatgggtattgattgaccggtatctgttatctcaagtattcgcttcgtgtctaaatcaaaaagcagagtcaaaccttcgataggtcgcatgtagaaattaggggtatcttgagttgagaaacactgaattttagtaacccttttggtgttgtcgtctttattaccaaaccagccactagagattgggatacaaatcacgtccgttagattaactccacgagagttgatcgtacggttgaaatctgcgtttgagaacggtgcagacgcggcactgtccatctcctccgacgtcacaatcgggtaaccggattcaggaaccggactatccgcttgatcaacacgacttgttaataagtcaactatgagcaagtgcgagttgccttcaacacgtg

SEQ ID NO: 9964 - DNA, 659 bp, Arabidopsis thaliana landsberg
cgcgctccacaccgtcgttcttgaagagcctgagaagaatcttgtccgtcactgggaaaaagggaacccacttcctccgaggaaagcttccgtcatcgcacgtgttggcgccgacacgcacgtgctcaccgttgatatctctacgggtcgagtagattcagagaatagcccggttcgtgtttcgggttacccgatgatgactatagaagagatgaacgatatcactgttgtaccattttcaaacgcagatttcaaccgtacgatcatctctcgtggagttaatctaacggacgtgatttgtttcccaatctcttgtggttggtttggtaataaagaagaaaacgcgagggtaattaaaagtcagtgtttcttgacacaaggaacacctaacttctacatgcgtcctatcgaaggtttaaccattcttatcgatttagatacaaagcaagtgatcgagataaccgatacaggtcgggctatacctatacccggttcaaccaataccgattaccgcttccaaaagctcgcaaccaccgtgaaaactcgacctctaaacccgatatccattgagcagccacgtgggccaagcttcgtaatagaggacaaccatctagtgaaatgggcaaattgggaatttcatctaaaacctgacccgagag

SEQ ID NO: 9965 - DNA, 675 bp, Arabidopsis thaliana landsberg
  unsure (1)..(675): unsure at all n locations
gttccgtacatggatccatcggacgcgtggtactttaagacttacatggacgcaggggaatacgggttcgggttacaagccatgccactcgtaccgcttaatgattgtccacgaaacgcagcctatatggacggagttttcgccgcagccgatggaacaccgttcgtgagagaaaacatggtttgtatctttgagagttacgccggagatattgggtggcgtcactccgaaagccccatcaccggtataccggtcagtctttttttcttatgggtattatttacatagaaaaaagtttagggtttgaaaagtaaatcttaaaatttttgagttttaatgtaaattataatttggatttagtagataagggaagtgagaccaaaagtgacgctagtggtacgaatggcagcttcggtaggtaactatgattacatcattgattacgagttccaaactgatgggcttataaaagctaaggtatttttctactttatatgagtttccaaattataaaagattccatatatatacgattccgtggaataataaatatttcactttttttgtcactaactaatgtacgtaataatgacaggtcgggctaagtggaatctaatggtgaagggacacatatcagacaaaactangtggagaaagataagccggtatgaagag

SEQ ID NO: 9966 - DNA, 1425 bp, Arabidopsis thaliana landsberg
actgccaacaatttcaacaacaacaacatgttacttgcggatgaagaaaaggttatcgctatggaattcgctgtctcttgtgttcaagaacttactaaaatgtgtgacacagaagagcctttgtggattaagaagaaatcagacaagattggcggcgaaattttgtgtcttaacgaggaagagtacatgaggttgttcccatggccgatggagaatcaaaacaacaaaggagattttcttagagaagcttcaaaggcgaatgcagtcgttatcatgaacagcataacactagttgacgcctttctaaacgctgtaagtagtaaacgttcaacagatgcctctgattggattgctttgattatcgattaatttcgcgcttttgatttgaaggataaatggtcagagatgttctgttcaatcgtggctagggcgaaaactgttcagataatttcatcaggagtttctggagctagtggttctctccttctggtaatttagtaattgatttgatttaagaaggaacaaatgcaatagcttcttgctaatggtatctatgtttgttatgttttacaagatgtttgcagagttacaggtactatctcctctggttccaactagagaagcttattttcttcggtatgtggaacaaaacgcagaaaccggaaattgggcaatcgtggatttcccgatcgatagcttccatgaccaaatgcagcgaatgaatactattactcatgagtataagagaaaaccttcaggctgcatcattcaggacatgcctaatggatactcacaagtcaagtgggtagagcatgttgaagtagacgagaaacatgtgcacgagactttcgctgagtatgtgaaaagcggaatggcttttggagctaaccgttggctcgacgtgttgcagagacaatgcgagaggatcgctagtctaatggctagaaacataactgatcttggaggttagtagtctaaatcatccctaaattcttattaaaaccctaaactctctaaatctctgtttctctttgcagtaatttcatctgcagaagcaaggaggaacataatgaggttatcaaagagacttgtgaaaacattctgtgtgaatataagcactgcatatggacagtcttggaccgctttgtctgagacaactaaggacaccgtgaggatcacgacaaggaaaatgtgtgaacctggtcagccaacaggagttgttctttgtgctgtctcaaccacttggcttccattttctcaccatcaagtctttgatcttatccgtgatcaacatcaccaatctctggtaaacaaaaactagactcttctctctgttcttgatgcaaaacctaagatttttcgatttttccctgcagctagaggttttgttcatggtaatcactcatgaagttgccatacgcaaat

SEQ ID NO: 9967 - DNA, 1271 bp, Arabidopsis thaliana landsberg
aatcgtctgctatactattaaaacgctcacacgtgttccaggagtttggacatggtcacgtgatgaatagatttttcttgtagttttgatgattcagttaaccttgtagtatattcagtctatattcgttgtttatgttttaattaaaaaatttaaaagcgttcagtcaaggtttaggtttggtttgggcctagtcttaagattttcgtttcgtgaatatataagaaagaagaaaccaaaagttaaacctacgtttcaaaaaaaaaaaaaaagcttattaacctgttacaaaaaaaaaaacgatgaaaaagtccatacttgtcgtgtacgattaaaccccatgacgtgttcgtattaaaagtttaaactgatccatcaaattttaaaccttacatcaatatttcttaacattgtgcaattaacttattaaacagaaattattttctatataattcatgtatgactaatcccaagaagctcactctttggtctttagtcttttacattctttaatctttccatctttgtctctatctcgtggatatggcagaagacaaaattctaacggagacccttctatctgcggcggaagaaccacctgctcttcctttctcatccgtgggagatattcctccgatcaccaccgttggtggcttcgtcaaggagtttaacgtagaggtcaaaaagctatggtacttggcagggccagccattttcatgtcgataacccaatattctctcggcgctgctactcaggtcttcgctggacacatcagcaccatcgctctcgcagcggtctccgttgaaaactcggtcatcgcaggattctcatttggcgtcatggtaaattattatctccttgttgacctttttggtttacgtttatcattcaaatgtactgaatttaatattagtttaaaacacagaagatccaaaaaattatcactccaagtcattcataatgttttggtgtataaaagtgtttttcaaaaatattaaagcaaatacaaaatttacaaaaaaaagatatttctataataaatattatagtataagtataacaaacatatatagtaaatgtaaacagaaacgccaaaacaaaaaatttgtaatttttcagtttgtagtaaaagtataatattttcttatcatataatgttttttcccggcaaaataatgattataaacaatatttataagttagaaaatataaaaatttcttatttttaagaattttaattttgagttgtaacaataatagtatgaataaa

SEQ ID NO: 9968 - DNA, 486 bp, Arabidopsis thaliana landsberg
ctgcaataactcgcagtggctgtgactcaaatcccagacctcttgatttagaatcattaataaacctttggccaaccagtggggcaaaggggcttccattcacatgtagctttaatacgggttaaatccttattttaatattttttaatatcatcaagattagatatatctaattggcctaatttatttaaggttttataacacaaaatttgtcccgctgtaaattgttacttacaccgtctccaatggttatctctatttttccctctaaaatagaagaattttataatagaggtgagattcactccaatggttgtttctattttcttctctataaaataatatttcaaaatagattctttttattttagtattaatacatttaatttacaaaagttgcaaattaacccatttattttaactcttacaaaactttcataaaaagattatgattgtttaaacattacatctacttcatttgggtca

SEQ ID NO: 9969 - DNA, 1087 bp, Arabidopsis thaliana landsberg
tgcttcacacattacaagtcattgactttttccttaatacttaaatacttcctttctgatctctacaaaacccccacactctcctcaaaagtcaactccttgtataaaaaacatctgtttttttaatagaccaaaaacattttatatcttataattttatttttatttcttcgatatcgcacgttggtttagtcaaaccaaatcggatagcgcattcccgaatcagaatgttaacaggatttgaattatcttgggttagaaattaaaaaattgtgccaacttcagcccacaaaaaaaaaacaataagatcaattatagctaaaatctcttaatttggacaattttttttaagaaaaagacgtatatcaataaatatataaataatctgaacttaaatcaaactaatctttaggttcgtaataattaatagaaaagcttttggccaaaagtattttgtagtataattttactaattccactaacaattagaataaaccaatccctaaagaataaaaacttctcaaagtcaactcttcactttctctctcccacctatgtgactctgtctcttcttcttcatttggttccaacttccaacatatattcaaccaaactcaattctcaagcatctccttttcatgaacaacgccgattcaagtggctagagaaaaacgacatcgttttaaagattctaatctctcacttctcttaaactaatgggtaatggagtcaccactttgaccggttgctgtacaggaactctcgccggagaaatttcccggcgttacgacgcatctctcgttcacgatggacttggccactctttctgctatattcgaccagatctccccggagtagtattaccttcgccggagtctcctctccgatcagatcatatccaagaaaccactttccgttcaatctccggcgcatcggtcagcgcaaatccttcaacggcgctctccggagctctgtcatcggattctgattgtccgtacagctccgcagtctccgcctccgcattcgagagctccggtaattttgcctctttaccactccagcctgtgccgcgtggctccacgtggca

SEQ ID NO: 9970 - DNA, 703 bp, Arabidopsis thaliana landsberg
agatcggatgcgttattgtagatgggggttttttggatcgactgagtcaaaaatgattgactcattttactaaattgttcagttacttagctggggaaactgtgattcgtgaattgggtacctagattatgaatgtgattgcatgcgtttggatttattgagcttacttggaagtgatttgtgatttattattacagaagcagataaagttgatcggatactagaatgggaggaggatttagagttttgcatttggtgaggccattcttggcttttctgcctgaggttcagagtgctgataggaaggttccattcagagagaaggttatctacactgtcatctctctcttcatctttcttgtctgcagtcagcttcctctttatggaatccattccaccaccggtgcggatccattctattggatgcgtgtcattcttgcgtccaaccgaggaactgtcatggagctcggtattactcctattgttacatctggacttgtgatgcaactcttggttggttccaagattattgaggttgacaacaatgttcgtgaggatcgtgccctcttgtaagtgttttcgtttcccattatgaagtattggcattacaatacgtgtttggttgaactgtttcaatgtctggtttgaattgattgagctgtttttggaaaccctagggtgtggtcgggtgagttcttattct

SEQ ID NO: 9971 - DNA, 954 bp, Arabidopsis thaliana landsberg
aggatgatcacaatagcatttccaacaccaagttgaccaataggaccatacattttcgaaagaacatatgcaagagcctcaccaatagcaatcagaatcccaagaagcttctgagcaccattcctacaacacaaacaacacatgagacaacgattctcgacttgatcaagaaaattaccaaaagggaaacacttacaagagagcacgatcctcacgaacattgttgtcaacctcaataatctttgaccctgctaagagttgcatcactaatccagatgtgacaataggagtaataccaagctccatcaccgttccacgattcgatgcgagaatgacacgcatccaatagaacggatcagcaccggtggtagaatggatcccatagagaggaagctgactacaaacaaggaaaatgaagagggagatgacagtgtagatcactttctctctaaatggaatcttcctgtcagcactttgcacttctggaagaaaagccaagaatggcctcaccaaatgcaaaactctaaatcctcctcccattatcgaatctgttactgcaaaatttagagcctattgagaaattcttgaaacaaaatgcgaatctatacatactagctacatgtatcttgatattcaaccaaaagcaattcacgatatatctccggaaactagatctacctagaattatccacgaaatctcagatccgcattgtgaatttgataatcatgaaattacagatctactagaaacgaaatcacagaaggaatgcgaaatcaaaactggggctaagaggaggatcagaagaagctttacctctgcgagtttgagagagaacgttgcgaagaagcaacaaacggattcaaagttttttttttgtttttttcgtttttgattgatcttgaagctgatgttgaagctttttttgaagaagtttacacgattacatgtcatcg

SEQ ID NO: 9972 - DNA, 1249 bp, Arabidopsis thaliana landsberg
ttttgagcatcagtagaagctatgggaatattgctaagtcctccatgcactggagtctttgggtcttcatcatcatcatcgtcgtcatagatacaaaccgccctccgtctcttcggcagctgagcagcttgaaccttgatatcgctatcagaagatgaacttatcttctgttcagggtgatttgccccctctttaacgagagacccaggaaaagaggaaacacttgtgtgctccactgtctgtttccggcgctttgtataagcgaccatgtccttatcaaattgattttttcctcccagggcacttatccctaacacaatctcacgcttaaaaattgatacaacgccagtagaatcagatatttcagccttgccttcaccaacaggaacaagacgtttgctcttacattgtttttgatccttcgcatcttcagaccgtggcctcttagcagcacgtttactttcatctgctcctgatgcagactttcctagttcattttcaaacctctttttcttctctttcagcaattcttttggctttttagaactggcaatgttaagatccgtaaccaccttactgtcagaagattcttttctacagccatgatcttgtccctttttactgccatgatcttgtccctttatactgccctttaatttctgattaggaccaaggatatgattgtctgtagcagctcgactatcaggcacacgtttggctctaacctcatctttacatcttttattcgagtcatctgttgtcttcctgattatcctctgatcattgactaaattatttccagtaccatcactatggtcagtgcaagtgacattgtcaatcttatcatcaactgctacctttaaaatagggtcaggtgatccatgctccactggctcactacttggggatgtgtttctgttatttgatatcgatgaatcttgctctcctacatcaggatttatctctgcaccattattctcaactaatttaccaagacaaggatccgccctagaactaaacttatcagattttccatcactactagcttgattcaaatacttaggcttcgtcacactaggttcaacagcattcaaaagagcctcattgcctactatatctgacttttgcttctgcgactcttcaacgcagcagagatttcctcccggcttgggaaaagtcttaatgttccccagacatcctccgacagtttcttctaaactcgctagtaagggttaatatcaggaggcgt

SEQ ID NO: 9973 - DNA, 1444 bp, Arabidopsis thaliana landsberg
acaacaaaaattgttaatagatatcttccaatgttggatttaagaaaccgagaagctgtagaagcataccaaaggcgatcttccgtcataatctgtcttattcgggtcacctccagctcgaatcaaactcttaagctgataaagatcaccgtagaaagccgcactattcaacttcagagctagctctgcctcttgtttactgatatgaaaggttatatcggattctagttgcttaatccggacattagattctttcccttcaagcagattgttgagaatcctccgtccatcatggaaaaatatctcgagtatgttcatgaaagattgcttgtcaagccttagaatccgacatagctctgcaactctaaccgtgtaaggctgaggaatattgcagaggattgaaatctctccaaaagaatgatctggttgtagaactgccactatttcttcagatccatcctttgttatacctatctcctcctgattgaaatcacaagaagtttggtttagtaactgagattttttagtcattcctaacatttattgacgaaaacacagatattttgtttaccaatacaccgtgacaaacaaagtagagctgatcaacgacgcttccttgctccattataacttctccaggaagaaagaactcttcatgaagtcttataacctgtaataaaagcaaaagtgtgctctttagttacctgaagaaagaaagtaattttcaaaaaaatcaaaaggcttacaatctggttaatgaattcagatgagcatccgcgaaagagaggaactttctcaatatacggcaagtataaagtttgcgcaatctgcagtaacaacataagtttacatttgttcatcatctgaatctgaacaagcatctctgaagcactcatcataccttagcacggatagagacaggaatgtcttgaagaacagctgcttcagtgtagctgctttcgtactgcaaccgcaaatgtccggtaatctgaccacggatgttcctaccgagtttgtttcggttcatataccgcatgatatcagccatcttatcccggaatctctctgttttcgaaccttttacaatcaaagctgtcatgttaccaatcaagtaagctcctagaatcatatcgaatgaaatgtagaccatcgcgaatatcatttcccgcatattaaccgcgtgtatatctccataacctgcattataagaaacataccaagttaaggaatgaaagcaaacgatatattcaccaagttttcagttatcagaacttaccaacagttgccatagtaacaactgcaaagtacatagaagtagtgtatcgagtccagagatcgatctctctaaacttcgagtaactgtaatctcctaacttcaagcttccaatccaagtgtacccttcttgagaagcaggaagcgtcgtggccaagtaatagaaggttt

SEQ ID NO: 9974 - DNA, 983 bp, Arabidopsis thaliana landsberg
agtcatacaacacgaaatatttgttagattttgactttttgagattttcttagtaaccaatataatccatcttctaaagttgatggactcgttacttgcacagtactcgccttgaaaaaacaaatacccgtaatagacaagccgggtaaagagtcacaaaatttgaagactcgcaagtacaaggcaagtatcaagtaccaaagttgtatatgcttcgtttgaacatgataaaaccatttttttgttttgacaaccaatggcattgtgactatcattatacattacagtttagaagatggagtaattattaaggttcatatgtttttcttaatctccttgtaattatttttaggctatgaaacgagaaacaaacaaatataaattagtgatggatgtttaatacatacagtacattgataaaccatacacatagtcataccataaaccattagtgaaatgcagtacaaaaacaaggtttagataacagagcccgtttgaggcccaataagcccaagaacctcatcccaaagaccatgactttggacagctgaaccaagctcaacaacagtggagctacaagcagcaacagtccaataccctcccaagatctctgcttttaactgctctttttcccaaccacaatacccatcaaagaatctaagctcacttcttccaaccaaattcctcttcaccatctctgcagccaatcctacactctctctcgttccatagtacaatcctttcatcacttgtctgaatactccgctcttaccaacctcgttgtctccaccactccttggactcaccaagaacaacccttcttccaaaggtccaccaaagaagagtcttttgtctgaaaacgttcctgccatgtctaatatcggttgacttggtctccttaatagacatcagagatggacggtttaggatgactcctataggacctgagggtccaacagagaggaagaggatcaccgtctttt

SEQ ID NO: 9975 - DNA, 566 bp, Arabidopsis thaliana landsberg
caacttggattatgtcgggaattttgtttcaattcttttatggattaatggaaggttggcctgcttatctcattagtgttctttgcgttgaatatcgacttcgtaaagaacgagaaaaattctattttccgtaaccacgttattcaggttttattccacctctaattcttgtgactcgttataattttttatttttttggtggtattattgaattttaactttttgttttttttgtttgtgtaaaaaagtggtttgaggtgttagatggattgttggggaaacattggaggaaccttggattgatctttaactgcacttttcttctctttggatctgttattcagctcattgcttgtgctaggtaaattaataatcaatgttcattttctttattatatggttttttcatattgaaaattaattaatataaaaaatgatttgcagcaatatatattatattaatgacaaattggacaagaggacatggacatacatatttggggcgtgctgtgcaacaactgtttttattccttccttccacaattatagaatttggtcattcctc

SEQ ID NO: 9976 - DNA, 337 bp, Arabidopsis thaliana landsberg
tataccacgttctggagcggagaactaatcgaattcaaatctcgttctttgagagatttacttggaactcatattcaatagactcgatccaaacccattacacgagccgccagattaattacaccagccgctttaaacgctgtaaatgacaatatatcaagcatgcagagtacgatcacgcagccctgtgcgatgaaaagggtactggcctacacggtaataccttgtaccgggctggtatatccacacgcggtgactgcatagttaccaaacaatgcgaccgaagcgattgaattaagtacaattactgcgacagcattgtgactgtctcactgga

SEQ ID NO: 9977 - DNA, 1583 bp, Arabidopsis thaliana landsberg
  unsure (1)..(1583): unsure at all n locations
cgacgtacgccatgatggagatcataataagtatcatgctgaatatactatataatttatttataaaaaaaatagaacgaaagaaaaagtatcatgctgtcaaaaagaaaaaaaatatcatatttttatagagaaaaaactcgaaaaatatctgtttaatatctatagttgtttgaataatatctaaattaattttatgtttttaaatgcttttttaaatcaaacattcaaattcatgattattatattttaacggatgttctaactgtggttgaaatttaactcatgatattcacgaaatgtataatctattttctaaagtttacaaatatattagtgtaatctaatggttaaatgtggattgattctcctcataaatctaagttcgaatcccccttctttcgtaattaatccaaatttattaagatagtcaatccctctttgtcctaattaatccaaatttactaagatagttagtcaatccacgtttaaccaccatactaacctaatatatttgtaaagtttagagaatagatagtatatatatttataaataccatgagttaagttttaattatagttagaacctccattaactaccaaaatttaaataaacgaaagcttttaaatttgggaaaatttaataatatatgtattaaatggacaaataaaagttagatgagagtttttttaaattttttattataagataatttttttgcatgaaattgtttttaagataaaattttgacataaccaaatattattttccgccacgaattgagtctacgagagatgtcctgtctttaaactcgtaaagttttggtcttacccaacccaatacccacaaaggtaaacgacataacggttaataatattctaaccggtttataagtttacataaatcatttactaatccgcgtgtaattaagttttatgaaatgtggttattttgtaggtcacgtgaaatttattaattttttagtacttgtttttcttttttgggttcaactagttactttttttcctttgacatcaaaattattgtagacgagtggtccatatatagatggtgaaatgaaatgaatattgagtcataaataaatatagaaagtgaacaaaanaaattagtggaaaaggtaactggaaaagaaaggcttattggcttggcaagattccataagtttatttcaccaaaaaggaaagagtacttggccttgctctctctcttttaaaatggtaaactggtaaagataggagactcaatttctagttcatcaaaacatatttggcgttattatttctgtggtcacttgaataataatgtctcagcttctcttccgtctctcaaaactctcttcccggaataatgagcttgtatgtacgcttctcttctctctttattggtttcgctctgtattatagttaggttttgttttagaaggctttgcagggaactaatttgtgattgtgtaactaagaaatgacatctggaagataaggatttgagtctgcgttacttttctgttctgatgtctgagcattatataattaattggcagatacacaagagcgttcgcttg

SEQ ID NO: 9978 - DNA, 901 bp, Arabidopsis thaliana landsberg
aaactagggggtcaatatccacaaaagggagctttcacagctgctaatcttgcattgcaatgcttaaatcccgatgcaaaactccggccaaaaatgtcagaggttttagtcacattagaacagctagaatccgttgctaaacctggaaccaaacacacccaaatggaatctccaagatttcatcattcttctgttatgcagaaatctccggtaagatatagtcatgatcggcctctgctgcacatgactcctggtgcatcgcctttaccttcttacactcaatctcctcgtgtaagatgaaacacatttaagaaaacagatcgtgctttatgcttgtatgtgtactatatgtaaaaatgcaggcttgtctgtgtaattagagaggagtgattgcaaaggtttatacagagattaactatttacttcaactattttgtgtcttcaaacatatcagagtaaattgaagcaacatatgaaaatgatgtaatagactagacatgaacactgaccaaacactctctaaactcaccaaaccaaaccaaaatacagaggaaacacactaagtaattgaattcgaccatgtaagatgagtagatgacactctcttttgcctgagccttcaccgtttccagtcggttctggttgacttgtctgaaacaatcaagaaagatatgggttaaaaggttatttatctgagtaaagcttcaatacttttataagaattctgtaaatttgagtcttgcttacgagttatgtccttgaaagaagtaaaagatttgtcgccgttcatagatcctttggcagaggctaagagaagtttttgagcccttggagacatagtagtagtactcagcttaccattggctggaagaagcagtgaatggcgcccgaatgccccatt

SEQ ID NO: 9979 - DNA, 1270 bp, Arabidopsis thaliana landsberg
ttggttcaattaggggcgggttggtgttcttcatctggatgattctcaccaaagcaaaaacttcacattcaaatgccacagagatggaaatgatatatattctgtcaactctctgaatttccacccggtaagctctatctatagttatactcttatactcgtatgtattctttgaagccttcagcatatgttgagcgatgaaaatgattgtttgagttgttgtgaatttaaggtacatggcacttttgcaactgctgggtcagatggtgctttcaatttctgggacaaagatagtaaacaaagactcaaggtattttcctcctgcattgattttttattttgttaaccaagtaattatctaacagttttgtattctgtgtccccacaggccatgtcgaggtgcaatcagccaattccatgcagctcgttcaaccacgatggatcgatatatgcatatgcggtatgatataaatcttatttggtttcactttatttgtacatgctcatgttatatgttgcaaaatcgagatggtcttttacttggaatctaaaaccatcattgtgttgaaaaacctttgagagcatacatgaatgctttctaacatgtattgttatataggcttgctatgactggagcaaaggtgcagaaaatcacaacccggcgactgcaaaaagcagcattttcttgcacctgccacaggtgtgtgcgcgtcacagacaatagtaatatcatcatgtttcctaaacattagtgtctgtatctaacggacggaatttgttttaaatgaaattgcaggaaagcgaggttaaggccaagccaagagttggagcaaccggcagaaaatgagcgttgcttagtctgatttcttcgctagtgattttttttttttttttagcttgtggacttcgttgggctttgttatctactttagttcatgacattttgaatatacattaggagtcttgtctaaaagactaaaagtaaatctctaatgtttctagttgggcctaatttggaaccatctcgtctcatacctctttcgtttcatcatactaaggaaatctttttttcttatcaagaaattattttagtccatctgattccatagttaaactttagttattttaataactcaaatcaataaaatcaaccaagaaatgtttatctaaaactagtataattaaaacgactaaaggttttttttttcatttggtacctgcggagcaaaattttcctaaaattgggtattaaggcaaaattttttttttg

SEQ ID NO: 9980 - DNA, 1229 bp, Arabidopsis thaliana landsberg
aattcgcctgtttagagttttctttttctaatcacaagttaactagactccaaagtaaaagactaatacacaactaaaatagtaaaatagtacggttgttatctgttcttgacttaacgaataacgacaataacaaatcatgcgctctaatcacgcgctttcacagctaattttattatacattaaacaccgaaatgagagatcatgcttcagtttttaaaagatttttctaataagggagtatacttttaaattggttaaataaaaatctaattagaaaataaagaagggtaaaaagggaaaaagaaatagtacctgggaccgccaaaaacgccagcgtttcgagtgagctggtctacgagagaagcagctttagggtcaacactagaagctttagagtacattgagctcattccttcaccagaggccacaaagaaagctccattctccatcaaatccccttctgttctccaattccaattcgaccattcaccatcgtccttcgagtccactcgcttcgtcacctgcttttcaccaccgatcagcaaacaatctcttttccacgcgccgtcgttgcgcgtggtggtattcaaacaactaacaacaacaaaataaagtgtgtggacagagaagaagtagaagaagcagcccacatgtctgtcatgcacttataatactatacatacataccatcactgtctcactcctcgtagacccaattctcataaaaataagattcttccttttcccatttacatacaactttaactggatattttttcctactagctaaagattaacaactgtccatgtgaaatatgaactggattcatagaagataggaccatactcaaaacattttacaacccaatcaaaatcaactaatgaaaactacacatttgtcaattactcaataaaaagttctctatggtaaaagcctaaaatctatccacaaaatcatactaaaccctacaaagttaagctattaaagaaagtgttccacaccatataacaacaacaacaacaacaacaaaaaggaaagatttttctatatgggtaatccaaaaaaatgtaaaatttgttaaataaaagaagaaaaaatacctctttggcgctaggatcagaaggagcagagtaacgatttccttgactgttaatggtgggattaccactaccaccaatagcatacattttccactcagtgaaatcattattcactacatgaatat

SEQ ID NO: 9981 - DNA, 1793 bp, Arabidopsis thaliana landsberg
accgattagaattgatatgcacattaatttgtgggtctatatacctatcattcaatgaattttatttgaattgaagcaatacatttccaattatcattggaatataacctaatcaaaattagaaaaaaaaactaatcaaagaaagataaataaaatttgggataccaataagaaaaaacatattaattagcaacgaactaaaatgtttattggtaaaatgttgccgagattccttccacaccatatactgaaatacacacggctccatctcaccggcttgattgatcgaactataaaggatcgtctatgtactctccgtcgatacctctgaggaagtcacgttatgtaccgactactctcctagaactctatgttgcgacatagcgaccgtttcgggaataattactaggcaaatgcgtttgaggggatatatgctatttgtttagtaagggaatttccctttcttaacaatatacttgtaggcgaaatgtcttggatatttcacggcgtagaggtagagtttttggaatcatggccatttaggcgaaatgtcttgcaaatgtaatttaatattaatgtatagtttttctttcacctacccagttcaaaaatttcctacaccaactcatttgtgtgtattcacttgtcgtatctaaactcattgtttatcattttctgcgtgaaataattgtgaaacttcacataaaggctgaaatagtcctcacacaaagacttacaactccggtctagttcaatttaccagtccaattttaaacattaaactgacttagatactcagatggaaacaaatattaggagcagaataataaataatttttcatcaaataaagaattaaaatgtgaatttgaatttgggtggtgctaccactagactataattacatggcttagttgaaatctatagattcgtatgtatatttgtaactgcataacatattaacatgtacatacacacacatagtgttagacatttgttttttttttggtcattacaaaagcttttaaacgtgttaatcaggtcgagagtatttaatacgctttgctcaacttgtctgagtcttattttggtggggacgtgattggtcatccattgtagcccgtggaccaagtataacgtgatgtatttttttgtctataaattttataaatatttagagaaaataaacgaattcgataatatttaaatttaacaagttagtaaaaagcttacaatatattgaccaaggtcgtctcctctagttttatcgttaagttgacaaagaaaaacttacaatactaaatgcttatccatttgattgaaagtacagaatgtactacttcaacaaatgctaatcacaaaactggtattaaaaacgtaaccaatcttttttatatttcataccattttattttataactatattaataacattttaaattattatgatatcatatactgttttttctactactaaaaaatgtatatcgttttgtgttatcatcggactatatatatgttacagtttatgtgcgaccacaaacaataaaatttaatttgtgtcttcattatttatgcgagttttcttattaaacgaagttgttagaagaagctaatgtaaaaattatataaatatgtccaacaaaagactgtgtaatttcatcgaatcagaatataacgaacttggtttgtaatatttccaaagtctatcaagattttaatcatggagagaaagatcagagctttcataatctcatgaacaaattctagggacataacttttttatcttttctg

SEQ ID NO: 9982 - DNA, 1045 bp, Arabidopsis thaliana landsberg
cattcagaataatcacttacacattgatcaaggttccattaacgattaagtaaagtgaagaaagagttaacacttaagtaacccatgagtgagaacagtggccatattatgaacaagagagattcagtaatgtagaaacttgagagactttttagtacagtcataagttatcaaatgatcctaccaaaaagaaaagaaaagttttacagaataaactgaagtgtgtgacaaattctaaacttccaatgaaaacaccagaacgtttataaaagtgatccggaatttcatcgggaatcttcttcgggatcccgctgccatgaatcctgagattctgactgtaggttaatgatctgagaaactagaagcttcgagatcccacttatcgctgcctggacctcatctggttcccttgagcctctccaagccgaggactgcgagctcaatgagtactcgcctgctgcaacttgtgtcttctttgacgttgcaagaaccttctccaaatctaactgtgataatggcctagggtcctgcaaacgtgacaaactcataacatcagtaccttgaaactagtggatgcaacactgaacatttcagtggaccatgttttctttttaaacttaccaaacatggtttcccctttctctctgcatctaggatttctctgatagggaagtaagctgctttcttgcatagctcaaaaatgtctgatccggtatagccttcgcataagcgagctatgtgatcaaagtcaatatcaggttccaccctctctcctttcagagtcactttcaatatctcagctctctcccggcgatcaggtattccaatctcaaaggcctgaggaagacgccttaatattgcttcatcaagctctgacggtctgttagttgcagcaagaaccataacccttgcatgcgctacaaaagcaaccatttctattcataagaaacccacatactccaggttacactagtctgcatggcaaagtaagccgaacagtgaagaattcaacttacgatcagtagagaatccatcccataaagcc

SEQ ID NO: 9983 - DNA, 1590 bp, Arabidopsis thaliana landsberg
aaaggctgagattaataagagtcaccgcatgttctccctccgtcggacatttctgattcggtcatggtactttggtttatccgaccctctttgattcgttaactccaccatcctcctctgtctctctggtggacgaggaactacttctccattcacaaacagttcagctacatttgcataacaaacattcagcaatgagtttataagctaaactgatagaatcaacaaaattttatgtacataaaccagagaagcccttagcaagttcaatctttcatacatacgaacaaatgcatcatcacagaatactgtttgcttgaaaatgcagttaagtttcagtgtttacttaagagtgatgcaaaccagactttgatcagacaagttcttgatgattatgattatgacaaaggacattaagaaaatgcagaacaaagttgatgatactacttacctccgtaatctttgaactctggatcaacataagagtccggaagcacgaacagaacaccaggaagtcctgaaactcacaaaagacccaattccatcaattacattcacatcatcgggtgctatgctacagtatcatacacaacaagtgttacaaaaagataccttcgagtttgtttgatgtctcctcatcaatctcacagccaaacccaaaatacctctcacacgaaacattatagatcttctttctagcctcttcctcactattaaaccaaacaacaatcagattcattttgttatagtgaagtagctgaggaataacactaacgaacatgacaaagacactcacctgccaacaattttagctagggtttgaacatagcaatcgatcatttgctgtttctgagcattttcacctccgggcttctccatgacgataagccaatgctcgtaatcgcaaccaggaaatagaggtgccatttcagtgggtggtcgatcgctgaagtttgatccggatttaagcggcgaatatgagccgccagacctatccatccgggtccggatcgttgtgaagcgggtcaaagctgggatgtatccgacggcgtggaagatcgtcggtgagaatcgacgagagatgagatgagaaggaagcggagaaggagaggcgacggcattggaggtggaaaagaaacgcttagcgacgcatgaggcggtggatcgggatagagttttcgccattgagactggtgtggtttcccggcgatgatcgacgaagacgacgagactagggtttatggatacgattgaagaaaacgaaagagagtaaaacaaattgggcttgtaatttgttattaatgggccttatcatgtctaaatatgaggcccatttgaatgagagatgataattcgtttggtatggtatgataccattggtatcactcagagtctcagaccaaaacgttgatgatgtttccaccttctcttgtaaagttttggttttagtgatgatcatgttttattatttacatacttttcagtaaaaaaatatgaatagattagatgattttattcttatttgaaatttgatacaatttggttgatatatatatatatatattatcaaatcatcaaaaaccacaattt

SEQ ID NO: 9984 - DNA, 1232 bp, Arabidopsis thaliana landsberg
gcttcttttctctctataaaaccaagtctttgatcatcttatttatatcaaacttcaaaagcgtcaagcataaagttaggccaagaaacccatttaaaaaaaaagagagagagatggagagtttcccgatcatcaatctcgagaagcttaatggagaagagagagcaatcactatggagaagatcaaagacgcttgtgaaaactggggcttctttgagtactctcacttttcttttcttctataaaattgtgtaactcaaaatctaatcatctgtttgtgatattacagtgtgtgaaccatgggatttcactcgagcttttggacaaagtggagaagatgaccaaggaacattacaagaagtgcatggaagagagattcaaggaatcgattaagaacagaggtcttgactctcttcgctctgaagtcaacgacgttgactgggaatccactttctacctcaagcaccttcccgtctctaatatctccgatgttcctgatctctacgacgattacaggtaaccttttttagtttcataccggtccgttttttaccttaaccggttacaggatctcagatttactggttttcaaaacaactcagcatgaaccggtttttttcttttggttttaagtaaaagtttaaccggtgttattgtctttctacagaacgttaatgaaagacttcgccggaaagatagagaagttgtcggaggagctactggatctgctgtgcgagaatctcggtttagagaagggttatttaaaaaaggtgttttacgggtcgaaaagaccgacttttggaaccaaagtcagcaattatccaccttgtcctaatccggacctagtcaagggtctccgagcccacaccgacgccggcggcatcatcctcctcttccaagacgacaaagtcagtggacttcagcttcttaaagacggcgagtgggtcgatgttcctccggttaagcattcaatcgtcgttaatctcggcgatcaacttgaggtaactactgaaccaaaccgtactaaaccgaaccaaattgaaataagaattttgagttttaattttggattgattaaaccaggtgataaccaatgggaagtacaagagtgtggaacatagagtgctatctcagacagacggagaaggaagaatgtcgatcgcatcattctataatccgggaagcgactctgttatatttccggcgccggagctgatcggaaaagaagcagc

SEQ ID NO: 9985 - DNA, 1090 bp, Arabidopsis thaliana landsberg
tgtgaaccatgtatacatagattattgccgtttttatatttcatggacggtccatgtccacgtggtgtttccttatatacacaaacacgtcgtttctttgacggagagaacaacttcatgccgttttcttgaaaacacattctcgacgtttcatcatccattgaaaacgaaagtaaagttccgtttaagttttggcaacatatgaactacgtgttgtctttatgagagacatttcttctttttttcactttaccttttcctatcagtaggtcaggtgtgtgtgcaaaacaaacaatgaaactagtttgcattaatgaaattttttaacttgtggagttggatccaataataagataaatttcattctcaaacatgaattcccaaatttcacacatgaaatctcccaaagtgttccctctattcaacgcaactaatcattttttatgtaaagaactttgaattaaccctaagtgcagtaataacttcttacacaacaagcctatacagttacagagacacaacatttccctccaaaaaacctctctattatacaaaaaaacaagaatccctcttgattcaagaaacagatgcatgttcttcttcttcttcagattcatgtatagatttcatctaggaccagagagctccattgcttgcacaagtaaactagagtcatcggtaagatcagagtatctgtctgaagatgacatcaattcatttatcctgttgctacattttgaaacactgtctgatctttgagaagcttcccatttctctgcaagtccatctccttccagcattcgaacaacttcagacatttttggtctatgtcctggcaggtactgtgtgcacaacaaagctactcttaccatttcgtctaactcaatctcatcgtagctcttcttcttcaacaactctttatccacaagtagctcaagtttcttctcttgatgaatctttttaacccaatcaagcatcacacctttctggttagccgctttaccaaactcaaaagctctttgtccggttacaagctcaagaagaagaatcccgaagccaaaaacatctgttttctcagaggattgaccag

SEQ ID NO: 9986 - DNA, 1193 bp, Arabidopsis thaliana landsberg
  unsure (1)..(1193): unsure at all n locations
ctttttgctattgttctcttctccccagtcttcccaagaattcgagttacgataactgttgttgttatcatcttgatgatgattgtgatcctcnnnnnnnnnnnnnnnnnnttttgtttccaatcccagagttcttgtagtaaccgatgccctcagttttattctgttgattccaagttgatgcttcttctttagtgaactcttcaaccttttgtgaggcaattgccatcactcctttcatgatcccccatgtcctctgtcctatctctgttgtcttactcgcaacaacattaacagtctcactgaccgtctgatctaagccaccttctttgacctgcacaatgaacaaaggtttcttatctcacttgtcttcaaaattctataatttctaatgttagcagtatttgaaaagaaggacgagcatccggcattatgctcagttcagcgttttagaggatctccctagagattttgcaggggcataaagacaaaaaaaaaaaaaaagagctttaacactgcaattaaagtaagaagattatgcagctagaaaagactctaattttgtgttacataacaatgtcaaaaatgggataatctaacaaacagagcaatgagcatagcggcaattagacagacaccaagcgaatagtcacgatctcaatataaacttaacaactagactacagaatgttaccaaggagtgagcttactgatcacgatgcaaacgaatcaaccacaacatcgaagcagaaatgataaaagaagtaccttggaagtaaactccatggttccagtctgaacaacatttgcagctgatgcagcaacaagagacaatcttccaaaaccctataagcatatacgcgtaaaacaaacacattcatttacaggataaacagagaagtcactcgcatgtcgcatctaaccaaatcactctcaaaaagcttccaaatttacctcagacataacagagaaaacatcaccaccaccactctgttgattgcttctcggagctggacctggactagatccaaacccaacatacttaccaccttgtgaaggaggaagtccctcaggcttagactcattctcagccatccttttcgcaaagaaactctccttattcgccgccgacgcctccagctgagaccgtgaatatatatcctcagacgatttcgacttcgccggagcaccac

SEQ ID NO: 9987 - DNA, 1200 bp, Arabidopsis thaliana landsberg
aaaagagaaaatcgggaatgacagatgaatcagattggaaagcaaagaagagactgaaactttgtgagagtccgttagagtcacggcacaacaatcctttaattgatgacgaaaggatgattggcgaacaacggagtaagcaaactgaagctggaggacattcgagatcaaagtctaagaaaatgctgagtgacagaatactgcagttacttctaactgctggttggactgttgaatataggcctcgaaatgggagagcttatcaagatgctgtgtatcttaatccagagggaaagactcactggtcagtgactaaggcttatcaagtttataaaaaacaattggaaagcaacccgaatgatcaaaagaactctaccactggttctggttttggcttgctaccagaagaagaccttcatctattagagagaacaattcagaaaaaaaggagcgatacaggtaagcaaaggtcaaaattgaaggacagagatactaatgacatcttggtttcaacaaagggaacaggaaaaataaagagggaagaaaaacatagtagaaagcgttgtactccgtcagctcgtagttctttgaaagatgtggattccaaggaggatgggtacatattatttgaagggaaacgcaccatgctgggttggatgattgattcaaccattgtgccacttaacggaaaagttcagtgcatggactgcaagaagacagacatacttctagaaggaattatcacaaaagagggtattcgatgcaactgctgtgatgaagtgttctctgttctcgatttcgaggttcatgctggcgggaatcgcaaccagccattcaaaagtctgtatttagagggtgggaattctctcttgcagtgcctccatgagtctatgaataaacaaagtgaatcacaacttaaagggtaccattttgtggactttggttcgggggatccaaatgatgacacatgtggtatttgtggggatgggggagatcttatctgctgtgatgggtgcccatcaacattccatcagagctgcttggacataaaagtaagttgctccttacgttgtgaaaattttatgttaaagtgggcttttctgtttcttctagacttaatttatcttcaatctgcagaaattcccttctggtgcctggtattgttacaactgctcatgcaaattttcgagactgagagcc

SEQ ID NO: 9988 - DNA, 1165 bp, Arabidopsis thaliana landsberg
tccactcttctctcccctgtttgtctttctcctttatctcttcttccggagactggaaagatggcatggggcaacaaacgcactttgtcgacgattttaatagtaaatcatacagcttagaggaaaataaaacggacagagaagagagtatcatgatcgatataagcactagtttctgctttgtaattatgcatctttctaactagaatgtccaaattttgcatattgaatggtctttgagttcaagattgacaaagaaccagtgagacaattattcttcaagaacaacgtaccgaggaaaagcaaggacgacaacaaattcagatggtgccagtagattatgttagtaccttttgctttaccaatctctgcatagtcttagtgacccgctaggatgatttaacgtccaacatggcttaggtttagagttgtagacacctaacgccaacgagtgatcctatcatatatgaacattttcgtcgtcttccatagatttaaagttagttagagccaatgatttggaacctttgcttgcaacagctgcacattcattaacccaccaaccttgcttcctataaggctataattacttcttctatctatgtcaacaaccaagactttagtttagaatttgacaacctctggtcaaatgggtacgtcacatatgggagaaaatgaaataaattgtaaagtttattagtcaatttatgacatgtgaattggtaatatgtcaaataatcctaaatcaagagttgttctgctttggaatctcaacagaatctaaaactcataacctctgagttatggtggatggtgatagggccaaccacacctcactgtacagatgttgttgtcttcacgcatatgtctgatggacaatgacacacatgatataaatttacactatctattttaatatctcaatctctctatatataaattcctctgtctttcaagtttcagagcaactttcagtagatctatcacacgccttgaccctgtcatgcaacggtcattattcactccaaacccactctgcttcttcttcttccaaacatctctcagcagagctaaccatctctcttttgtaatggcttcacttatttcccttggtcttcttctgttgctcactgtatcttcagcagagtccaagactttctgggtg

SEQ ID NO: 9989 - DNA, 2062 bp, Arabidopsis thaliana landsberg
aagcttcttatggattcgatagccctaatgacagttaacattataacaacaacgtcaacactggtgggtatgggataatacgtaattagtttaaaacgctaacggacaaagtaatatgattgaagtttgatcaaaactcactttatcagttccataaatgtaatcgcagtaagtgaaaaccgaagcaaagttgctctggctttgtcctccaacgtagtgatggtagtcatgatactcaggtccaccgtaaaatggaattaattttgtcacactccatggaaaatcatatctgcaaacaaaataagtaaacaagtgcatctacaaacaatatgtaactatttatgtctatgtttgcatattactaaattctttttttgtgtttagcgtttgaattttcgaatgatatcactaaacactcaatctttcttttacaaacgctaaacaggataatgattttacgtttgtttagtgtagttttacccgctgtgggtctcaatcgcctcgaattgtcgtaaagatatccataacggaaacggcattatatggccaggagcaattgccggtccaagaaacgtcggaatcccaagaatcaaaatctcggcccaatgcgcatacggcgatgcgtatccgataggtgatgtgtactcatgatggattcgatgaatcttctcgtaaccccatttgcaatgcatccatctatggatccagtagttagtgtaatcttctatcaagaagtaaaccactaattgtgctactatctccattaacgatggtaatggcaaaccacttcgaatcccaaccatctgtcaattaacacatatagtatatctcaagaacatcacaaattaacaaaaaaaagtgttgtaagaagggtatatacatatatgcaataatataacgtttcaatttaatattttaatgggatttttctctaaataaccaaaaaaaaaagcacaaaattgtataacaacccactcacacaaaaaacgttgcaaaaacaacacttaaaaaaaggaatatacatatatcataaaatatttggttgtttgttttaaagaataaatgaatagtaacctggatggaaggataagaaacgatttgcaatgtgccgacgacgagaaggaacaacttcatgacttctttataacattggaacatatcagacaacgaatacttaaccttcttctgaatcttaaactgatcgaaccaaccggtccattcgacaatcacaagaggaaaaggagctagtgaaaagacaaggaagagaaccagaatggtgtggcaatatacatggaaattggatttggtggctgagtaatcgaaccaaaccgtctcgaaccaagtaaggtttcgtcctaacgccacggacgcatcttctacggttggataagggatcatattgtgagagtgttgtgtctggattaatttgtgtggtttatgttatagcattgttttggagttatagactcataaaacgtgtcttgaatgtgttttgaaaaatgtatgatgaggatgcttgaaaaactatataaagatgcacaaatgtcgaaacatggtacctacttaataatttcggtgatttttctttttttttatttttccaatttttggtatattatttaccctttgagaagtccgccaaattgggtcctcaatgtatttgttttttgactttttagtagaacacaacaaaacatatcttatctctttacgtctatatttgatacgaacgggtcacattttcgttttttaaaaatataaaacgaaaattcaaagttactaaggttgttattttttagtagttatttaggttagaagatatctaaaattgtatgttcggaaatatttgttgcaaattcatttatagacctatcatcagaagtgatttcttttcaccaaatgattttgaatagctaaagcctttcttcattgtttaacaatctacgaaacgaagagtgatgatccatacgtttagaaaagaaaaactcgttgattcacaaaatatgtgtggacaacaacctaatatcaacgttcattaaaactcttgctgaattggcttaga

SEQ ID NO: 9990 - DNA, 1503 bp, Arabidopsis thaliana landsberg
atttgaaaagaaaatgaaaaaatgtggagatggcgcgaccaagaaaataataatagtggagaagcttaattgaagggaatgggtttgatgtggaattctgcatttggttccacacaattttcacagcttaccttcctcatcctctccacgtggcttccattccacgtcatctttttcttccccacgtggcttcctctcgttggtcccacaaagaatcacccttcttcaacaatcaccatcgttgctccctaattccatcacttcccttctctaaccaaaacatttatttcttaattactatagtaacacacaaaaatggtcggtagaaaaatttgtatttcccaatacacgtaatattattacttcgtcgtcaagcattatcactgtttattactagtgctcaaccgtcacaaaccccattagctttttaaaataaaaaattactacaactctaagcaatcatactcacaaaatactctgttattattatttaaaataaatatcagaagctcatgattattataattatattatatgagtaaaataaaatatcgtcgagtggaaaaatattcaacgccacatgggatctcttcttctatataaagcattgtaacctccaaacaaatattcattccaaattcaaaaccatttccaatacaacttccattgattctctctctccctctctctctactagaaccttcaaattctctttctctctataaacttgttaaagaaacttttaaaaaaaaagaatggagaatatgtttcgtttgatggatcaagatcaggatttaacaaataaccggtgcatttgggtcaacggaccggtcatcgtcggagcaggaccgtcggggttagcgacggcggcttgtctccatgaacaaaacgttcctttcgttgttctcgagagagcagattgtattgcttctctatggcaaaaacgtacttacgatcgtctcaagcttcaccttcctaagcagttttgtcaattaccgaaaatgcccttccctgaggatttcccggagtacccgacgaagcgtcagttcatcgactaccttgagtcttacgctacccggttcgagatcaaccctaagttcaacgagtgtgtgcagactgctcggttcgatgagaccagtggcttgtggcgagtcaagaccgtgtcgaagagtgagtcgactcagaccgaggtcgagtatattcgccggtggcttgtggtggctacggcagaaaatgcggagagagtgatgccggagattgatggtctttctgagttttccggtgaggtgattcacgcatgtgattacaagtccggcgagaaattcgccgggaaaaaagttctcgtcgttggttgtgaaaactccggcatggaagtttctcttgacctagcaaaccatttcgctaagccttccatggtcgtgagaagctctcttaaagtgaagccgagggaagtaatgggtaaatcaacgtttgagcttgcaatgaagatgttaacatggtttc

SEQ ID NO: 9991 - DNA, 1364 bp, Arabidopsis thaliana landsberg
ttttcttctctttaatgcttttgttcctcaacacaaaccaagaactgctttattcttaatcggatattcgcacttttttctagggttctgggtttttgtttcttcttcctttgatgctttccgaacctgaaaagattcgttaaagaaacacaacattaaagaaacagagaatattagagaaacagaggatttgataataaagaaacattatgcaacgtgtcggatttacaaagcaagggagcatctctagctctttcatgttttcctttaatctctcttaaggttagctactgaagaagcgaaataggtttcttctcttatagattaagtctaagactaaaagtctaacatatataaaaagtttcacaccttatgcttcaacatcactcttcttgtttatactttactcttgatcccttttgcatccaataaggatctcagatttttaaatccttaatgatcttgtcgttacaaaactatttcagagattccaagttgagggaaaaagagagcagaacaatcttcagaaatctatttctggctttgtttatttgtgagaaatgaagtttatgaaacttggatccaaacctgattcgtttcagtctgatgaagattgcgtaaggtaaaaatgtctttcaagattttggttcatatggtttgcttcggaatcttactttctctggctgtttttagatatgtagcaacggagttagcgactgatgtagttgtaattgttggagacgtgaaatttcatcttcataaggtaagagtcatgaactcattgtaaccaaccattttggtcatagctactgatctagtgatgtttttgggtttaaaacagtttcctcttctttccaaaagcgctcgtcttcagaagttgatagccacaaccacgaccgatgagcaatcagatgatgatgaaatccgcattcccgatatcccgggagggccaccagcgtttgagatatgcgcgaaattctgttacggaatggctgtgactctcaacgcatacaatgttgtagctgtgcgttgcgctgctgagtatctcgagatgtatgaatcgattgaaagcgggaatcttgtttacaagatggaggttttcttgaactctagtgttttgagaagctggaaagactccattatagttcttcagacgacgagatcattttatccgtggtctgaagatgtgaaactcgatgtacggtgtttggagtcaatcgctttgaaagctgctatggatcctgcaagagttgattggtcttatacttataaccgaagaaagcttcttccccccgagatgaacaacatttgcgtaccgagagattggtgggtcgaggatctcgctgagctcagcattgatttat

SEQ ID NO: 9992 - DNA, 1595 bp, Arabidopsis thaliana landsberg
tttctttcacatttccagaagaagattcttctttcttctccctctgtttttggatctgttgagttttcttgtcggatttaaagattgtattttgatgcgtttcaatgtgaatctgtgatttttgaagatttcgagctctttctattagtagttcatattttctccttacccatttggtatagatgcgtagatcccaagtttttatctttggggtctgtttttgcttgtgaaagtgttgagctttgttttgtttcctttaatgagattataagaagatgaactttgagtgattgcagctatcggggagttttgtggtatgctgaaaagagatgtctttgaaaagcatccttcgtgatctgaaggaagtgagggatggacttggaggcatctccaagagaagctggtcaaagtcgtctcacattgctcctgatcaaacaactccaccactggaaaacataccacagagcccatgggcttctttgccgcctgagttgcttcatgacattatctggagggttgaagagagtgagactacttggcccgctcgagctgccgttgtctcttgtgcttctgtctgtaaatcatggagaggaatcactatggagattgtgaggatccctgagcagtgtgggaagctcacttttccaatctcattgaaacaggtaaagaaagtttactggttctttgttcgcatcatcatgttggaaatctaatattcttgtttgattgtgagcagccggggcctcgagactctccaattcaatgctttattaagaggaacagagcaacagctacatacattctctattatggtttgatgccttgtgagtgacccttattccttgactaaagttttcaacaacgtagaaactgttgttctaaggatgttgtttcgaatttcagcggagactgagaacgacaaactgttgttagcagcaagaaggattagaagagcgacatgcacagactttataatctccctatctgcaaagaacttctcacggagctgcagtacttatgttggcaaattaaggtaagcatttgtccctgagttaaagtcttaaccatcaaaagctcttttgtctaagcagtctctacttatcttgtgggataggtctggttttctgggaaccaagttcacaatatatgacaaccaaacagcatcatccacagcacaagcccaacctaaccgaagactccacccgaaacaagcggcccctaaactacctacgaatagctctaccgtaggaaacataacctacgagctcaatgttcttcgcacaaggggaccgagaagaatgcattgcgctatggattctatacccctctcttctgttattgctgaaccgtcagtagttcaaggcatagaagaggaagtctcttcctctccttcaccaaaaggagaaaccatcacaacagacaaagagattcctgataattctccaagcttaagggaccagccgctaattctcaaaaacaaatcccctagatggcatgagcaattgcagtgctggtgcctcaacttcaagggaagagtgactgtggcttcagttaagaattccagcttgttgcaaaaattgacgcttctttggatg

SEQ ID NO: 9993 - DNA, 1232 bp, Arabidopsis thaliana landsberg
ttgtgtgtttcttacaatttatcctaagattctatagaaagattgttctgtaaattttgtataagccagagggagctagtacttgctaaggtaaatgttaaactttaaccatttctcattgaaattgtcaatgttatttactataaatcctcaccatttttgacattttcttgcaggattccattgtttacctgcaaatgaagaatgcaaatccaaatttcacatcctaacatgattaagaaattaaacatcttccaatggtgagtctgttttttgtgcttaccagattaatggttgtgaactgtctcagcatattattccaattttagagctccgaagcagagagactacagaaaagtctagttcactttcttaaattagttaatacggtgtcgtattgggacactcttctttaattttctctctggcctaagagaaatcgacacgtcataactaagaggaggggtattgccacgtcatctcatccactcgccaggctaggcgcgtgaattgcatttccctcctgatcggaaaagtcttaccaaagattagctttcaggtcaatttttaaatcttagctctcaccaacgacgaaactcgtctccctccatcttgctatggatcgtcagccggagagggagaatgatgaactaccatctccggcgataatttccgaccgagttctggtaaatggtgttgtcacgccgttaacgttgaccgccgagggagagctacgatcgacggaatctggacggcggaaatcgacgttggcaaaagaaatcctgagtttcgtcgtggaaggtaacaaggttagagtaaagaccttggttgagaaaggaggaggaatttgctgtagaggaagtgctggagattatgcgaggaacgatttcgttttcgagcctctctctgatgaatctagaaagctttggtccgataagttccatcaacacctcgtctctctcggttagttgaattatcgaaaattgggtatcaccagagctaaaatttcgaaatgcctttcttaaatctcgatgctgattggtgattctttaggtcggccaaaagaaattgcttgtgtttgtgaatccgtttggcgggaagaaaacagcgagaaagatatttcaagaggaagtaaagccattgtttgaagatgcaaatattcaacttgagattcaaggtttctaatttctattatcttcttccaattctactgagggaaattaacaatcgga

SEQ ID NO: 9994 - DNA, 960 bp, Arabidopsis thaliana landsberg
cctatctattctcaatctctagttagagacaaaactcctcaacagaaacacaatcttggccatttctctatatcccagcacacctctaaaagactcgctgtctcttcttcgacaatgtcccctccgatttcatcttctccactctctcttccttcttcttcttcttcttctcaggccattcctccttctcgagcacctgcagtgactctaccgttgtctcgggtttggagagagatacaagggagcaataactgggaaaatctcattgaccctctaagccctattctccaacaagagatcactcgctacgggaacttactctccgcttcttacaaagggtttgatctaaaccctaactccaaacgttacttgagttgcaagtatggaaaaaagaacttgcttaaagaatccggaatccatgaccctgatggctaccaagtcaccaagtatatctacgccacaccagacatcaacctcaaccctatcaagaacgagcctaaccgtgcacgttggatcggttatgtagcggtttcttctgatgaatcggtgaaacgtttgggaaggagggatattgtggtgacatttcgtggcactgtgaccaaccatgagtggttagctaacctaaagagctctttgactccggctaggcttgatcctcataaccctcgtcctgatgtcaaggtcgaatccgggttcttaggtttatacacatccggtgagagcgagagcaaattcgggctagaaagctgccgtgagcagcttctctccgagatctcgaggcttatgaacaagcacaaaggcgaggaaataagcataacacttgcgggacatagtatggggagttctctagctcagcttctagcttacgacatagcggaactcggtatgaaccagacaagggacgaaaaacctgtttcggtgaccgtgttttccgtttgctgtcctagagtttggtaactt

SEQ ID NO: 9995 - DNA, 1525 bp, Arabidopsis thaliana landsberg
ctgcgaaagggtttatacgaaaatcgattcgaatggagtctttagacttatctgagatatagaatttcaagcaatgaattctcaaatggagaagggagtttatacctgggcgttgagttctaataaagctttctcggcttcttctttagatgagaatgtgacataagcaaacccttttggtctgcatctgattttgtccattataacatccactaaagcaaccaaaagttgaagaagacaatcagaatgaatgaaaatactgaaaaccttatgtacaagtgtatagactcttaactatctcaaactaactctgataaagataaagagatatgtaagtgaaggtgtagaactaaattgctgttgggattagagactgacctttgagaacttgaccatattgagaaaatgcttgggttaatgtttcttcagtgcttgagaaagatatgcctgcagcaaaaatcttcagttcagtgacagtaacacaagtcacacacagatcaaacaaagacacaaagcttttacatctaaagttcgaaacttttagattggtaagacactatgtggtagttaagtaaattcacacataccctattgttgtttctatcaaaataagaagaattggtacaatcacagcatacatacacaatagcttactctaaccaaattggcacagtcaaagtcacaacctttaagacctcaaaaaccaattgaggacatacccgattcaaggcattagaaatcaggaaatgggtagttagattcgtgaaagaaggattaagaatcagaaaagtcgcagataataacagaggaagagggagagagagagagagagagagagagagagagagagagagagagagacctttaacgaaaagcgtagaggagaaagatctggagaagaggagaggagtgaaggagcgataaaggaactgggtgagcatttcttttgaagccgtggctgttgccgcgatctcaccgccggcgaaatcacactctatgaactttattctcgctgttgttcttccgttccatttaccatataataaaccaaatttaagtccacgtcagcaattctaaccacaaccactgtaaaaacacaaaacatcatcgctccctgagagcaaaaccctaatcgtcgattctgctacattcttccggattctcagctgctgaaatctctggtgagtgttcccacactgtggtcaattttggttattgttttgtttcatttcttttgattaatttttagtttaaaaatgtcaaattgaatgctttttccgagaatttgagctaaattactgcaattttgtttcagttttcatgggcttctacagccatcacgtccttcctcattcttgccatcgatcaagctcttactttctcagttctcagtttcgatagattctcttcttttgtttagctgttccactctctgattttacttagcttgatccttcccaatgtgaaaatgtttctgttatgtttatctgaaatgtggactcatgaattttggaattgagcaaac

SEQ ID NO: 9996 - DNA, 1232 bp, Arabidopsis thaliana landsberg
aaatatatgtattcaaattgttttgttacttctttttgctacacttaaaatttgaatctagaatgttgtcctgaaacaaaaatctgtggattgaacaaaattataccccaggtaaaattttgaagtttttaaaagcaggatcacatactcctaattttagattggatagatctagtataaaaatatgaagtttttttcacaaaaaataataataccatttagctcttaattaaatgcatgcaaactaaagataaaaagaggaattattttaaccattctaactcgtcacaacatgcctaatcattccaggttaattttagagttttcaaatcgtcatattaacatgtgatcctgaagactcttctcttctttcttctaccattagctgaaatctttacttgtaccacaattaacctcaaaccctagcccctaaatccccctagaaatcaatccatcctcagttctccaaaaagatatctttggtttttcttcactgacaaaacccctaaaaatggccgactcattcgagctaattgtaacccgaaaagaacctgttctcgtctctccagcctccgaaactccaaaaggtctccattatctctcaaatctcgatcaaaacatcgccatcattgtcaaaacattctactacttcaaatcaaactcaagatccaacgaagaatcctatgaagtcatcaagaagtcactctccgaggtcctcgttcactactatcctgccgcagggagactcacgatcagtcctgaaggaaagatcgctgtggattgcaccggagaaggagttgtagtggtggaagctgaggccaattgtgggatagagaagataaagaaggctatatcggagattgatcaaccagagactcttgaaaagttggtttacgacgttcccggtgctcggaatattctcgagattcctccagtggttgttcaggtgaggggttgatcgattgatattatgttttgcttgctgttttgtgtgagtgaacgaacatgacctatactggatttggtccgatattggtttcaaataactatattatatagtagaattagattaatattgattttttaattatgcatgtacgtataaatacgctaattagtaagaaagaaaaagatccatactattattcactacaaaatacataaatttcataacttttaattcaaaagtatttatattggaacatatcctaattgacgtttttccaagattg

SEQ ID NO: 9997 - DNA, 861 bp, Arabidopsis thaliana landsberg
tctacttttgaagaaattaagatcccatcggcgtaataacccctctaaaacgtttcctgatgtgctactacgtccaaccacagtcactgttgcctttgtacgtgctgacaaatcaatgacatcatttttgttttgactcgttttaggcgaagcaccaggaacaaaaccatttacaggtcccggcagagaatctgatgttttagatggaacactggctacagaagataatcgtgcatcatggttacatggtgttggaccagaagcagaatctgtatcagaaagtgccagttctggttctgtagtagaagcagcagcattaccttcactggtctctgtattggtcctggaaggttcttttttctgatgagtttgttcaacctccatgtccttcagcgatttcatcaccgcttccatcagcatctgaggccaagaagatatgtgaataaacgaatttatagagcttggtcataaggagagttcaaagtgcaaaatccactttttttactctcaccctctcttcttcctctgcatttgatggaaaatctgccagctcatctacgtgaaactccacatattgatcatcatctaaagctactgcgagatgaggaggatatggatctccattcgacaaatcaaaactgatcatatcagaagatgaactactggagacttcaagactctctttttcctgaaataagtccatatcatgcaacatcaggaacaatctacccatctctacatttttgtttctcagacagtattttacatgtacagaagttggtcaccctgccactagcgtcactaaaaatgtttactgaatatacatcatataatatatacataaatcagagagcgtagtca

SEQ ID NO: 9998 - DNA, 2143 bp, Arabidopsis thaliana landsberg
ggtcgactctagaggatcccctgatcaagaattcaaagatactgtatgaattcaattctagatacacatggaaactaatccactttctttgtattatttgaaacacaatcatgaaataaaattgtagttgtgattgcggacgacgaatgcagcgaggtggtcctatggaaaagtaaggtctctgagcctcgtttattggggtctccgatttcttcgccgtcaagtatatcgtaccataggagaggtggtgaagttctcgacctctttttcgcacactaccacattgtgttttctcaactttacgtgattgtgcttattccttatcttttaacttgccgagcttccaaacaacactcattcaccatcatacatcatattatatattccgaatcaaaactcttaaccttttaaaaaattgtagtgaacggattcttccattttagatggttcaaactctgttcgacactcttgttcgtccatttcttcttgggttagccacgttacctttgacccttcacacatcagggcttatactgaatttaaaagcccttttcttttttaataatggccatattctctattattgggccttaaatatccttaactatgaaagggtatttaatatgaataatatataattttttcatatatatataacaacatgactaagatcaaggtagtttcgaactttgaaattgaaaacatttaaactttaaaacccttaccaagatattgaaatttgagttatatatgggtttgaataaccagtggtgaaagagattttttcataagtaaattaaatgcttaaagacgttaatggtaaattttaggaaaagaaaagaagaagacgttaatggtaacaaatcaagtcaatttaaaagttttacttataataataaatggataatgccaaaaaaataaaaataaattaaaattggactggttttggttaatcatattgaaaacgcccgctctctgttttttctcgtttctcctcccttcgttctcgggtccatctgcgttcgtatcaagtccttgcactcttcttcttcgtatctggattgtttcgaagttctctaacgaacgacaatggagagtttgatcgtgttgattaatacgatacaaagagcatgcaccgtagtcggcgatcatggcggcgatagcaacgctctatcttctctatgggaagctcttccttccgtcgccgtcgttggtggccaggttttgtctcaatcagataactctaacatagttttttctcttaagcttgtcttttaagggttttgttcttcttcttcttaatgagtgtagagttctggtaaatcttcggttctagagagtatcgtcgggagagattttcttcccagaggatccggtttgtgatcaaaaccaaagctttcaatttttttcgtaactaatttgtgattgattgttaaaacaatggaaggagaatctgatttttgtaggtattgttacgagacggcctttggttttacaacttcataagactgaaaatggaacagaggattacgcagagtttctccaccttaccaataaaaaattcaccaatttctgtatgtaaacaaacttatatatgaatgtgtctttttggctgtagtgagtcaatcatattgaaatggaatttgtgtcccagctttggttagaaaggagattgaggatgagactgatagaatcactgggaagaacaaacagatttcttcaattcctattcacctcagtattttctctcccaatggtaagctatcattgttgctatgatgctcttgtttccatccttttgtccaactaacatcagtttttgtttcttttgaaaacagttgtgaatcttactctcattgatttacctggtttgactaaagttgctattggtatgtgttgcttgactctacttcttttgggtctcctttggttcattacttgttaacattaccaatttgtattcagaaggacagccagaaactattgttgaggatattgaatccatggttcgctcatacgtcgaaaaggtgaggagtatagtaatgctagttctacactttttgtggtttggtgatgctgtgatattaatatgttacagtcactatttcttttaagttgaatagtaactttatgcttttttttg

SEQ ID NO: 9999 - DNA, 1517 bp, Arabidopsis thaliana landsberg
taatgtgattggtcagtcagtttactgtgaactttaactttttaacagtctgtttcttgtcaaatcaatttcaaatccccaaatggttaaattgtgtaaaaatttaaactttttgtctaatatacaattacttcaaatacagatttggttagagaaaaataaaatcctctgtttgagatttgttagttagaatgtgaaaatgttgtggttaggagacaaagtttacatgtttgagattttgctaggtgaagtatgaaattattgtagtaaatggtaagtttatgtagtataatgttatatattacatgatttttgcatttggattaatggttatggaagtttcatttgatgttgtgtgacttatgattttggtagcataaagagaagaaaaagatgggaaaaccaaagaagacatataatggaacatatggtagattgttggcttatgctgctcatgctttggctgaggtattatcctttccgctttcgacatttcgaattcttaaaccgaaaccgaaaagcctactgaccgagacattgtgtttgttaggggcaaaacaagcttgaaccaaaagagttgtggagagaaccaaaggaccaagctttggcttggaagccttgtgctgatcaacgttcctggaagcctagtggtctcttactcttactctctgtgagtttacttctcgtgctatgtaggtatttataagttatcctgattttgtttttttttatgtgtgtggagtttagatgggaaaaatggatatctaatggttactgcaaatggtggggtcaaccaacagagagttgctgtaagttgcgattgcgttacacattactttgtcatgtcccactctttatattgactaaccgttggattccgcggggacattattaaaacaggtttgtaacatcgttgttgttgcgcggatgctaaatgcgacactcgttgttcccaaattcatgttcagtgatgtctggaccgatgcaaggtaactattgtaaggtccctccgttctctgtctccttctcttataattgatgctttcttgaaaacatcaaaatttgacactcttgattggtacgtatatgtttcatagtcagtttggagatatctatcaggtggaacattttatcaagtatctctctcctgatatccggattgtaaagaaacttccaaaagagcttcagtcactagatcttgaggctataggcagcgtcgtaagtttcttataccgcttagtgagaaaaaccggtttcatcttcgtaatttttctaatgtagttctattttatgtcgtttttaaggttacggatatagatgtcatgaaagaagccaagcccgggttttatatgaagcacattcttcctcttctactcaaaaacagagtcgtccatttcttcggattcggaaaccgtttggccttcgacccgataccgtttgagttgcaggtaaaagactttcttttcaccgtgcttattgatatctaacctggattggatccaactttgttttgggga

SEQ ID NO: 10000 - DNA, 1545 bp, Arabidopsis thaliana landsberg
aaaaaatccgactttttgaatatttactagactaattttttgggtggactaggtttctctaaaattagtcaaacttgaaaatatagactagtttagtccgtataaaataagttctaatttgacatattgtatcgagtcatccaaaattatataaaaaattgtgtataaaaaatttaaaattttttttttaaaaaaaaaaagcaaaaaagttgacttatatggtaaatttttcttaaagattctaaaaatcattagtaaattttattattttaaaaatgttgacttaatgattatatttttaaataaaaaacataagatgaatttggctctttattagttcttcttttgatggttggtaagtgttaactgactaactgagaaacagagtgacgagagaattaaagagacacttgccagaagaacaaatctctcaagtgggacgggacccaccgcatgtccctttcttcattctccttcgtcttcgtcttcttcgtcttcgtcttcgtcttcacttccgccatgagaaaaacctgcacacacgcctgaaaaaccaaatcatcctcatcatcttctgatctaatgtctaccgacactatcccttccctctcatctccaccggcgccggagtttccttccaccacaccagacacggcgacgtcaccagctccgtctcagccatccatcatcggaccttcttcgttggctccgttcccggagacaacaacaaacattgatggaggctcgagaaatgtagcattaactggacttattactggagtagttctcggagctacgtttgtcctactcggagtttgtatctttgtctgtttctataaaagaaagaagaggaagttaaagaagaagaagaaagaagatatcgaagcttctattaacagagactcactagatcccaaaggtactttatttagggtttctttatttccaaagactcaatcttttttaatgattattcaattcctctgtttttgtagataatagcaataatcttcagcaatggagttcatcagagattggacaaaacttgtttacatatgaagatttgtctaaagcaactagtaacttctccaacactaaccttcttggacaaggtgggtttggttatgttcatagaggagttcttgttgatggaactttggttgctattaagcagcttaaatctggaagtggacaaggtgaacgagagtttcaagctgagatacagactattagtagagttcatcataggcatcttgtttctcttcttggttattgtatcactggtgctcaaagattgcttgtttatgagtttgtgcctaataagactctcgaatttcatttacacggtgagttttttttaaaagacttgttttcagttatgcttgcgtgaattcccgcagttttgtttgaattatggtggttgttttgtagagaaagagagaccggtaatggagtggtcaaagaggatgaagattgctttgggtgcagctaaaggattggcatacttacatgaagattgtgagtataatgttcttgtctttgagtatt

SEQ ID NO: 10001 - DNA, 519 bp, Arabidopsis thaliana landsberg
  unsure (1)..(519): unsure at all n locations
catacaagggaaaacatgataaaaacgtgcaacatgaaatagagctcgcttctatggtcacacgagaaaaagaaatgccgagatcaaagctacgattgagatgttatcgcgtctacgttatagaatatgaactagaacatttaattcaacatacttgtattaaccgacatttatcaaacgtaaattgaagctattgcctatttttaaattaatctactacgctaacagctctcggttaaataagtaatttaaataatatgagcgactctaaacaagacgaattaatggcgcaagacaaagtacgcgacgtacgtaacagcgtgacagcacgcgcacaacacatgcgaacgatgcgcggacaaacgcgacacacaagaactattaaatagatgaagcgtttatactaaacaattattaataaaagaatattcagctaatgttatccatgttgatatttctttataaaagcgcaagatgaanacctacagtcgatttaattcgaacgttcatttaataatc

SEQ ID NO: 10002 - DNA, 2047 bp, Arabidopsis thaliana landsberg
aaaataaaaaaaaaaagcagaccactgtggtctgtctgtactgtattactctttgcactcgaacccatttatctttttaatattattttttattattataaatctaaaaaagttttttttttttttttttttgttctcgaagcagtaaaatctactacaacagtcaaagagagagagcaaacatgctcgcttaattcacggaatcgagacgtttctacaaactcaattttatattttcagctggaatccgaactctgatatagaaagcacacaacgttcacctccagtgacttctctctatctctaaatctctcttgcgtcacttaaaaagtcggtgcttcctacttaagtgttcttgagagtgagacgtttcatttctgggttcaagggtgtagaataaacacttgagtgaagtttaaagcttgagaaagacagaggaaagaaaaatgggtcaaagactgaatctagtcttctggatttttgtctccattcttgcctttttgagtatgtctttacactcaaatcctcttttgggtctgcatttacctttgattctctcttctatgtttcactatctcttaaatttgtcttcttgatgttaaagttcgatgctttactttttgtcctgggttaatctctgtttcactgtagtagttcttgtctgaaaatctcgaatctgttagctttgaactacttttaggtgtttggaatcgacatttgagattcaaaagcagccatttttgagacttgttttgtggatttgttgcagattttggtatggctagcaagattgggatatgttatggaagaaatgctgataatcttccaagtcctaacagagtctctgagctaatccaacatctcaacatcaaatttgttcgaatctatgacgccaacattgatgttcttaaagcttttgcaaacactggaatcgagcttatgattggtgtccctaacgctgatctacttgcatttgctcagtttcaatccaatgtagatacttggcttagcaacaacatccttccttattatccatctaccaaaatcacttcgatttcagttggtcttgaagtaactgaagcaccagacaatgccactggtctagtcttacctgcgatgcgaaacattcacacagctcttaagaagtctggtttggataaaaagatcaagatctcgagctcacattcccttgctatcttgtcacgctccttcccgccttcgtcagcttctttcagcaagaagcattcagcgttcttgaaaccaatgcttgagttcttggttgagaatgagtctccctttatgatagacctgtatccgtattatgcttacagagattccactgaaaaagttccgttggagtatgctctattcgagtcatcttcgcaggttgttgatcctgccacgggtttgctttactccaacatgtttgatgctcagcttgacgctatctatttcgctttgactgctatgagctttaagaccgttaaggttatggtcactgagtccgggtggccgagtaaaggctcgcctaaagagacagctgcaactcctgagaacgctctggcttacaataccaacctcatccgccatgtcattggtgatccaggtaatctttttatgatcattagatacaaagatagatggaagcattttatgaactgatttgttttctattggttaggtactcctgcaaagcctggagaagagatagatgtgtacttattctcgttgttcaatgagaaccggaagcctgggatagaatccgagagaaactggggaatgttctacgcgaacggaactaatgtttacgctttagacttcactggggaaaacactacgcctgtttctccaacaaattcaaccacaggtaccagtccaagtccaagttcaagtccaattatcaacggtaactcgacagtaaccatcggaggaggaggaggaggaggaggaaccaagaaatggtgtattgcttcttcacaagcttcggtaacggaactgcagactgcattggactgggcttgtggtcctggaaatgttgattgttcag

SEQ ID NO: 10003 - DNA, 1582 bp, Arabidopsis thaliana landsberg
taagcatattaaatgactggtaaaacgcacaaaccattattttgttcttcaaaccgacatagattgtttttcttcacatgtcagtttaaaatcatataaacgaacacaaaattgagcattataaacggctctgtagaaatcacatatcttgtttgatcaaactggcagacagattcagcatctttgctgtgtttatttgttacaacgcctttcaatcagttatatataccaaacaaagtcgaacaagttcaaaaaatcaaaaatcacaacaacaaaaaaaatgtcagaacaagtttttgtttgttaatcatggtgagcaatctctgatttttccttggggttctgattttgttgagaggagccttttcctagcaaggagttcaactgaatagacggtcttggactagtagcatcatgactggtacctacttgtgttgcgcctttcttcactccccttttagccatttttgcccatccaacaagatgttcctgtgtctgctcgttgaatattgcacctttgaatgaacttcccatcttttcaccaaaaaattagaaggtttggttttgagtttgtgtcttggtctagtttgatataagaacacaagaaaattgactaagagatgtagaatctgtacctgagttacgagtgcatagagcggtaaggtactgtaactgcagagaagctgaattattaccctgcaaaaatatttcacatttcaagatcaagaagctcataacaagatcgatattaagtagctttggctattattacccgatgacgagtcttggaattacgaacttgacatgatccatgatgcatgaatcccaaccaaattgaaactgttgttacaattgcatgagttttcacttttctctgtacgtatcttgatatcttctagattattggtttagatcgattaatggtaaagagtacttacaaggataaagaagaagtaggcgatttcgaaggagttttggaaaagaatgaaatggatcaagaagagaactagccggggactttgaaaccagaacaaatcatctgatggtcggacaaccaaatctccttccacagcaatgtgtttctctgcaacttcatgagccaaatctgtgatgatatgctctaacttcgtccccacggcaagtaaaagctgaggagaaaaccgcgtaaaaagagttgatttagataggtttgaagcatagacatgctttgagaaggttttcagggacttacgatcaaaggaataaaagctagccagaagtaaacatgccatgctgcaagaaatatcgagtcgatgatcattcaaccgaaaaaagaaagaagagaagaaaactttgtattggatcaaagttaaaagatgtcatctcagtatctcaccaacaatgtttataagcaagaagagaaccacaaatacccaaaggtaccaactgcaatttgatatatacattagaatagaatcaagaacactatgttgcattggtttttggaaaaactataaattatttacctgataccgacgacttttttgaaattagaattaagggcacgcattaaatacttaaggaaaatggatttttgggttgg

SEQ ID NO: 10004 - DNA, 1662 bp, Arabidopsis thaliana landsberg
  unsure (1)..(1662): unsure at all n locations
tcacaacaaaaaacattgcagacaaaagatttctcttcatttttcaatatatgtacatatgcgaaaacattaaacacgagtgtgggaagttcattgtaaagagatcataccaggtgcattttcgcatatatcacagcatggggcattgcttggttcagctaaaccaacacgtacatgccgactagctagcttgttgcacatatgaacctgaaagaagaaaacattacaaagctttgaagtaatccatttccgatcaaaatccgaaaactactaagagctattgcagtagagaaggatgaaccaatgactcgagaaggactataaagtgttacccttaagagtcatctaactgaagtaaggattaagcgcaaagagcagaaaattgattattttcttctccagaagttaatactactaaatgcaaactctggagacaaaacgttccctgcaatgtacatgacagagtagaatcattgaaaccgcagcaacaaacactcatgtaatcaaacatgtaaattcatcaaccgaaccatcttaatccaccaaatgagagaagaggtttcaactatttgaactcttttgacggattcactacacttcgaaatatctaatctcatgtgaagagcctaagaatctagaaaccaaatctcaaaaatcttatttctttagctcaaagttatcgaaaagccacatcaactcaggtccaaatcaactgagaattcccagacagagataacaaagacttgatctttgacgaacccatcagagcacaaccaatagatagagaggagagttaaagaaacaaaggaagcttttttgggagagaagttactttttcatcgcaggggcgacaaagggcagcttcatcggcggcgcaaaagatgattgcggctgcgttctcgcaagcatcgcacaaaatccgcatcttgctttttcaatcttataagtctttttctcactctattgggaacaatgaatctcacctccaagacaaaatctttagccagaactcagattgcgattgaaagagatgagaagtagaaataataagtagaaaactctgattaattaaggacgaagtagattaagggttaggattacgcgttggttatcaaggaagaagaagatgaagaagaaagaaagaaagaaattatttaagattataaaaatcgctcctttaaaatctttttctacgatggaggagaagcttgagagaccagaagagacgacgaccaaatccacgcgccgagagtatcaaataagcctactttgctgtgacaaggcaaaatctgttaattactactttgagtaaatttctccaatcaattacttttttctttaattgtgtttttgactaacgaaaattaagattaaagtaaatgtgtgtagtatgatttaggagaaaatattgggaagaccaaatcttttatagtggatatggttttgagttataagattgtttaaagtccattatatcagagaccattatcagacaaaaagaaaaatgatatcgactaaaaagtgaagacgaaagactcaatgccatctgngaggtcattgatgtgtctccctgaaacacattcgttgtcttgtttcctttgttttggtgaataagtttttcttgtcacaatctttatatgatttcttggatcctatatctga

SEQ ID NO: 10005 - DNA, 655 bp, Arabidopsis thaliana landsberg
acactaattcacttacgatagctttagtggcatcccaagaaaagtaagtggtgaagaagcatggttcgttcccttcattgattttgtagattgggactttaggatgcaagccttccaaggatccagcaagatctatgtatttctgctcataaactgtctcaatgaacaaacagtacaagaaaagaaaaagaagcaaaacaagaagcaaaattgataaggaaatagttacttggccaatctcaaatacagtttgcttttccttaggctccacacattgaccaacccagacaaaaacttcagcatgggtgtctaggaaatatatatcctcagtcaagaggtcatcttgagcaaagttgtaaatctcctcaacctgttgcagagcatattgttaagaagggtagaatatgcagaacagcatctcgagtaatgaaagttgtataatctcacctgaaactttcctgcggggatccaggcagacgcatataaaagaaaaatgatacagttagaaggatacaggacattctcaacttctcagtatatatttgtaagaaatcacaattattatcctattaaacattcacctctgttgaaagcaaatgagaataagtgaggatccctgatcgtctcagaggaagccttcttgctggtgaaattc

SEQ ID NO: 10006 - DNA, 435 bp, Arabidopsis thaliana landsberg
gagattggccaagtaatatgcctcatcagttttgcttctcagcatagtgattcctccttttctctcttgtttgctcattgtacagttttgcgcagagatacataaatctggctggttcgctggaaggcttgtctccaaaagttccattatacaaaatcactgagggaaatgaaccgtgcttcttcaccacttatttttcatgggattctactaaagctactgtaaggttttctgttcgcagatatcttttggtttattagtatgagaagggggtccctttttttttagggtggtagttaatgtgattgtgttagagagggtttgggaacatactcatttaaaagcaatcttgtatgcaaataccaattctgttttcagcacccttatatagaatgcagttagtgatcacatctcttttgttaaaatgacctgtag

SEQ ID NO: 10007 - DNA, 488 bp, Arabidopsis thaliana landsberg
  unsure (1)..(488): unsure at all n locations
cagtttgacttttcagcctgatctttgtggaccttcgtttcaattagctcaaccgaaggtgccttcggcattatagctggctcttcagtcctctgatgggaggaatagcttctcttatttcagcagctgaagaggcctccccaccaaactcgggcaaacagtcggttcaatgtaacgcggccggtgggtaagaaccttcatctttttgcccgcagccttcggcacaggctcagctggggaggccaaagcagcagcttttctcttcttcccctatccccgcagcgagtagtagtagtcggggtagacaaagccgatggcgtcaaaaactctgttcattctctttttttcccaaccaccgnnnnnnnnnnnnnnnnnnnnnnnnnnnnnnnnnnnnnnnnnnnnnnnnnnnnnnnnnnnnnnnnnnnnnnnnnatttcagccagtcatcngttggttcatcgaatntatctccaaacctgaatgtatact

SEQ ID NO: 10008 - DNA, 502 bp, Arabidopsis thaliana landsberg
tttcttttattacaagaagaaaatgtaaacgtccaaatcaagcttaatgcatgaacattatataaaaaaatctgaatggattgtagatacagatgaaaaccgttttgcattttacatgtattaggactactgatttgacatatgaaaatactattgtccaaaagtcattgataaatattgtattaatctaatatgagaatgataatatgaaaacaataaaatagaataaacaaatttactttttaacaacaataatcaagaaatatcaatcttgtaatgttatttaatcaaaatacatttagtacaattatttaaaaatatgatttcaaatattatgataattagtaggatttggtattataagatagtcaaagattctgtttcaatatatttttgtgattcttttctttactggaaacaatgaatataggttattgaatgatctaagcatcatagagttaatctaaaaaaatggtttcataaatctcatgcttttgcatag

SEQ ID NO: 10009 - DNA, 1672 bp, Arabidopsis thaliana landsberg
gagagtcagaagaaagaaccagaggccgcgatgatagctgctgaggaagctgaaaagagactagagcctgttataagagaagtgaaggaggcgaaatccgctgaagagaaagtccgcgaagagatgaagatgatatctcagaagcaagagagcaagaaacaagatgaagaatcatctggttcaaagataaaaatcacaattcaagagtttgaatctttgaaacgaggagcaggggaaacagaggctgcaatcgaaaagaagttggcaactatagcagctgagcttgaagagatcaacaaacgaagagccgaagcggataataagttagaagcgaacctgaaagcgatagaggagatgaagcaagcaacggaattggctcagaagtcagcagaatctgcagaagctgcaaagagaatggtggaaagtgagttgcagagatggcgtcaacaagaaaatgtacaacttgcttagtgatgatttcattttgtataaaaccttgtttttttttccaaacattcaaagataaaaaaaaaaagacaatgaaaccttgacggcttttatttaacacaacaacaaagaacaatacaacaacacacagacaggtcaatcatttgttcaaggaattattcatgatcttcaagattccaataactgagaaggaagactactaatcagcttctgtctcaagaaatcctcataagcctcaactatgagatgatcatcgtcccacttatcacggaaagtgtctgattgtgtagcaagtctgtagtatccgccatttatttcctgatatctccattgttcaccgggcggtgcaccaatttgctctgctatccaattaaggtaatcaacctgacctccaccaagtcgatgtgtgtatctcttaggttgcccgaaagcctcacgctttgcatagtaggcggtaacgtcttccatcattttctcttctgaaggaagtgtgacccggccagacaaagctgcagccacccacttgctttggagctcaaacataaagaattgcagtgtctgatatcatatataaaaatatgattagacgatgaaaaaatccgaaaaagccaaccaaagtaaagattgaatgagagacttaaccatccagggtaaaccgatgaaggaaagcccgggagcaagcgcaggcggaaagacatgttcgtaaagcggtccaacacagttatcctcaacagtaatatagccattggtgttgagaaatgggaagtgatatttgtaaccagtgcaatgcacaatggtatcagcttgtacaaccttaccgttctgaaaaacaatcgtcccatcttcgtgtacactttctatctgcaaaaattgaatcagtgaccatctagtatgaccaaaatctctcaatttgttaattgttatttaccatagagtgaagccatagattgtttgacccgggaagttttgagtatgtcttagatggattccatctagacgcgatatggacttctttagccactcccgttatgtccctgctgatatcagctccactcgcaaaatttcctatcactaccaccaccttccataaattgttcagaccaacaatgtcagataactgaatctatctaatatttctatagatttcaaactcaacagaacaacatacttgaattactcataccattgcatatacctaaacacc

SEQ ID NO: 10010 - DNA, 1130 bp, Arabidopsis thaliana landsberg
attgttttgttatcagcccgaaaactttgaggtcctagatcaatgattcctttcgcttgtcgcatggtcacctttgcttagcgcgatcctccaccaaaaacacgtcaaattctattctagcagattaatgattgtagtcaaatcacatcgtcgtaggtaaaattatgagatgctgtctgtccaagcctcgacaacgaggacacactcttcaattggataaagcaaaaacactaaaaaaatatctcactgaaagagggagaatacgaaatagatatgagaaagagcgtatatacaaccacgatatataatctcaaagagcattcatctctatcacacttttacaacataatctgaaagaaacgagacaactttccgacaattcatcaagtcctcctttccttcgttcctagatctctcattttccaagtcgcatcatggagtgttataatccacttggcatgtaacatttcctctttaaaagtcttccacaaaacaacatagttggtagtagactctttttttccggtaaacatgttaagatgttttagactattttgatagtcccataactacgatctccacatttctcctataaatctgattctcatctagtcatgttggccaattttgatagaatgtaaaatcattttttctttttttgtcaacgagaaatgtaatttaaaagtgactaacataaaagattaggaacgaaacgtccttgatttctactaatctgacaacaataatacatcaaattgtcggtaagacataaaatgagcaattatttcacttcaattatcacaagctgaaggcacaccagggtaaaccagaaacataaaccaaaagaaaaccgatgatctcgaaccaaaccaaacctgttttcttaattctggaaagtccagtcccaaatctcgtgacgctcgacaccacgacccatcgaaccagcaaaaccggtatacattacctcgtgtatgaccttggaaagatcgaattttgcttcaatcaatggccggttcggtttcttcaaatgcgctaaaccaatcgtaacagagactactttataattgttgttgtactcaatccaagccttgtatctatctccactacttagcttcaaatccttaaataac

SEQ ID NO: 10011 - DNA, 2075 bp, Arabidopsis thaliana landsberg
ggaacgattgtggtaattatgcttaaaaagcggtcacttgtcttggttctcgaggatagaaatcaagtttgttcaatcggaagcgaaaataccaaacatcttgccggtagagatcatgcattaattccattgcccataacagataatcaaattctgcatggagcgacaataaaatccgacggctacttctgagaccttgatgaagaactaagttttgtttcactagaacccaactatatccgctcagagccatcttcatgccaaggcgcattaaacagagatcaagatagggggatctagattaaacgttggaggtgtgacagaaattatggactcttcttttagggaagcttgtttccaagctgcaagatgttcaacgctcacaaatatgttagcatatgatatgattaggtttttgaattctatatttttatatgtcgcaagcgcactacaattaataaatcttcttagggtagaatttcaatccataagcaggctactaattataccatgaatactaccattttcccctcttttttttatttatgataaggtttctacgttagtaactcttatatatatgttttgactgttacacacttgtggaatcatgatggctggattggtgattcgaccattttgacattgaaaaccggtctccctccaattaccttgaagcgttatgcaacaagtgtaaatgtctgctttcgaatggttttagcagtccatgaggctaatcgacccaacccaactcatagactatagagttacatcatttccgttgcatgtctcttgtgacacaaagaactaaacaagataagagagaattagagaagctataaaacttaaaatcactacatgtcacatttatcatttactatggtgaatatttttaccgttcaatttaaagaaatccaacaatatgcttaaaataatttttttgattaatgtttccaaattctatatgttcttttaatcatatggtaattgattattttcgaccattctgataaagtttggagtacactgtattttttttttaaaatagaagaaatgtatatataaattaactaagaatatattaagttttattgttttaataaagtagtttcattgctgcatgcactctgccatttacataaaatgcaagccttgtaatttacttttcttcattaattgtttaagatttgttttcaattttaattttgttaagaaaacaaatcttaatacgtttttttattttgctggctctgaggcaacaaactttttttacaattacttcttcgtcatccccacttaatctggccttaccgtttttatttggcttcccgggttatgcataagaagatgtcaagtaggtgagaggttggtgtgcgtagggaatttgcaattaacacgtgtttattttaactctcttcaattttaaatggtgagagtagacgtagcaaactagtctaatcgcgaactaaaccgctttatattttttgaacgaaatagaaattgttgtagttttctataaattattttttaataatctccaaatagagcaacgtatccacttatatatataaccttatctctttttttatttgagaaaaaaaaagtacactgtgataatttgaactcatatatatacacactagttgtgtgtgcttgtcttaagaaaaaacaatgggatcaatgactcagaaatcggttttgatgttatgcggagagttcatggaagcctacgagactatagtacctctctacgtcctccaagcgtttggtgttagcgtccactgcgtttctcctggtcgcaaaactggcgacaagtgcgtcatggccgctcacgatctccttggcctcgaggcatttctcgaatctttcactttttcttcatttcagtttttttcccttgcaatcgttctttgcatatttagtaaaacaatgcgatcaaatgctcataattgggtggactttcccctttattatctttattcaaaaagtttaaataattgggtgggtctaacccaaaatgcatgggcctactctttacagtaaaaaagaagaggttcaatttggactttataccc

SEQ ID NO: 10012 - DNA, 1577 bp, Arabidopsis thaliana landsberg
catttcagtctgtgcttgaatcttctaattaaggttcacaagtttgattatcaccaccataattcgtgtacaataataattagtactaaacacgttttaatattctatatgaattataaacccccaataagtctatacaaatagaaataagaaaaccaaaacaaaagagttcgaacataatccaaaagaaagaagaagatgataatcacaccatagtcaaaagaaaagaggacataatcagtgaattcacttcacaggtttgcggacgagccttgaagaaggccatctctaatctgagaagccacatcacgaaccgctcctggtccatgaggtatgaacacggcagacgacttggagctagcaccaatctccttcatcgtgtcaaagtactgtgtaactagcaccatgtccatcacatctttagcagttgtcccagggacattcacagcgaaacccaaaacactgtcgcgtaatccatcgacaatcgcctgcctctgacgggcgataccaagaccagagaggtacttggactcagcttcaccttcagctctcttaatctgtaggattttctctgcctctgccttttcgtttgcagccaatctcatccttgcagctataaacaagaagccgaaactcagactcgatgatttacaagtacaagaacatataactgatgggaagttttgttagttaccagcgttgatttcgttcatggcccgtttgacatgttcatcaggctcgatatcaacaatgagagtttgcacaatctcataaccgtaagccgacattgcctaaacaagtaacagagatacaaattgaacactcataacttaacacaagcagaaagagaacaaaacaaacaaaaagattctaccttctcgagctcctcttcaacagctttcgcaatatcattcttctgctcaaagacatcatcaagaagcaacttcgggacactcgctctaataactggaaaacaaacaaaaactccgaatgatcaatattttgcacacatcaattcattatttagaacatatttttgtttatttaacaatgagacttaccatcaaacacataagcttgaatctgaccccttgtgttactgagcttgtagtacgcatcatttgccttattagctaaagcacggtactgaatcgatgcaacaacattaacaaacacattgtcctgcaaaaacacaaaaccaaagaagattaaaactaagattaaaactaatcaaaacataatttctgataaagagagtgttaatagatgattctaaaaccttagtctttgtctcgcaacgaacgtccaattgctgaacccttagagagaggtaaccagcaacttgactaccaagacaccatggaagaaaatggcaaccaggctcaagaacatcttcgaatttcccgaatgtttcctttatcgctaccgttgattgatccacttgcacacaacaaaacaaattccccatctttcttctcttcacaacctaatcccatcaacaacaacaacaacaaaaaatcaaattttttattgagaaaattctgaagatcatgagcataagaacaaatactgaactc

SEQ ID NO: 10013 - DNA, 1283 bp, Arabidopsis thaliana landsberg
ccctgatttatgcttttagtacacctacatctttattgtctttcttgaattttgtgaactcataaaaccttaaaaatagtttcttaaaaagctaaggcagaagaggaatgtctagcagattatttcggaatagagacgttgttttgtttaaatatattccgaagatagatacagctaaaatttattccatgcctaaagaaatctgttgacatgaaataatgaaagctaatgttaatatctacatctccaacttcacttaaaagtgtttaatatttcacatttatatcttacacccttttttttgttaaagcacatttatatcttacataaggttggattattatttttgtaacatgttccgcatgtgttaaaattatttagttcacttttaaataacaacataacatttaatgtttaatgaaataatttttggaaaatattacataagctataaattttaaaaaataattttttttataaatgcttaatgttgataataagtttggctttaaatgtcgatgaaaaaatgatttgactactattcataaacatatgtatattttttcatatctcttaaacatatacacttaaaccaatcttactttttgatttttgatcaaaaacaaccaatattactttaagactgacatctttgttgtatccgtgatctgaaaaacgttttatcatggatgcacatgtggggacacggctcacaatacagaaagggaccagaatccttaagaggaacccaaccaacaggaatgctaagactaccatgtttctgctgtgcacccggttgcaagaacaacattgaccacccacgagccaagcctcttaaggactttcgaaccctccaaacacattacaaacgtaaacatgggtctaaaccatttgcttgtcgtatgtgtggtaaggcctttgcagtgaaaggagattggagaacgcatgagaagaattgtggaaagctttggtattgctcttgtggctcggattttaagcacaagaggtcgcttaaggaccatgtcaaggcctttggaaatggtcatgttccttgtgggattgatagttttggaggagatcatgaggactactatgatgctgcttctgatatcgagcaataagatgatagcaacaacaatgagtgttaattaggggttttgtttatttttcctctcatgcattagttgattgtatgcacgtgttctttagttttgttcttcggataattgttttattttgttttgagctgttttttttttaattactgagaagttataaacatc

SEQ ID NO: 10014 - DNA, 1346 bp, Arabidopsis thaliana landsberg
aggtcatggtcatagtctataccggtttttgtgactgtgttcacagcttcgtatggtgcattcatcatctatctcattgctcgtggcatgatcactttcactccttggcgatttaaagcggagtctagtcattgagagtgggccaaacaaaatagtgtagtagctatgtcttgtaatccttaggatcatgagttctagctttctcttttgtattatatgtgttgttgttataaagcagctctagttttgttgaagaaggctcttctatgtatcagtagataggtcctggagataataattaataagatctttcatcatttgctaatgatgtttgttgtaatggatttaacttaataataataactagttttgtcccaaaaacaaaaaaaaaacttaataactagattatagcctatgctattaatgttttttttttaaattcgaaactataatatatttaaaagaaaaaaaaaacagcttcacgatgtataacacaatatatgataacacatctcaaatttagagatctatagccaacaacatgaactatcttaatcgattataaaattttattcaatagatttattcaagaacataagatataaaattgtagttaaacctagatgattaatacattattggctctcatagggggctctccactctcatagagggatccccggggatccatttatactctaagttaggtgttgctttaccatgtgtgaagtaaataccatcttctctagcatccaaaagttctttttaccgtagtgaactatcagacctccacctttatatgccctaaatcttgcataaaagttgtaattataataactacttccttgctttaactcacaatcaaatatagttttcaagacactatcatgaaaactgaatgcgtaagtttgtccatgtctcaggtaaacgtagtcggtgtcgtcgtgttctgatgtacaatgaatcctgagaagttttttcggaccaagagaactcttaaaaattatgaagtttttttcgttgaacttcgcattattcaatcctgcacataatataataacaaggaaaaaataagaaaaacaattcattgtgaacttttttttaagatttatttgttctttagttttaggggtgatatatatataaagataaaagatgcttatttatacaaagtgttttgctcatgctttaattttcttcctgttttggcatcttattaaaggaatattttgtttcaataatatttggtgctgttctggaaaaaagctcattcaacgttcaacttttacatttaagggacatactggattagtaatttgggatgatttattccataaaaacaatct

SEQ ID NO: 10015 - DNA, 621 bp, Arabidopsis thaliana landsberg
gacactgttcacagcttcttatggtgcattcatcctctacctcattgctcgtggcatcactttcactccttggccgttcaaagcggagtctagtcattgagactggaccaaacaagacagtgtaagcgtagtagctatgtcttgtaatccttaggatcatgagttcttagctttctctcttgtattatatgtgttgttgttataaagcagctctggttttgttgaagaaggctcttctatgtatcagtagttaggtcccagagacgagaattaataagaatatgttcacatctaaaccaatgttgacacagatcaaaagaaactttggggaacattcccaaaagtgtacatttaatcgtccgatcagagtttcacagtttcaaggattctcaaatactttaaagtacatattgtggatatagtcagggcaaattcgatacacaaggtaaaatgatggaaccaaaatttccatagataaacacaaaatctacttgttctaatatggtatattattaagggctttgcccgatctattacattggcatctatgtttttgttaatgtattttgggaagtgcagttttgctcatcttggcattcattgcctctttgtcttcctctt

SEQ ID NO: 10016 - DNA, 622 bp, Arabidopsis thaliana landsberg
ggagtacaaaggtctccgtctcctctctatcgctattctcgacatggtataattatatactctgtttgatttggattgaattagttctgttttattccgagttaaaaccttcaaatacatgtgtgttgacttggtttcttgagttactaaaaaagctaaacgcaacactagtatctgcggctgcaaacgcggcggtgttcgtggcagagctagggaagaacgggaacaagcacgccaagtggaacaaagtctgcgacaggtttgccacttactgtgatcacggcgcaggagcaatcatcgcagcattcgccggagtcattctaatgctcctggtgtccgccgtctctatttcccgcctcttaatcaattctaaaaacttctccaccaccgccaccacaacctccgtcgtctaaaacatcgtggccaaaaattcagcaacatgtgtgtgaccattttatagatgttgtggcttactttgtgtgtttgtctctcaagtcactagcaaattgtgtaatgcactcctttgttctatcactttcacatttgtatacaagttttcatttctctcttatctttttatataattctaaaatgacaaaaaaaaaatcacaaagtatatagt

SEQ ID NO: 10017 - DNA, 1140 bp, Arabidopsis thaliana landsberg
cactctcaggcaaagccacaaagccatcttaaaaaagaaaacagatatgtttttcctgtgtgtcttaagtccgcgctcttccgatattagtgaacaaaaatctgagatcttgcaagctaaggtaaacctttctaactttcagtgttgatgagccaagaaaatgttaaaagttactgacatatatttcaaatttaaccaaactggtatattgtattacagtggatgccgatccaagagtatgtagaccaaccatggaacaagaagaacgagatgttcaagttcatggctaacatttgccaaaagaagtgtgaggaagaatacttgggattcgccattgtgccaactaccacatcatctggtaaagagagctttatctactgcaatgcggatcatgccaagcgccttaaagtatcgcgtgaccaagcctctgcttctctctgaaaacattctcatctgattctgtttgatctcggcatgtgtgtgtccagtgtgtacaaaacaggaaactttcttctatattattccgattctacaaaattgcgtctaaatatttaagtttataccatctctatgagccactgtaaaacttgccatcgacttctagtctatttccagtgatggtttgattctcccaacgcttacgtgctttttaaagatatgaggcttaagagtgttaccatacacttggtttattcttccaaaatatcttctcgtaaccggttttaagttctcagctgtatcgtctcttgaccatttactacactggtaaatggtgtgaatccaagaaagtgttaatgccattaaaaaggttcacattactttgtatatgtacaccaatttttgcgactcgtttgtactgtgtgcctaacgtgaaaaagataaggcatatatgggctttagccccaaaaaaactttataggccccatattaaaattatagtgtatttatttttccagaaatagaaaatttattgtaacatggaaacatcaaaatttaaaatggaatagttgctaaaaatacttgggttcacccttcacccccttatattcacctcttctatttgaaccaattaaaatctgacatttaacactaataaaaagaatttaattttattataaaatctaatttgccactaaaacc

SEQ ID NO: 10018 - DNA, 1121 bp, Arabidopsis thaliana landsberg
tttgggttttcttgtttttcttataacacaagtttacaaaggaaaatcgtaaatgtatgtacactcaaatgactagcaacttcctgtggaatccgttgttaaagaagatcaatagcttacttgaaaactaaacgtcaactcatcagcttccaccaagaactctcttgaggtcattcttctgttctgacgttagccttgacgggaacaagatttcaaaggtaactctaaggtctcctctcttcaaagggtctttagtaggcattccctcattcgggatcacaatctcctgacccggttttacgatatccagcaccgggatagttaggctcctcccgtctagagtcgttacgctaatggtgagaccggttaaagcatctataagagagactttcttctcgagaatcagatcgttaccgtctctcttgaataccgaatgcggtttctcgtcaaccacgaatataagatccgcaggagtgacaccaggttcttggttgcctttctctggaaaagtgatctttgtgcctttcttccaacctggttttatgtctatcttcaatatctcttggactgtctttggctttctgtaacacagattttatcagaaggtcataatcaaagctcattttgtttcaccagaagctcaatcacagagaaaacaacagttctagagaacctaatagctacaaaatcttattgtgaagatcatatgggcaaatggcataacctaatcattcactataatcaaaggaataaattgaccaatggcattcacgagatcaggatcatgagaaactaacccaaaatcatcaggaacaacgcgagaaattcgcatcttcttctttgcacctttgtagagctcctccaatgtgcaagccaatttactctcaatagccggagccttcctattcgccggcggcgtcgtttttttgttcgtcggcggcgtctttctattagcctggctccctgcttctgcacttttaaatctccgaccgccaccatcaccgccatctccacgtgtccttccgctactccctccgccaaaagcatcaccggattcgccgaaaaactcagcaaagatatcttcagcatcacgcggataataccgaaactcagagttgcta

SEQ ID NO: 10019 - DNA, 779 bp, Arabidopsis thaliana landsberg
cgtgtctcaatcctcgcccgatccggatcaaagctcgaggaggctaagaaatcgatccagctcgccactggtgtcgaagtcgccacattctctgcagacgttcgcgattacgatgcagtctcgaaggcgatagatgaatcgggaccgatcgatgtgttgattgttaaccaaggtgtgtttacggcgaaggagctggtgaaacatagtcctgaagatgtcaaattcacgattgacgtaaatcttgttgggagcttcaatgtgattaaagccgctttgcctgccatgaaagcaaggaaagatcgtggacctgcttccatcagtctcgtctcctctcaagctggtcaggttcgtctctcaaatttcccatctttatggatttaagttttatctggagattgtagttacctgaagtaagacattgacaatttatcacttgaagtaacttttgtgtaagtgcaataatgtgacctcatgtaatgcagttttaaagatagaatgatgaaggatgttttttttttataaaattttcaggttggtgtctatggttatgctgcatattcagcaagcaagtttggtcttcagggtttagcgcaagctttgcaacaggaagttatatctgatgatattcatgtcactcttatttttcctcctgacactaatacacccggctttgaagaaggtaaaaaagcttcagtacttttcagattcatcatggatgtatagagcagataatctaagtttaacatgtgagggtagctaggattaggtactgctactaa

SEQ ID NO: 10020 - DNA, 881 bp, Arabidopsis thaliana landsberg
gtcgagtctaaaggtgttttttttgttctattcctgactcttgagtagtgatttatggggaggaaattacgtctaatatacatgtgttcttactggatgattaccttgtgtgttgaagatatagtctctatggattcttgcttttcttactggataatgaccttgtgttgaatatacatgtgttcatactggataatgaccttgtgttgttgaagatatagtctctatggattcttgcttttcttacctgtccgttcgaacttcaatattgcaggagttgattggagctcttcttgcatgctctttcttttgtttgtttccggatgataatagaggtgcaaaacaccttccagtcatcaactttgatcatttgtttgcgtatgttacctctctgctttctcttctaaacctttcatagtgattaagcctacattagtctggtctggaagaaatgcctaatgttaaaatgtcagtcatttggcttaagtcatgaatgatcaagcacgtatgtgaaagaaagggaacctttaatatgtaatttattgacattcacactcgagagtgagaaagcaaatccgctagagagcgcatatgggcctcagtctccattgggagttcactagttagacttggattagcttgttgtgagaaaaaccacatatttctatgattcattggctatcatgtgcatgtgaagattttaattctgaaaattcttgtctaccgtgcattgagtaagtttcatttggattcttggacttcgtatgcccacagtctgatatccgagttttacttgcttttcagaagcctttatataagttatagtcaaagtcaagaaagcaagataagatgtattatgcattactttaaaggttttgctc

SEQ ID NO: 10021 - DNA, 606 bp, Arabidopsis thaliana landsberg
  unsure (1)..(606): unsure at all n locations
acttaaataactcaagtagttttctggatcaaacactctttcttgaactcaagaagagcatccctttggtctgtttcacacaagtgttgtgtagatgaaacaaaagtgtttagaaaaacttgaaacgaggagtaggaaacaaatggaacgaaggatgaacctcattttctgattagataagaaagcttcaatatttttgaagaaaaaaaggaagttatcgagtagtgatggtaaattagtgttgtagatatatataaaaaaaacaaacgcctgaagctccattgacttgatgatttgaagtcttttagattgcgactactaaactcgtccttgacgccaaatgggcaatcatgtttaaaattttagaaacgaagaacaaaactcgttctcagtgagcaaagtaaatttgagtttagtgagggcaagtagaaaaatctatgtcccgtgtatattaagaccattttcatcggttagaaactcaattatataaaataatattaagcntattaattttttattatttattctcgaaccaatcagaatgaaacaattttaaaaatgaggatccataagtttctctcctatcttttcctttttctatttttc

SEQ ID NO: 10022 - DNA, 928 bp, Arabidopsis thaliana landsberg
tttttctctctctcctccctacttcttcattaaatcttgtggttctctttattgttttgaaactgtgctctgctcggagagtgtagaaaagacaaagctaaagtctctgtgtttcttctcagcaggactaaaaggaaaaaagggtaagagcttggagacaatttttcttccttcataagattctctctttttaaaccataaaaaatcaaaagattgtaacttttcaattatttgtttgctttatataataatctttgtgtaccgtccagaaatcgattgctaatgtcgggtgagaaacaagcggaggagtcaatagtagtctccggggaggatgaggtggccggtagaaaagtggaagattcagcggcggaggaggatattgacggcaacgggggcaatggatttagtatgaagagcttcctctggcatggcgggtccgcttgggacgcctggtttagctgtgcatcaaatcaagtaagtacaatttcgataatgaataattcatctagtagtaatatttactataagaaaacaaatgtttctttattataataagaccaaattactcttttttcgtttgtcctaaagtttttttttaatattctttcataaaacattcttgaaataaataacaacttaagttataaaaacaaaaatatatggttgcaggtggcacaagtgctgttgacgctgccgtattcgttctcgcagttgggaatgttatcaggaatattgcttcaaatattctatgggttaatgggatcttggactgcttatctcatcagtgttctttacgtcgagtatcgtgcccgtatggagaaacaagaagccaaatccttcaaaaaccacgttattcaagtaaattcttccttattttagtttagtgacatattcgaatttgatctcacttttagattactaaattgag

SEQ ID NO: 10023 - DNA, 1156 bp, Arabidopsis thaliana landsberg
ttaaagataaatcatttttggcattattttaattttttaaagttcttgaatgatgttcaagggggccaggatatgctgtgttcatgttaagatggtagaaaaatttccacaattcaagactcgaaacctatttctcgggcgaaagctacgcaggacactatgtacctcaactagctgatgtgatactcgaatacaacgcacaacggtcaaatagattcaagttcaatctcaaagggattgcagtaagcaataagaaccaaaagaatataacaagtccttttaaaatctctgtttcgctctgtttttcattgattcctatgcttttgatcagattgggaatccgcttttaaagcttgaccgcgatgttccagcgatatatgagttcttctggtcacacgggatgatctctgatgaacttggcctcactatcatgaaccaatgcgactttgaagattacacattcacagattcacacaacataagcaaactttgcgaagccgcagtgaatcaagctggaaccatcatcactcaatatgttaattactacgacattctcctcgatgtatgctacccgtccctcttcgagcaagagctcaggctcaagaaaatggtaagaaaaaaaaggaaaacgagtttggtaggaacatttacatttggttgcatttacatttacattccggtaggaacatttagatattattatatcataactttttctcaaaacaaaaccacaaattgtagtattttggaaatttattttctagtgaaataattgaaggtttaaaatatattttggctctgtttggtaacatacataatggcataatgacgtttttaatgcgattatgcagaaaatttgccaatcaagaaattctgcataattgcattagaaaacgcaaaaacgcagattctgattatgttttaattcaagattagtttgattatgttttcacatgaaaatggaaaagccgacattttaaatggataaagatatacagcctaatggtttctgctagtaccatcgatgcgcaaccatatatgttcaaacttcataatattgttgaccaaaaaaaacacgtcaaaaatgattttcagggtacaaggatgagttttggggtggacgtgtgcatgagctttgaagagcaattgtatttaa

SEQ ID NO: 10024 - DNA, 471 bp, Arabidopsis thaliana landsberg
  unsure (1)..(471): unsure at all n locations
ttcttttaccattctggcgaggtatctgcccacaacactgacaactctttttcttttctgcccttcggcgcccttggtcaatcgctcataatcaggatattcaaaatgtagagcatccattactcgattcaatcttcgcttcggtcgggagccgaaggctgcagtcatcaactgatcttcttttttcgtatagttccctaaaatctcgttacacataacttcgatcatgtccagccattcttggcagggttccttgaagtgtttttgaacttaaactgataaggcagtcgaacgagttcaccctctttcttctcttcttcaagtttcggcataccccacttcttcagcgttgggaacactctgttggctagnnnnnnnnnnnnnnnnnnnnnnnnnnnnntgtgttcagacacaattctaaactcatacacagcatcttggtatggatcccacggtgtcatgttgcattga

SEQ ID NO: 10025 - DNA, 705 bp, Arabidopsis thaliana landsberg
aatagatctatatatatatttacgtgatttttttcttcatgatacagagatacagtgcttaaactcactatcatgttctttagcatatcatgatccattctgttttttcatatactcatattcgatatatgatatttagatatttgttagaatcaatgtgtagaatcaacgtattattcattgtgttaggacttaggaccattatatagttagtcaataagtaatgtgatcactttgatataaatgagtagaatcaacgtattcttcattgcgtttggaccattatatatatagttatttaaaaattatgtgatcactttgatataactgcgtagaattaacgtattattcattgtgttcacagtacacaactccattaattcatcactaacttgcctcacaatctatagtaagcccatgtttaggggaacctttggatattattctccatgattcttgagttcctgatgttggaatttttttgacataatagttttctggtaactttcagaccaaggccaaaccgaattgtcaggtggttagtgcaatggaaagctgacaaagagtattacaagatggtatactcatatgttaaaaatagagttgtattatatgaaaaataagggtgtaaattgggaaacttgggacaaaccggaccaaaccgaactgaaccaggctgagcccggctacggattgttgggtcgt

SEQ ID NO: 10026 - DNA, 1581 bp, Arabidopsis thaliana landsberg
tccattcttcctttcctaatcaaagccggatctaacttgtccactttgtttggagtgaatacaatgatcctctcaccaccacaagctgaccataaaccatcaatgaaatttagtagccctgataaagtaactttactctctttattctcacctttattcttcatcatcatcttcttctcaatcgtgttcttatcgtctccatcttcctcttcctcctccttcttctttctctgccccgttagattaagcgaacaatcgatatcttcaatcacaataattgatttcgctgaagtctcaatcaataaccttctcagatgtgtattatccttaaccgttgtcaactcaagatcataaacatcatactccaagaaattagccatcgctgcgatcattgtagacttcccagtcccgggtggtccaaacaaaagataccctctcttccacgcttttccgatcttcttgtaataatctttactcttactaaacttgatcagatcactcttgatctgttccttcttattctcttccatagctagagtatcaaacgtagctggatgctcaaaggttacatgactccacttactgttgtttccatggctctgacccggagtattcgaataaagcttcctctctctgttcttttgctctatcgtcttcccttctctcataacatgctcaagatacctctctatgattacttctcggtcacgtctgtggaaccttaacatgtaatatctcttctcattagcttcagggtaaaacgagaaagattgcctagtagctccctctttcttcgactgccaccaaaccctaatgccctcaaaattcgtcagtgatctcttccttatcatccatgctaagaacaatagatttgcttcctttagttgtgttggctttgagtttctttgctctagcagaagagtctttgcttagatagctctggatccccaagtaggcttcgcttctcttgaaatgctctccgctgtattcatggaatgttatttggatgtaagggtagaagcgaccgaagagtctataaaggaatggttccaactggggtccgaagagagggaagaattgtttgaagattgtgtatacaaacattagtgttgcaagagcagagcctgtgttagtccataactgacccatcatcgccattttttctcttgaagcttttggcttagggctttggaagagatttcttgggatctaaggaaggtttgagttagagatttttatgagagaaggagagtgatatttgggaagaagatggtggttctggtacacaagagctaaatgatagttatatggacttgagaagtctttatcaacgttatattattaatttttttatgtatgcgcatgcacatgtgacatcacaaggaaattaccttacgacaaaactttatatggaaaagggcataaaaaacaaaagtcgaaaagacgaaaagagaaggaaattgctcggattaagaactcaaatgtgctttattgactaatcaaacaaaatagacaagttttatatatatggcttcctccaaatttgacgagctttaaacaaatagacaaccccactatgta

SEQ ID NO: 10027 - DNA, 577 bp, Arabidopsis thaliana landsberg
ttaaacgcttaaaaccgcagtaggacatctctatatgcttatccattcttccttttcgaatcaaagccggatctaacttatctatgaaattagtagtgaacacaatgatcctctcaccaccacaagctgaccataacccatcaatgaaattcagtaaccctgataatgtcactttacttcctttattctcaccttgatctttcttcatctgcttctcaatcgggctagtctcatcttcgtcttcctcctcgtccttcttctgctttctctgaccagttaggtcaagagaacaatcgatatcttcaataacaattatcgatttccctgaagtctcaatcaaaaaccttctagctctgtgttatccttgactgttgtcaattcaagatcataaacatcatactccaagagattcgccatcgcagcgacttttgatgattttccggttactggtggaccaaacaagagataccctcgtttccacgctttcccgatcttcttgtagtaatctttgctattactaaacttgatcaaaatcgtcttgatctcttctttttttttatattccaagcaagagttt

SEQ ID NO: 10028 - DNA, 1396 bp, Arabidopsis thaliana landsberg
taaagattggtacatatgggtcacgccaaggacaaaatgggtatttaacctcaggatctgagcttgcacgtgtggcgcatgggtcgagagatgagttgataaccggctataggctgtaaaaatctcggtcaacataatctgtgtttttttttgggtttttgtctgctttttagttttttcccagcaaaaagagtgaaaaagagaaaatctttggtccaaaccaaaagaaacgttccctttttttaatttgtctctttgctttaataatttccttctcaccgaaacacacaccacaaccaattctcttctccttcttcctctttcacaaattcgtcatctgggtattcttaaatttctcacaaattcatttactttttggttctgttccgagatttcaaggttcactatcgattctgaaactcttggaacaatccagattcttggttagcaggtggggaagcattaatcatgtatttatgatacactgctccattattattacgagagagttgaaagtttcctttttgactcgtttttaaaggcaaggaagaagaaagactttgtttttaaaatgccaatgtttcagccttctaagaacggtgggtttgatgggcatatcttagatctacacacggcggttaaagacggtgttcttggcggcggagatgggaaatttctggtggttgttaccgatgagaagaagaaattggatttgaaggagatgatttctgagctggaattacctgaaataccctctgttttcatctgtcctatctctctagagccgatgcaagatccagtgaccttgtgtactggtcaaacctacgagaggtccaacattctcaaatggttcaatatagggcattgtacttgcccaacgacgatgcaagagctttgggatgatttggtcactcctaacaagactcttcaccaattgatctacacttggttttcacagaagtatgttttgatgaagaaacgatctgaagatgtgcaaggacgtgctattgagattctgggtacgttgagaaaggctaaagggaaagcaaaggttcatgctttaagcgagcttaagcaagttgtgatggctcacgctattgctaagaagactgttgttgatgaaggtggagtctttgtgatctcttctcttttaagtccttttacttctcacgctgttggatctgaggctatagctattcttgttaatcttgagcttgactctgattccaaagctggattgatgcaaccagctagggtctcgttgatggttgatatgttgaatgatggttcgattgaaactaagatcaattgtgctagattgattggaaggttggtggaggagaaaggttttagagcaaaccttgttcctagtcatagtttgcttggctgattaatg

SEQ ID NO: 10029 - DNA, 969 bp, Arabidopsis thaliana landsberg
gtgtcgtgtcaccaaagtttgtacccttacttactctactactgtcactctgtgcctaaagttcgggtgtacgagtcagatcttttggatcccaagagtaaagccaagatcaaccatggtattgctatatgtcacatggacacatcagcttggggtgcgaaccatggagccttcatgttgcttgggtcccggccaggtcagatcgaagtatgccattggatctttgagaatgatatgaattgggccatcgccgattaaccatgttgttgcaaaatgaataatgaatgttaatgttgtgtatctctttatttcagtaacgatacaaacttactatcttcctcatattctgttaactaaatatgttgtatcaggattatgtaaacattctaaagcaaggaagttcaaaaaaaatagcggtggaatgtaaattttctaaaaattattgaattcactagacaatttaagttgtgggcgtttaagcaaaccggttctagaagaatcagtccagtccaactgatcatatcatccaagttacggtgaccatgtttctttgtctggaagtgtaagactgattttactgaaacacagttccaacattcagggaaatgttattgatacaagaatttctcaatgaagtaaaggagaagtgatgcaatgtaacatggggaagtcaaaagcttatttaatgaagattcactgaacttggtgggattttttttggggacaaacaacaagttatgcagcctataaagacatgtagcttagtgactagtgaggtccttctccaatttgacttgtcgtaatatacatcattttacacatcttactatttaagtggatgcatctatatctttaagttgaagattatggtgtgttgaaaaaaattatgaatgtgtccgttgcttgtaactttatccaataagattgttttattatttatccctcaagttttttcttgctttctctatg

SEQ ID NO: 10030 - DNA, 446 bp, Arabidopsis thaliana landsberg
tcgcgattcagtaaacgactgtatttataatcactagtgctaattacatgcctactaaaacgacgattattcgagttacaacacaatcagaattaggtaatgattttattggtgcttacaataattacttgctaatatggctaagtcaaataagataaaatataataattaatattcgcgtagcgcgtttaagtcagcgcgtgtcgttcgcgcgcatcgtgcgtgtcgctcacacgtgtcggcgcgcgctgttgcgtgcgctgttccgcgcaccttgtggagtgggtggtgcgccatgtctcgcggcaataaactatttcgtctataatcggtcacgttaattacattacataattaaacgatgattaaccgagttgttaaccaatcggaactaagtgttaattctatccatgcatgcgataaatacttgtgattgtggttatgcc

SEQ ID NO: 10031 - DNA, 1710 bp, Arabidopsis thaliana landsberg
ccttcactgtcactagggatgtggatggggaaccacttggtagaggaactaagatcagcctcttccttaaggacgatcaggtaaggaatcgtagctttgagtgttttggggattgtttcttttcttttggtgttttctgtgttcttacaagtgtgtttattcatgcagcttgaatacttggaggagaggagactcaaagacttggtgaagaagcactctgagttcatcagttaccctatctacctttggaccgagaaaaccaccgagaaggagatcagtgacgatgaggatgaagatgaaccaaagaaagaaaacgaaggtgaggttgaagaagttgatgaggagaaggagaaagatggtaaaaagaagaagaaaatcaaggaagtctctcacgagtgggaactcatcaacaagcagaaaccgatctggttgaggaagccagaagagatcactaaggaagagtatgctgctttctacaagagcttgaccaatgactgggaagatcacttagccgtgaaacacttctcagtggagggtcagctagaattcaaggccattctctttgtaccaaagagagctccgtttgatctctttgacacgaggaagaagttgaataacatcaagctttatgtcaggagggtgttcattatggacaactgtgaagagctaatcccagagtacctcagctttgtgaaaggtgttgttgactctgatgacttgccactcaacatctctcgtgagacgcttcaacagaacaagatccttaaggtgatcaggaagaatctagtgaagaagtgcattgagatgttcaacgagattgctgagaacaaagaggactacaccaaattctatgaggctttctccaagaatctcaaattgggtatccatgaagacagtcagaacaggggaaagattgctgatcttctacggtaccactccacaaagagtggtgatgaaatgacgagcttcaaagattacgtcacaaggatgaaggaaggtcaaaaggacattttctacatcactggtgaaagcaaaaaggcggtggagaattctcccttcttggagaggctgaagaagagaggctacgaggtactttacatggtggatgcgattgacgaatacgctgttggacaattgaaggagtatgacggtaagaaacttgtttctgcgactaaagaaggcctcaaacttgaagatgagaccgaagaagagaagaaaaagagggaagagaagaagaagtccttcgagaatctgtgcaagacgattaaggaaattctcggggacaaggttgagaaggttgtggtctcagacaggattgtggactctccctgctgtctagtaactggtgaatatggatggactgcaaatatggagaggattatgaaggcacaggcgttgagagatagcagcatgagtggttacatgtcgagcaagaaaacaatggagatcaaccccgacaacggtataatggaggagctcaggaagagagctgaagcagacaagaatgacaagtctgttaaagatcttgtcatgttgctgtatgagacagctttgttgacgtatggatttagtcttgatgaaccgaacacttttgctgctaggattcacaggatgttgaagttgggtctgagtattgatgaggatgagaacgttgaggaagatggtgatatgcctgagatggaggaggacgctgctcaagagagcaagatt

SEQ ID NO: 10032 - DNA, 1821 bp, Arabidopsis thaliana landsberg
ggcgttagccccaccgctacggaggctgagattaagaaagcttattacatcaaggtttcatttccaatctctctgatgattcttacgattctgtttttttctatgcttaaagttttgtaatttcggtgagttcttagctgaaaagtgtcgatttttggggatacccacccacgagatttgattagtttccctagttgtgattttgtgaaagattgaatctgatgacaagtaagctcaattcttaagagctcactgtctctggagttttctaatggtcttatggacaaaagttctttaatgttttactatgagttaggttgatcgatttagacaattaccattatgctgctgattgttggcttgttttgtctcttttctacaggcacgccaagtgcatccagataaaaaccctaatgatcctcaggctgctcataatttccaggcaagttctctgatttttgaatattgtcaagagaaagagtttaaacactatcgtttgaattggtatttaagaagaactcctttatctttagttgaattcttaagcttcttggcttatgatgtttgggaaagtattggactggttactcttgtagatttaggatagaggatgctgtctacattttgtgtttaaccattatcccttgtgcatgagcactgggttcttctacaagatgcttgggtttgttgttttacctgataccatgtagagagctgatcaatggatcattgtattgattaggttcagggtacatctctatatatacatacaacaggataactatcgaatatttagagaaaaggctagtctaagattacaacagatattatatcaaagagtatatatactcttctgtatagtgtttgctttggatggtatagctgttatcatagtcaataaaagcatattagcaggactaacagtgacattagttttttggaaaatccggtttccaagaaattagtatgacaatgatctcagtattctttatctttcgtgatctgttttttttctttggtgaatctttctggatgaggtttttgaaaaatctaagttcttatacaggtattgggagaggcctaccaagtgctaagtgatccagggcaacgtcaggcctatgacacatctgggaagtcagggatttcaacgtaagtggcttttcttgtgatagttttatgggtgctttgctgtttagcaccatttggagtttggtgacatggatcttgatcctgttgctgaagaatttggcatgttactcagttcttacttgtggtgttcattcttgcagtgagatcattgatcctgcggctatatttgctatgctttttgggagtgaactctttgaagaatacatagggcagcttgctatggcatcaatggcttcacttgatatcttcactgaaggggatcagattgatactaaaaagattatagaaaaaatgagggtaaacatcatttattgatctatcctgcttaagaaaagtctttgatcaccttccgttcttaacatactatacatcaagcataaaacacgagaaagcatatatctaagttttctcatctcttcttacactctatcgacatgataaaatatatgttcttaagagacaagacatttgtttagattatcagaaggaataaaagaattgtgccatattttctccatttgttcatagattcctaagcatgttagactgcttttggtttcaggctgttcagaaagaaagagaagacaaacttgctcagattctataaggaccgcctcaacctatatatgacgaacaaagatgaatttactagcaatgctgaagctgaagtaa

SEQ ID NO: 10033 - DNA, 1063 bp, Arabidopsis thaliana landsberg
actccatctacctaaacagttttgccaattacccaattatcctttcccggacgagttccctgagtaccctaccaagtttcagtttattcagtaccttgagtcctacgcagccaactttgacatcaaccctaagttcaacgagacagtccagtccgctaaatatgatgagacgttcgggctgtggcgggttaagaccatttcaaacatgggtcagctcggttcttgcgagtttgagtatatatgcagatggattgtggtggcaacgggagagaacgctgagaaagttgtgccggattttgaaggtctagaggattttggcggcgatgttctccatgctggtgactataaatccggtggaaggtaccaagggaaaaaggttttggtggtgggatgtggaaactccggtatggaagtctctctcgatctctacaatcacggagcaaacccatcgatggtcgttcgtagcgctgtaagtaccaaaagtcttaaaccaaaaaaaaaaaaaaagtaccaaaagttcaaatctttatagcccctaaaacagagcatcctctgtttctgttactctgttttctaaaacagagcagtatctaatagtctgtgtttttttttcctttcttgattttatcaggttcatgttttaccaagagagatttttgggaaatcaacgtttgaattaggagttacgatgatgaagtatatgcccgtttggctcgcggacaagactatactctttctggcgaggattatcttggggaataccgataaatacggtctaaaaaggccgaaaattggaccgttagagctaaagaacaaggaaggcaaaactccggttcttgacatcggagcgttacccaaaatcagatcgggaaagatcaaaatcgtccccggaatcataaagttcggcaaaggcaaagttgagctaatagatggccgtgttcttgagattgattccgttattctagctactggatacagaagcaacgtcccttcatggcttaaggtaataaataaaacatctttcattcattgtttcttctcaaggtttagcttaaattttaga

SEQ ID NO: 10034 - DNA, 497 bp, Arabidopsis thaliana landsberg
acaaagtagtgcgaggggatgaaagatgaggaagactaaatatgaaattagagttgtggcaggaaactctagagtccaaaggttttagactcagtagaattaaaatcgaatacatgtgatatgacttcgacactactacacatggggaaggagatgttagtttggaatgggaagtagtgcttaggaaggatacctttcggtatttaggatcaatgctatatagaggtggagatattgatgaagatgttagccatagaatcaaaacaaggtggaggaagtggcaccaagcatatggcggtctatgtgacaagaggatactgtgagaaagtggactagggaaagtggtgaatgattattgagagcaaggctcgagtacatataagcaaggatggaataggaacagtccaatcagggagatccttgcctaatcaatcactaaccatcagggaggaggcgttcaggcaacagcctgtgctgctctatacattatgatgacc

SEQ ID NO: 10035 - DNA, 1698 bp, Arabidopsis thaliana landsberg
  unsure (1)..(1698): unsure at all n locations
ttaaagatccatcactcggttggtgatggcatgtcaatcatgtctcttgtcctcgcttgtatgcgatatacttcatatcccgatgagcttcctagtctttcgtaccagtaccggtcgtcatcaaggtcatccctgttgacaaccggttcaagaagtgattcccggttgttgtggttggttaaggttatttggacggcggttatcttgggtttaaacacggtttgtgatgctttggagtttattgttacgacattgttcgttaaggacaccgagacacccatcaaaggtgatttcctgtcaacgaagagtaaacagctgcgtttggttcatcgtactgtgagccttgacgatatcaagctaaccaagaacgcaatgaacatggttagatttctccttagactctcttcgtttacatatttatatatacagtacatattaaaaacagaagattatgagtatcttatatattttggttcgatagactatcaacgatgttgtacttggagtaacccaagctggtctctcgcgataccttgcgagaagatacggtaattaaaattatactctcctatctattttcatgtatatatgttaataaaatattgcacattatgaacgtgtacaattcaataatttcatgataaactaataggagaagaagaaactaaaaataggaagcaaaaaaagctgcctaagagaataaggctaagatcagctattcttgtaaacttacgaccaacaactggaatccaggtaaattcacataaggttaatgactaatttgattacaagttaagtgtacttaatcatcagtgaaatttaaatttatttttgttttaaaacaggatctagcagatatgatggagaaagggtctaaatgtaggtggggaaattggttcggctatgtagtatttccgttttctatnnnnnnnnnnnnnnnnnnnnnnnaacatcttgaaatagctcagaagaccatcaatcgaaagaagaattcatacggggcaatgctaacatacatattctgtagaatcattgtcaaattgcttggaatcaaggtcatttcaaacaagaactaaaccatcctatatatgtttagtatagacaagaaagcttgatttggtaaaagaattaatttattatatataagaagaggtaaattacatattgtcattttcattaaaattaaaagcaacaagaaaaaagtttttagttgatatagttgacactactttggttatgatgattattgactaatttgtaattaatttgcaggtggcggctagtataataaacagaatggtgtcaaacacaacgatgacgttttcgaacatggttggtcccgttgaagaagttagcttctatggacatcccatcacttactttgcctcaagtgcttatggccatccccatgtaagttgcttatttttatcattgttcataaaagttgataaaatgatgattccacaaacttcattgttctattttttccttttgttatgtctatctaatgaaatgtaaatcttttttttgttgttcaatttgattaggcgttgacgatacattgtcaaagttatatgaataagatgacaattacactaatcgtagatccaacggtgataagtgatcctcatcggctttgtgacgactgggaagaatctctccgaagcattaaagccgctgtcacaaaaagagagtctc

SEQ ID NO: 10036 - DNA, 1708 bp, Arabidopsis thaliana landsberg
  unsure (1)..(1708): unsure at all n locations
ccgaactctagtcctagccaatgcagccacattgatctacgggaagcttcggtacacagtaaaccgaatatcatacatcaacccaacaacaccattgaaactcgctgattggtacaacatctnnnnnnnnnnnnnnnnnnnnnnnntcattagcactccaacaaccggaccggctcatattggtacatcggttatcgacgttgaacttcatgagttcgtcgaaatcgttttccaaaacgacgaaagatcaattcaatcttggcacatggacggtactagcgcctatgctgtcgggtaagcaaacacattgccctctgttatctaaaccggttccggttattcataacttaaaccgtacgtaattgattaccttttacagatacgggtcagggacatggaacgtgaccatgaggaaacgttacaacttggttgatgctgttccaagacacacttttcaggtaataatcttatttagaaacaatatgattgaatctaaatatctaataagtaatcaacgatgattgtgtgtatgaaggtgtatccgttatcgtggacaaccatattggtgtcgttggataacaaaggaatgtggaatctaaggtcacaaatatggtcgaggaggtatttaggacaagagctctatgttcgtgtttggaacgatgagaagtctctctacactgaagctgagcctcctcttaacgttctttattgcggcaaagccaaacgtcccctttagatttatcattgggatcttttctactgaattaggtcacaattacgtggagtggaacaaaaaatacaaacgtagtccaaacggaaagctaattgatttttcaataaagagacaaaataaaaatgaaggaaaaaactttcttttgtcttatgatttgattctgtttttctttttttgctctcttaaattcagattgtgttcatgtatctagagcagaattggaaaccaaaatttggatactagaattgtcagtttgacataaaattttatgtaaatgaattgaaaccaatcctaagcagtcatcacttatcaatatgctttttcaaataattttgcaaaatgtcatagatttttatgtgtgtaattcaaaccatagaaatttatttgaaaatataatattaaaagctttatctttatctcaagttattttcccaatctcatcaatcaaatcacccacttcagtggacaataatctttaatatttcattaatcattgatatctttctcattttcacatttgagaaaaacgttttgtcggtaaaagaaaatgtatcattgaaaattctaaaaatagatataatggagagagagatccacctcaagattatcgccacaaaacagagtagttgactgatatcgattgtgagatttcaaagcgataacgtggagaccccctcaccattataataaatcatcatatcgtcactttagccacatcacataccaaaaaaaggcaaaacactcacgaaagaagaaacggagaggatgaagcattatgtgctagttcacggaggctgccacggtgcgtggtgttggtacaaggtgaagccgatgcttgaacattccggccaccgtgtcacggtttttgatcttacggcgcatggtgtgaacatgagcagagtagaagatattcagactttggaggatttcgctaagccgttgcttgaggttcttgagtctttnggctcggatgat

SEQ ID NO: 10037 - DNA, 1623 bp, Arabidopsis thaliana landsberg
agtgaccttaacctgcttcttctttgatcttctacttcccattgtagtcgatgagtccatgctctgccataaacagaaatatcaaattgatattaaactattctgacatactaagcaagactgacaaccattaaacagctaagaaaattcggatgctgcatccaggacacttacatttcttctacttctcctgccagcatttgaacttccactcaaaacactgaaacatcacaagatcaaactattcagaacaagacgagttcataatttcagtgagatctcttagtcaacaacaaactaacctgccacgggtgctgtcccaggacgaagaaactgaagcattggggtctaaacccagattcttagctgttaagaccatttcagatggacaaaacgaagaactccacgggtttttctctttctcaccctccaagaattccaattttacaggtctcttcgtatcctcttcggtttgattctcttctatcttgttggcagtctttgaattactaaagcaagtgagtttctcatatgcttctacaagattcatcactttaccagatacaggcacactttgccgtgcttcttccaccaccttagctcttgatctcttcattgtggaaacgcctattttctccggttctccagattcttttccttctaattcatcttcatttccgagattacaacattcctccaaagcttccttatcctccgctgattcaattcgatttttgaagaactcctcttgagaagcacgcagagtttcatatgcaacacaaacacacttcatgttccccttcttcctctctccgcatttacaatctatctcagcaaccttggattctgtaaccgctggatccttcttccctttcctcgaattcttcttcgccaccacaacaaacttcctctccctgatccgattccggggagagaaaaccgcctgggtaggtttagggttcggactcggattcttctgcgccgatttcttcgcagatttcatgagcggtgatttagccggactcgcttgtgaaatgttagggttcgaattctccaacgatctggaagtatcttgaaccttggactgaaacttgctccgatccttcaccggagtcatcggtttcccattcttcaatgtcaacgactccatcgaagataagaacagaatctggaatcaagagagtaacacgaacgcgaacagtaatcgatctagatttgagaatctatccaacaaaaaaattgaccggaggtgaagaattagggtttgttcttgctatggagtattgtaaatcgaataagaagatagatttggggaaaaaaatgtgaccgttgcggcgctctttggacgctctctaataacggctagtctttttggtgcttgtttaataaataaacttattagattagtaataaatgattatttttcctaatcttgtccgttagatcatcaaattaatgattatgatgattttaaatccacgtttaatgccacgtcacatacaaatttcaacactttagcagcgaattatttcgtccaatcttagccattagatcaaatagatgctggagccgatatgatccacgtagtactccatgtcacatcaaagtttcagacataattct

SEQ ID NO: 10038 - DNA, 1828 bp, Arabidopsis thaliana landsberg
aaggtttaaattatctacctaagaaacttagattaatagaatgggactattttccgataaagagtttgccttcaaacttttctacaacgtacctagtcaacctacatatgcgaaaaagcaaacttgagaagttatgggaaggaaaacaggtacataattattttcaatatggttttttttttcatcaaaaggagtgctctaaatactagtaattgtgtttccttatgctgtctttttttgtttgtccagccacttggtaacctgaagtggatgaatttaagtaactcgagaaacctaaaggagctacctgatctctcaacagctactaaacttcaagatttgaatctcactagatgctccagcttggtggagattcctttctctattggaaacaccactaatcttgagaaactgaatcttgtaatgtgcactagcttggtggagctgccctcctctataggaagccttcataaattgcgggagttgagattacgaggatgctcaaagctagaggttcttcccaccaacatcagcttggaatctctcgataaccttgatatcactgattgctcactcttgaaaagttttcctgatatctccacaaacattaagcatctcagcctcgcgagaactgcaattaatgaagtgccgtcgaggatcaagtcatggtctcgtcttcgttactttgtagtgtcatacaatgaaaacctcaaggaatctccgcacgctcttgataccatcacaatgttgtcgtctaacgatacaaaaatgcaagaattacctcggtgggtcaagaaaatctctcgtcttgagacgcttatgctagagggatgcaaaaacctggtaacactcccagaacttccggattccttatcaaacataggggtaataaattgcgagtcactagagaggcttgattgttccttctacaaacatccaaatatgtttatcgggtttgttaactgcttgaagctgaataaagaagcgagagaactcatccagaccagtagtagcacttgttcgatcttacccggaagacgagtgccttcaaacttcacttaccgaaaaactggaggttccgtgcttgtcaatttgaatcaaagtcctctttctacaaccttggtgtttaaggcttgtgtcttgctggttaataaagatgataagaaaaaggaggccaatggtacgtcatttcaggtatattatcgtataatggacaaacacaaattgggtgttattgttccatggagatctgcacacggctttgttgtgcctccaattttggcggagcatttgctaacctttgaacttgaagcggatgtgaaaaccaacgagtttttcctcgagttcgaagtcaaccgttacgaagtggtgataaaagaatgtggagtactccaactctaagtccttccatttttttggaagactggttgggacgcacttggttgagaacttgagagaagaacaagacagtgatctattgttattgtttcttccacttaccttaatcccacctccagttcctctataacatccatggcacgggcacttcttcaatgcgtttttcctaacaaccaccgtttaaaggcggagaaggagaccaggtaaagttttttccatagtaatactgtttactaaaattatatccctagattgaggaagtttgttgcacaggaaacatataatgttaagcttttgtgccgcaagattccttgctcaaaccatataatgttactcaagctaactaaatgttttctttctcttatgatgtcgtagatttgaccagcacagtagtttgttaagcttttactcctcagattatccaaggtgt

SEQ ID NO: 10039 - DNA, 1104 bp, Arabidopsis thaliana landsberg
gaagacatggttacattggccaatggtatctgcaagtttactcttggcagtttatcctagagacatacaatgccggggcttttggggattcatcccacctccgttgtctgcatatcaaacataagaatatgaggatcaagaaaaacgctgcatcgtcaacactcaacacaacaaaagatatactaaaattaattgtataccctcaattaagatcatcttgcttccatctttcctgttctggatcatgtctacattaacaaatgtagctccactacgaacctgataatcaaaagatgagaaaccaatactaccaacctttgagatacttctaaatgtagaaaaaaaatataatcccacctcatctaaagcattgtccaaaagctcagcaaaagctgcaagagataacatcgttatagtcattgcagaaaacattgttcattcaatagattgaatcaaacttcattcaatacgtacctccaagagaccatttgtgactagttgcattggaatgcaggaacttaggatgtactctcacatgatcaaagccacctaaaaccacaattttactcaaattccaacactaacaatctcaagtattatcctaaaaatcaattataaaagaatcatcacatagcaaagtaacctgcagaaacttcccaatcaccaccagatgttccttcataatcaccagctttccaaaactgcttacaacttccccaagacgaaggcgtcgccacaacgttacaaggcgtagccggaagagccaaaatcgcttgtccagaagtagtcgatagtaaaaactcttcgtcatcatccggaatcataaccgctagtttcttcgccggtgaagctatagaatcacttcgcgctctcttcgttccagaaacatcatcaccaccggttcggtctacgctttgaatctcagcgatttcgtcgagattttcgcctaactcggatccttcgttgctactactaagttcgatgacggattctggcggcggaatggttttgttcctagcggcgggtttccatgtggagagagtagaagtagttaccggattctcttgcttcacgataggctccattaaactaaacacgtgagcc

SEQ ID NO: 10040 - DNA, 774 bp, Arabidopsis thaliana landsberg
cagttgcatgatttctacaaatgtatgcaatgtgacttttttctccacgtagtgtgtgcttgtctacctaagaaagtggatcatgcattgcataatcattctatcatcctcgacccatctcctctacccactgatggtaatctgcaatgttcagcttgttctcgaacgtccactggtttcaagtataagtgcgctgaaaagaactgcaagattcattggtttaagatagatgtcccttgctttttagttcctgagtatagcattgacaaagtccatgaacatcctctattcatcgctccattcaattacgactatgaaccttttcgctgcaatggttgtaagagaggtcttaccaagaatcgtctacaatgtagtactctttgcgagtactctatttgttatgaatgcgctacgattccaagtgagttacactataaatacgataaacatcctctcactctttgctatggagaagacacggacgacaagtattggtgtgaagaatgcgaaaaggaagtgaatacgtcagaatggttctacacgtgcaacgaatgttgcaccactattcatcggaattgcttattcggattccacgtttatctgaagcctggtaacactttcaaatatcataatcgaagaatggtggaagttcttgacaacaagagcagcacccgaccggtttgcagccgttgtgaggatcgctgtcagggtttcatttacttcaaagtcgatgtgaggaatgtttgtgcctcgtgtcttttaaaatgtttatag

SEQ ID NO: 10041 - DNA, 562 bp, Arabidopsis thaliana landsberg
  unsure (1)..(562): unsure at all n locations
cagctgcggggaaaaggttatcagtttgaagttacgaaaacaaacgacgaagctaaaggccataaaacaatacctattcgtctctcgcgttctgcagcttcctcagctttttcgctgcttctcgagcgtcgtgaatatctttttcacttttcttcattatttcgtgagccatttctcggccgccatttnnnnnnnnnnnnnnnnnnnnnnnnnnnnnnnnnnnnnnnnnnnnnnnnnnnnnnnnnnnnnnnnnnnnnnnnnnnnnnnnnnnnnnnnnnnnnnnnagggttttgacatgatcgcaacccgccttctccaagatggctgaaattcctcttgcaccagagaacgcgcagacatccccgcgatcacttaaaatttcttcgaaagcttcagcttctccgcttatccattcgataacgccttcaggatcgcctcttaataagttatctttgttggaataggcgcccacgttggcgatgctagcctttattttcttcacgcagcctagggatttttctaagcatctttctttggatgcgcgaagttctacaactggttt

SEQ ID NO: 10042 - DNA, 1843 bp, Arabidopsis thaliana landsberg
  unsure (1)..(1843): unsure at all n locations
gtttgatgatgattaaaataatctttgacataccagatatagagattttaaaagtattgtagaggtcaatttactaaaagttatctaattaactatatgaagtaaaataaaaatgagttacaagattgatcttttacttcatagtataataaacataaatcttcagttctagtcaaacctttcatgttaaaaaactcatttattttttagtaaataacgtcctgtgaaacctttctaactaaaaaatccaatttatttttgtcaactggataatatatattcgtttttagaagagaatatttggccactgtgtaatttatcttgtattttaattagatttatgttcaagaaaaaaaaacaaaatttgacatatctattgattttttttttctttttgttctcttatcctcttcgcgcttncacacgtcgtcaaattaccaatgacgtctcttccgataatcctcgcatcctctccactgcgaaacctaaccaaaccttgttcaacttctcaaatcccaaaatccattcaaaattctacaaaacaacctccaatacatctcctaaccaaaaccaatctctctgtaaccatttcccaactaatcatcacttcccctgttctcgcatctgaatcattcgactcaatttcatcagacccatcttctggaagaatcgatttagagtcaattttggtcacaattgataatttcttcaacaagtatccatttttcgtagcgggatgtacttttacctatcttgttgtttatccagctgtgatgttttacttgaggaagtataaaccaatatctgccatgaacgcgtttcgtaagcttaagaatgaatctgattctcagcttttggatattagagatgacaagactttggctttgttagcatcaccgaatcttaagtttttgggtaagagttctgttcaagttccgtttagtgagaatgatgaagaagggtttttgaagaaagttaaaggaagcttctctgatcctgagaatacagttgtttgtgttcttgataagtaagtataaacaaaatattcaaactttaacgaaaacattgctttgtggtggttgattagttgtagtcttgtagagagagttgtctcatatgtttttacctttgatgtggaaggcagttttgatggtaactcgtcgaaagtagctgaattgctgatcaagaatggtttcaaagaggcttattatattagaggcggcgcgagagggaagaatggttggttggtatgttacattgctctctctttggaatcagtatgattagactaggttgtttctgcataaatcctgaaggtttggtctaccaatgtttcaggctattcaagaagagcttttgcctccaccggtgcatatgtacactgcgaaaaacgtaaaatcttcaaacaacaatgaagcgtctgttgttggaactgagaactagttcaagaacatagcgtaatggtatgcagattcttgttctcggtatatagtttctcttttactttttctctctaatagcttttgcttcggttttgcagtggcaggacatggtactaccatgtcactggaacatgagaaagcttctttaggtggaagagtagctatatattgaaagacttgtttagacctcaagacaactctatgcttagcaaaaaagctaaccttgtctactacatattgatttctcagaccattccaataaaatgagacttgttattattatgaagttttttgtgcttttgtaccttttctattgcatctcgcctgacagataatgattatgtgtaatgctcttcaaaagattgtttgaaacaatttacctgcgattcctttgtaattag

SEQ ID NO: 10043 - DNA, 999 bp, Arabidopsis thaliana landsberg
tttttggtcatcttagtatttaacaaatcctttttgtaccagcttccagagccgaggaagcttgatttgcttaaagctcttgctgagatctctcacacacaacaactctgatagcatcccagatgcttcccccaatatttgagctcttaaaggtaactcttaagcaacattgccacatctcttcttgtcttatatcaattatttactgttaccatttgctttcagaaatacatgcatctcttttatatcaattatttactgttatcatttgctttcatctcttttatatcaattattttctgttatcatttgctttcagaaatacatgcctgccaggaacactgtggaaaaatcagactccagatatgttgagtgcttattatacgtgtttcatcatatggcgcacaaggttgtctaactattttaagctgcttggttaggtcccttttcttagttatttactaatctgttatcgttgaacatataggttcctgaagcaacaaatagcttgtgcgggtacaaagttgtgcccacacaaccatcagatagaatcggggatgacttttcgaagttatacaaggaatccactgagaggtattgtaaataacagtagtatggcattctgttttcttgttgtaagatgttttttgctgttttgtttcaaaaacaactgtcttaataaaaacggacgttattgcagattgatcaatcttgaggatctaatcaaagcatcagtggagcaactggtacaagaaatgagtgaccacgacaaagcctatttgctttttgattctacgagcggtgatgataaggcaaatattggtgagagcagtaacttatcactcctttctctttccctttccacctagtataatatattctcttttgcggtttaatctagccaaccctcctttcagtatatgaagagagcaagatacaaaaactgaactaagaacatgcataaacatactcgcaatgacagaggtgaaaaacagagcc

SEQ ID NO: 10044 - DNA, 1369 bp, Arabidopsis thaliana landsberg
  unsure (1)..(1369): unsure at all n locations
gacccgtcgccgaagcaaaccattcccaaaccttttttgctggattcactaacctatagacacccattcgctaaccttggactcctctacatggcaaggaaatgtaacaaatcataccctcacgtccaatcgccgaggacacnnnnnnnnnnnnnnnnnnnnnnnnnnntcaatccgttccgacaaagatttttacaaaaatagtaaaatattaatttgacaaatactttacgaaaataaacaagaattatttgggtttacttgctttatatttttaactttgaaaatgctaattaaaaccttaattagatattcactaaaaatctttctaccaataaaaactttttaatgtttcacactacatgaattcataaatagttaaactaaattataagtaagaaatatatatatatatatatgagttcaacgagttatttatgacggggtaaatcatttgatagaaaatgacgcaagcgttcttattacatgacatttcataactgaacgacacaccaataaggcaacaaacatagaagacaacaacttataaaaaaaaacatggcagacaaaatgaaaagcataagacaacctgatcaagcattgatctgagaaatagctcatttaagattaggcaaagatcactcgcgcgtgatgggcacgacatagaccccaagctggtgaagcttgtcagtactagaatttccgtggaaccctacaatcttgtaaccttccttcccgagactgaagcttgttgtcgactccaatccaaccggtcgaaaggtttgtttgttggtcgtgaaccgaagcctggttataactccgcgttcatttccacttgttttgtcccaaaaaccttccaccgtagtgatgtattcactcggataatctagcttgaactgcaaaacatggagaataagtaaagtggttgatcataaagaacaattgtaacaaggaagctctgaatctttagccgatacatatgttactctaggtcaaggaaaagcatttggtaatacaaatttaaagtaaatacgtgaatgaatatataatcacctcattgaatcctattcctgatggttccccatgaactttcagttcagtcacctggacgtccttatcgtacacaaacttgagggcgataccctcaccgtcttctagatgtatctctctcacaccattgaaaataccatcgtcccatggatctcctactgcctcaccaccttctggttgtagtttttcgggggaaggaggaggcggagaaggaataaacgaagagaaataagctccgagggcatctatgccagcaccaactcttccatggaagccgataagagcaccaccgntgttttcgagcacaaatttgcgagca

SEQ ID NO: 10045 - DNA, 1620 bp, Arabidopsis thaliana landsberg
  unsure (1)..(1620): unsure at all n locations
tctgtcgatcccatcgacagcgatacgcccgtgtttgggatgctcttttgacatatatccactgcagaaagatagtttgtttttttttttttttgagtaattcaaaattttacttgctgcattgaagtaaaaaacagagttaatcttactatgttccaaccactctggtcgtgtttgcttcagtttcatctcctcccaaggttctagccaatccaaaatccgatattttcgcattcatatcagaatcaagcaacacattgcttgctttgagatctcggtggatgattcgaagccttgaatcttcatggagatacagcattccgcgagcaatccctttgattatttccactcgtttaggccaatcaagttctctacgtcgttctttatcgaaaatgaaagaatccaagcttttattcggctgatactcgtagataagcattcgttcttcttcgtccacacaatatccaagaatcttcacaagatttctgtgttgaagctttgcaatcagcttgatctcgttcttgaattcttctaccccttgtcttgacgttcttgatagcctttttacagcaacttcttgtccacaagccaatgttccctgctcaaagaacaaaacattttaccctttttgcacacaatctgagaattagacaagaagttttgttttgttaccttataaacaggtccaaaaccaccttgtccaagtttgttcccagcagagaatccacttgtagcttctgagaccgtgtcaagatcaagaaatggtaattcaagatcttcttcctcttgtttcctgcttgaaacacgggatgattcgcgctgcaaagtttctgaataaaacaacgggtttaataaacttatagagcacnnnnnnnnnnnnnnnnnnnnnnnnnnnnnnnnngctattcaactacaatgatcatttaccttttgttgcaagtttcttttttttcatgttgaagacagtcaaaccaatgcaaagacaaaaaagaaacagagcagtagataatactattatgagtatcatccttatctttcccttcacgtaatggatattgtactcatctgtgatcgaaacggaacaaaaaagaatattcaagatttataaatcaatgtatagtaaaacaatgtttattgtttcacaagtcttaaaccttacctatctcagaagaagcaagcctcacatacagatcttgtccgttttcattatactctcttatatcaatcaaatctccgaaccagagaatacatccttttccgccatctctaatgtcgaaaggcgaataagccgagcatgtacagtttctcaagcatacctttttgcattcattcaaatccatgttcttatcataccacgatgttcttgtatctggtaacttcaactttgaaatcttcagaaagccgtcctctcctttaccacaatccagtttcactctcctaacacacccttctgaccaatcccctgcaacccaagcctgtggagttttagcaacaaacccttttaaacacctacaagcgggagattcattgatgttgcagcttccgtaagagccacacaacgtgtattgatcacaactatccatcatagccgttaaatagaaagttcaactgaggtatcga

SEQ ID NO: 10046 - DNA, 1404 bp, Arabidopsis thaliana landsberg
cacctcctaaagaaagcaaaaacacgcgtaagagaagcggtagattgccggaagcggtagatcgccggcatcgttctccgatgtcacagagcttcaaaccagtaggccgaaaagtcgtcgtcaattgaagccacaacgctttacctaagaactccagaatcttcatcctttaaacaacaaatcttcttggtttcgttagagccgaaaaagaaagaagaccaatgaatcggatatatatttctctcttcaacgccttatgaagaaagaaagctggtgaaaatgatcggatgaatcaagtagaggaacacattgtggtttcttttgggttcacaatgagtaccaaggatgaaggaccccgtcaacactaagatatcgagatctttaacattttttaggaaagctcatcttctttgcttaaccgcagaccaagaacatgcaccatgcgaagatgggtttcttactcttcttattgaggtgctgatgcagtcttctctccttcaggctcctgtgagatgaccaaaatataatcacccaaactaacaaagaatacaaaaataaatacagaacagattttaataaaacatgattttattgttaccagagcccaaacgcatctcgcttccggaaaactttctctccctgctagacttgtgcatgctttccataagaacacacttgttcttgtaaacttttcctttcaccttcatgaacatgtcatggtagtacacaagcttgtcgatcttcttgttccaacagaacttttttagcaagcgttttaacattttcagccttctcgtcaaacgtttcattattcggcgcaaagcctccattgtatccttacctgaaaaccagaaaaactttctaaataattttcatcgatcataaataatattacagtaccaccaaaccagagtacgtagcagtccaaaaaactaaagtagtaccgaagacaaactgtttattaaagtaccaaaatgaagagacctatcaaagattattggatactcattttcattcggacttaccgtaaccagtgtgacgacactttctccttgcacgagagcgtgagtggaaatggatcgacaccatttcttatctccttgacctagctccacctctttgtcatattcggcggtgaaataaatggactacttataaaagagtgattataatagatttagggtttttggtctatcactttccccctagtttctcgcggtaccccgtttccttaacaaataaatgggcctaaacgccctgttttgttttatatttgtttataagccctactctaactcgtctctttaaattaatctaaaaaaaaagttttcataataatgtaagaacaataaattacaaatgtgtactctttttggttctcgaattatataaaaaaattctaga

SEQ ID NO: 10047 - DNA, 1260 bp, Arabidopsis thaliana landsberg
ataactttcccaaccacaccatcctttagacaggggattgtttatatcacatttagcatcttcaaaaccatcatttaatgcatcagagccaccagtctcttgatctattgataaggattttccttcttgcctcaaagatgtatccggagcccttgaaactctcttggagcgtatcttcaatgtcgttgagattggtggaaggctatctattagattgtgccggtgggttacattttgagaactattagaggccttgtcatcagccactcgacttggtgacccatccagttctggatatcgcttcccaccatttggcaaaccattagagatcaccgtgtcagtgtcaactgccatgtcatctatatctggtttcaattccaaacaactaggtgctgtaacaccatttccacggtgatttgagtcttccttaacattattttcctttcccttcgggtcagagcccataagttcatgcgatgatattgcttcacctcttattcgctttgttgtacgagccttaaccattccccatttgactttacttacatctagcccttcaaattggttcccaggaatcctcgagtcttcagtacagccgttccctaaagttggacttggaacatcacaagatgatccaggtaggttctccagtaaggtaagcttatctgaattcctaacaggaaatctaagaaccaatctgctcctttcagcagtatgagtttctctgatatcacattgttgagccccatcatcagaatcacatacgaggatagttttccctttcgattgcttcccatgcccatttaacaaagctacttcaagttcactatccccagtacctgagtcttgtgttgtcgattcactttctgatgaatcactcaattcagagacttcctcctcttctgcatctttagatgtacctgtaatcttagaaaaccaagagagagcatttcgtgcagctgctcgcctaggtctagacgatttagattttgaagatttcctcttcgattctttacgaccactcctagattttctggtacgttttttgttgcttggagctccctcaagctcatcaaagttcctctttttgacacgcctacccgaagaagtcatgatcccagcctggtaaagaggttaaaagggattagaagcctatttaggcacaagatcaaagcaatattacaaaatactcacttctttcttatgttttttccttttggatcttctaaggctattctgatgatcatcatcctcatagct

SEQ ID NO: 10048 - DNA, 582 bp, Arabidopsis thaliana landsberg
catagaacggattaaataaaatagccagtggtttgggatgattttaatttttctacaaatatacccatgttggaatgttgaattggtgatattaatccaattttccgattaatcgctagaactataccgagcggtcaattaacgtctaacggttcttttaacaacgggtaaaatccacgattccgattttaaaacaatgattccaacttgcgtatgagacgacctacaagaattttagattgagatcgagtcatgtactccacgaagctaacgagtaacgagtcaagagactgagaagtacttctctgtttaaaaaccttaggttaagtcgtatatttttttttgtgaaagtgaaaagtttaagattattaattagtagaaaatatttgaaaatgaagttggacctgaaagataaacaccaaattttcttatcctaatcccttcaaaaaattataaacaacaattaaaaccaaaagaagctaataacccatacggatcatagtccaaaaacaccaacgtaatgcccgaagaaatgctgcatcagatttaaaccgtcacatcaatccaattattgattcatag

SEQ ID NO: 10049 - DNA, 671 bp, Arabidopsis thaliana landsberg
ccaagatcacggagttcgcctgtaacatccgatttcgattagattttcatgacattcaatatgttttcataggagtagaggccatatctttatttatgtctttcaggtaaaatgctgccaagccttagaagaagatccgagaggttgaaagataaaacaaaagtgagtattttgtaatattgctttgatcttgtggctaaatatgctacttatctgtttttttacgtctttagcaggctaggatcatgacttctttgagtaggcgttgcgaaaagagaaactttgatgagcttgagggagctccaagcagtaaaaacacatgtaatggtgttaatgtagcacatagttgtttggaattgaaaacagatattgatggcatggcagttgacactttctcggtggtttttaatgggtttacaaatggtgaaagacaatatctagaactaaatgacggtgagtctaacggttctcaggatgtaactagtcgcctgaacgatgtagcagatagctccatgtgggtttcaagggctcctggtggcactgatgaattaaatgatggttttgaagacatcaaatatgatttgacattagactgtcaaaaggattgtgtggctggagcaaacatatctctgagatatgattgtgttgggatatcaaatactcacatcagt

SEQ ID NO: 10050 - DNA, 1503 bp, Arabidopsis thaliana landsberg
ctttgcgtacaaaaaaaaaagaaagacaaaagacaattatatttaaaactaatcaatatgttaattagagggatgggttaaaatttaggaatgattccaccactgcttttgtcaacatcattccaccacttgttttagcgaatttaactgcattacagtgaataatctaaaaatcctttactcttttggattatatatcactcggggcaaaagtattgataactgcattacagactatagtattgtactactagaaaacaaaaacaacaaaaaaagaagtggacaacactatacgatcgacttaaatgcttgcttatataaagactaaaaggaccattggttcccgtatctcctcgcaatactactactcactttactataatctctcaaaatggccgtaagttttgtttcaacatctcctgaggaagaagacaaaccgaagctaggccttggaaatattcaaactccgttaatcttcaacccttcaatgcttaaccttcaagccaatatcccaaaccaattcatctggcctgacgacgaaaaaccttccatcaacgttctcgagcttgatgttcctctcatcgaccttcaaaaccttctctctgatccatcctccactttagatgcttcgagactgatctctgaggcctgtaagaagcacggtttcttcctcgtggtcaatcacggcatcagcgaggagcttatatcagacgctcatgaatacacgagccgcttctttgatatgcctctctccgaaaaacagagggttcttagaaaatccggtgagagtgttggctacgcaagcagtttcaccggacgcttctccaccaagcttccatggaaggagaccctttctttccggttttgcgacgacatgagccgctcaaaatccgttcaagattacttctgcgatgcgttgggacatgggtttcagccatttgggtaaaagttaaaacagagctaataatctaaaaaagaaagagatagagaaatcaaacatttaacatgtcttttgtcttttcctctgttttttttttatatagaaaacgtcttaaaccaataaccggtttcttctataccgaccactgtaccgtaactgtagaagacttatgttaatgttggtttgtggttgcaggaaggtgtatcaagagtattgtgaagcaatgagttctctatcattgaagatcatggagcttctcgggctaagtttaggcgtaaaacgggactactttagagagtttttcgaagaaaacgattcaataatgagactgaattactaccctccatgtataaaaccagatctcacactaggaacaggacctcattgtgatccaacatctcttaccatccttcaccaagaccatgttaatggccttcaagtctttgtggaaaatgaatggcgctccattcgtcccaaccccaagagcttttgtggtcaatatcggcgatactgtcatgggtaccctatttagatttataaaaactcacgatcttgggttagat

SEQ ID NO: 10051 - DNA, 534 bp, Arabidopsis thaliana landsberg
aagataccctgacttcacatggtctatgttccttgagttcactcagaaacattatagagcagacatgaacactctccaagccttttcagattggctcaccaaacccatctaagaaataaaatattcatgtcttgtcttgttagttactagtatcttctttatatttcatgtatgtatatggtaataggcaataacaccttttagcatctcatttataaaatccatccgttaaactaaaatacttaatacgcactcacaagtatctaacaaattctatcaaaggaaaaaaaacttttcaacaaatcaagaagatatgtaaagatcatccatttatgttttaacgaggatatcagatcaattggtttagctaatagcaagtttagggaatgggggatgaagaatcaatacaaaaatagtgagcacaccactatgacaagtgagtacaaattaaggttaaagaggaattatgttcatcatgcatcatcttgggggttcatcagaaaataataaacttttgggacacctatataagta

SEQ ID NO: 10052 - DNA, 1353 bp, Arabidopsis thaliana landsberg
  unsure (1)..(1353): unsure at all n locations
tcaggatcgttatggtgaggcctgtgcaacttaatgaagctgatgaagagacgctcaaggttttttttttacattcaacactgattcatcatccattacaagatcaaggaaagatcattttttaatcattctgattattgcaggataaagagccggtagaaccagtagttccaattgtttctttacaatcgcagccttctcaggccaagaaagcagaagttgctcctnnnnnnnnnnnnnnnnnnnnnnnnnnnnnnntcagttccaaggacgcagaggtcaacaacaagaccgtagatgccaggttctccatcgttctttgggagattgtatcgctgttaagtgagtaagaggcaattctaatgatcttttttctttttcatttaacagcgatccgacgactgagccaatagaagacaaggagaacattgcttctgcttgcacacccaaaccaccaatgcagttttttgtaggggcaaagccggtggatcttaagaagcagcaaactgctagaaagatagctagtctgctgaagaatccatctacactaaggcctaaaaaccagtctcaagccaaaggcagtcatcagaaaagtgtgaaagggtacctcacattcttaataaccaatctggttcacgtttctcttgtgatagttgttttaatgtgttgattgtctcactgcagggaaacgaatcttaacaacatagctagcactaccaatctgattcaagaaaatcaagccatcaaaaggcaaaagctagatgatggaaaatcaagacaggtgagccaaattgttttaaaatcagcatgtcattcactccatacctcactgcatgactgaaactttttccttcttatcattgatttatctagattctcaatccaaaaccagcaactctgctccacaagacaagaaatggtcttgttaacactggtttcaacttatgcccttcagtcactaagcacactccgaaggaaaacagaaaggtgtgttgtgcttcatggttgcttgtatactttttctgtcagaccctctcaaaccttgttttcacttttcaggtttatgttcgtgagcaaattgcaccttttgtttcaactgctgaattgatgaagaagttccaaacaagcacgcgagacctattcgtccagaatcgacctaagctgacactgacaagaccaaaggaacccgaatttgtgacgtcccaacgagctcgtcctttgagagttaagagcagtgcagaacttgaggaagagatgttggcaaagattcccaagttaaagttgacctgtgaccagaaggtatccatctagtttcaccgaggatatttgacctcagaattgacacctaaagat

SEQ ID NO: 10053 - DNA, 1091 bp, Arabidopsis thaliana landsberg
aaaaatgcaaagcctaattaaaatgccgaaaatatgaatatgcgcattggaagttgattgattttagttacttaattagttgtggggttaacttatactaacacattttggtcacagaattaggtacaactaatgattgtcattagtcaattaataacaaaaatcaaaattatttcaatttgaaaagacaaaaacaagaccttcattaggcaaattcaatacttaagtttttctttttcttcctaaagtaatcttagaaccgatggtcttcatatatatatacaacatacatgtagaggacatgaaaattaatctcccacagattgaatcgagatagagaaaaaaaaaaaaggacttaagtagaacaatgaacagttttggggcaaaacagagagacacaggaaattatggggcaaaatcatacaaatgttattaggagactgactactagtgaggaatgtcttcttcttcttcatctctgtctctatgcgtttgagaagccgttgatttttccgatactcttacattatatttttcgtacactttttcccgattctccgaccaccatgtctcagcttgatgttccccgaatcttcttcggctgcaagaaagaaacaatgacaacctttagcatcatcaaaccttatagtaaaaaaatatggaatctctatgagcaaaatgtttaacctgaagcggactcttcgtaaatctctagttccatcgtggagggcaacaagggttatatacacgcctggctcgtactgttcgatccactctgcttctacctgattagtattgttaactcctgtttgactcgaaccattgtcgctgttgttctggaactggaaaggctcgattctctcactgattactgacccgctgctgctaagccgtgggtccgctggataagcattgctgtttctttcgctggctctaggcgtttgctttggtgattggagattagaccaagatgcatttgcaaaggcaaagtcaaaaggtgcaactgaagatatagatgaagtcatcgattccgaccttgaaggatggaaaccattttcttcagggaaatggaaaccattctggtctaatcc

SEQ ID NO: 10054 - DNA, 559 bp, Arabidopsis thaliana landsberg
tcagcttggtcagatatactttgctcttcctctttgttggcttcgtcagccacttaaagctgaggagatggctgcattggccgttaaagctagctctgcgctcatgagaggtggtggaggaggttgtcgccggaaatgtgtcgagcctatcgtttctgataagcttcgaatgagagttggctccggtgatgatacggtgggttcaggatccgggaggaggaaagtgaggaacggtgatggtggtggtagtgttagtagtagccggaggaggaaatgttacgcggcggagttgagtacgatagatgagtgaagggtagttttggaattttgattaaatttgtgggtttaatttgtggatagtgtaaattatgttggggcctattagtcatttaatgaagatgcaatttgcatattggcaaaaagttcttatttgggattttagtacgcatagcatcagactcgtccaatgactattatatccttacatttttttctcccaaggagattaaaatgtccatcatgcgacaaaattctttcgttaaccatggaattagtttta

SEQ ID NO: 10055 - DNA, 1415 bp, Arabidopsis thaliana landsberg
gacttaacatgacttattttttcttgtttgatttctgtttattttttttaaaagtttcatgtataataacctttttcatgaaataaatttaaacatgccgtaaaaaaagaattaaatttcttttttgaatgacttaaacaaaagtttaccatgaccagacttaacatgacatattgaatttgatttctgaaatttgtttcttagactttcttctttttttgaacaagaagatttttttttgacattatttgttacttattctctacttacttaaaatgaataaatagactcatcatcatttcgcccaacatccaaaacccagtattgtataggccacgaaaaacagcgatctctgaatatagagtattcttcttgtttaaaagatgcaaatgattgttggttcgacaaatcggattacatgaaagcattatagataacagaacaaaattcaaactttgtcaaaactaataaaatgttggatggtgcgtatttggaacagacttgtctatgaccaatggcagcatatgcatttgcctaaggtccaaatgctcaatttaaaaaattgtttatgataaaaagcacaaactgattttaaaacaacatattttacgttataaactagataaggccggcccaattcggagggtgtgagaaataaatataattttgtatcgataatcttcatattctaaatagtattctatatttttcttaatatttaatttagtaattttgtttcaaatattgctatacactttaactatttatttgataatgataaactgcattttaattctacatgctccatacatcgaggccttagaggtgtttgaaaaaaaacagggatttcatccaaaagaatgataccgtggagcttgattacatggaaggttcgatctttaaggcattgggggaagaaaccaaagacatgaatctcaagttcacatattggttgagttctattgaatacttttcgagaattactttgggatcaatattttcagcaaatctactcttcaatacgatagagcaaattgagttagacttgtatcacaagttatcactgcgccaggcaaaagatggtttgtttcatcttagacaacctgaatctgacggctttgcttcttctgaattcaacccgaatcatccctgctagcataaaaacaagttcgggcagtgagtcagggaaattgaagaaatgaagcatataatcgaaacttcagagacaagaatccctctttccaaaaactaattttagaaaaattaagaaaatacgatatctaatcagttcaggttttaacttttaagttgcatgttaagctgtatttctttcatgattaacgaataattagtgaccttttcagaattgcaatgataatattccctttgaaaaattgcggttgatatagtatcat

SEQ ID NO: 10056 - DNA, 2088 bp, Arabidopsis thaliana landsberg
caatgcgtctccaagcaatggtcaataattatcggcagccgtaaagatttcatttaggtactcgacaatcttcatttcttctccattaattagttatctatattctctgcatgtgttatattcaccctccaaagaaaactacacgaagataaaagaggtcatgtcatagaaacagagctttcttgtagaagaagataacagctgatatagacactggagattttctgacatgcacacctagtgtcgaactcgaacataagtcttcataggctaatttgaagatgtgttgaattggtcggctaactgaaatatctaccagcaaaacgattgttcctgggagattgatcacattgctgcgacataacaatacaaaagaactcaaacttaatggtttattacatatgagttcgtctaatataagcaatcacaaaatagtttttgaataacatccataagaactgttacaaaacagagtctgaaacaatcatcattctaatctaacaacgttaaaaacatcatcaacaacgacaataacaaaaacacagagaaacagagctttcttgcagaagaaggtaaaggctgaggaggagcagaaccagcagggttctgttttccggcagaagcggtggtgttttccttggagcaagctaagttacagcgactaggacgaacaattcgatacacaccagagctcgtgagtaaatgtatgtccttgttattgtcttgtccaaattagtaattgtaaccaagagcaggtcctgagctagctcctggtggagctgcggtacacttcatcggtgaatccttgctgcaactaaacggtattagagagtccgtgaagtttccactatcttctggtgattcgatcgctgcccacattgcgtttgcataaagatctgcatacaagtacctgagacaaaaaaatatttgaggatttagtgttttagccttttagggtttggaattagggttcatggtttagtttttttacttacgttccataagagcaaggatcagtgttggatcgataaaagtaacctccaatgatggaagcagatccttcatgtttgttcacttcagagtggttgtaaccgagaatggggaatgtcaggtttgaatccgaggaaacattttctccaaaaggcgataacggtgagaaaacatatggtccttcgtaagttctccagccatagtttccacccattgttatgatatcaacttcttcatatgtatcctgttacatttttaacacagcaatcatttcatgagaaactctgcatcatcacagaactagatgcttgagacgtaagaaaaaaaatacacaaacctttccgacatctgcgcacaagaagtaatctggtctttcggaatcgaagctgcagcgccatggatttcgtagccctaaagcccaaatctcaggctgctcattttcatttccttggaaaggattgttttttggtatagagtagtttccccataaaccaagcttagagatttcagatacgcctgcagagtttaaaaacaagagttaaaacaccaaatccaaactcccaaatacaggcttttggttatcgatttcgtcacttaacttggcataacatcaacatcaagcctcaagattttgccaagcaacgacttcttgttctgtgcaaagttgtgagtatctgaaactcctcctccgtcaccagtcatgagatacaaatacccgtcaggtccaaagagaatctgaccaccgtgagatgaagaatacggaagtcccatagtgaaaatcctcctcacttcagatgctttaccaatctttgcctacacaattataaaagcaacaatcttgttaaaatcttgacccccaagaaactcacattttggttgaaatcaaatcttgaatcttttttagttttaaacttaccgttgaagggctcgaggaagtaccgtttgcggtatactcggacacaacggtctgataacgacaaggcgtcgtgccatcatctttaggaagcttcgaaggatcacagttaacatcagaattgcaagcacaacgaccagagcatccaggagatttgactttatcgcagttaaaagacgcgaaaa

SEQ ID NO: 10057 - DNA, 1410 bp, Arabidopsis thaliana landsberg
catcattttttttcctttcaaaacgaaaaacattcaaattagattcgaatgaatattcccatggaaaaaggaatcggcaaagcaaatgactactgaagatcccggagagagataagaacaatcgtacttcagtcccgccgcgagaaccgccctgacgttgagaagaaacggcttcttagatctaaagcttggaaatcaaggaaacggttttccaatgggccttattagttgggcttataatttcgattcatactaattttttagacccacttaatttgattggaatgagttttctgtagactttttttgttcaactttttccgttaatcaatgaaatcaagctaaaacattggttcatgcttttattaatcattcaaaataaaaacacaattgtcactagacttgattaattatttggtatatcagagataatgcttggttttgctggaatcttcacttgcaactaggaagaggtgcaccacataaacacttgttgtggaaaaaggaataagaatcaaatctttgaatatactctcctttggggatgcgtccacacagtctgttatagctaacattcagtaactgaaaataagctttgctccactcagccggaatactccctgtgatgccattgtgattcatgtccaagttattaagtgtcttagcgagcttaaccttggagagatcgaactggaacatgtttcttgatatatcaacgatccatgttgtttttttagctccaaacaagattgaagcatcgccttgaagcttgttccgagataaatcgatgcggtaaaagtcgggattgcctagtgactttggtatagtaccagagagctggttgtgtgataggaaaagactagggacctttcctgaaaacgtcccaaatgactctggtatcggacctatatggaagtttaaactttagtttagtccatgagattaatggatatgactaatagagacaaaaaaaaacagagttattcacctgtaagcttgttcctactaagttcaagatactcgagtttacgtaatgaagagagggaactaggtatggaaccagagaggtcattgaaggaaaggtcaatgtactcaagattcttgagctgactcagaaactcaggaaccggaccggtgagattggtccagcttagtctgagaaaagtgaggttcttgagcttggcgatagtgggttggatgtgaccagtgaggttagtgagtttgcggaagataagggatgtaagatacggtaagtcaccgacttcaggggggatctgaccggagatctcgccgtcttgtatgattagggaagtgacacggtggttgacagtagcctcgccgcactcgaggcagtaccaagagcaacaaaaagttttgggatcccatgaggcgaggtggtaagggttgttt

SEQ ID NO: 10058 - DNA, 423 bp, Arabidopsis thaliana landsberg
atgtcaagcgtggtgactgtggatacacaattttacctggcagaaacctcctctgcatttgccatgtccagagcactgattaacgcaggtgcattgtactggaatttcgcagaaccgtccccaaagacaatcatatttacagtcacattcctctttgattttcaccttcatagcatatgcatcttctggatccacattgcaccatccttgtttgctactgtttgttgttagaatatctaagtctggtttcgaccaatctgtcattttaggttcatcaggattcgtcggcgaactgaaaatacatgtcttaagttaaagagtttttaatcttgatttgagaagcatttgagactgtcaaagaaaagaatcaggtaaaacttacttgatttgaaatccacatgactctggcactggacggtttgg

SEQ ID NO: 10059 - DNA, 922 bp, Arabidopsis thaliana landsberg
  unsure (1)..(922): unsure at all n locations
aaaaaaaaaatttgcaaaatcaaaaactcatatttcaaaacttaggattacaaaatataatattggaattaaagaaaaacataaaatatctaagtctggtttcgaccaatctgtcattttaggttcatcaggattcgcctgcgaactgaaaatacatgtcttaaaaagagtttttacttgatttgagaagcattgagatttcaaagaaaagaatcaggtaaaacttacttgatttgaaatccacatgactnnnnnnnnnnnnnnnnnnnnnnttttgtgccttctccacaaaagcacattgttcttgttgtgtcacaatgtctggaacaaatcaaaacaacccattttccgtatggcatctctggtgttttctcataattgcaatctaaacgaagattttgtaaacaatcttctccaacacagaaccggacacagtagcttcatttacacaccatcatttacaaagcaatcaactttggcttaggaagattaaaatagcataaacactaacctgtaaatccatggaagcaacgacataatccaaattcatggttacaaacaccttgaccactacaatcactcatacactttctctcaccaattggctaccaaaaaaaacacacaaccattataacaaaatcaaagaaacaacattgtttcaagataccaaaacaaaacttacttcaataatgtcaacttctttagcaactgcatcacaactagaaaaccattgtccgatttcagctttccacaaggcattacgataaactactgcaccgtgtgagtcaggaggaaaccggcgatcaaagacaacaacaacaagggactgacatgaatccttagtcacttgtgagattgattcattacttggaccacaaaaaaaatgagcttgtcttacactaatagaatcaaaagaaggcac

SEQ ID NO: 10060 - DNA, 980 bp, Arabidopsis thaliana landsberg
ttgtcgagtatgtttctaagtctcttaatcattttttgctattattcagattcaagctggatcaattcagccccttttggaggggaaggatgttctttttgctgccagaactggttctggtaaaactcttgcttttctcattccggctgttgagttgctgtttaaagagcgtttctctcctcgcaacgggactggtgtgattgttatttgccccacaagggaacttgctatccaggtaattttcgtttttattaacttaaggcattttcaacttggtagcaacaaccatgctgtcatttcgagtagatatgtcctgtaattgttgtaatgcgctaggtagatcagatctgtaaggttctcgtttttcttctagctgaatcattgatattgctttgtgtttgtaaagtatgagcatcgttgtatgttattgcggcctcccattctggttttcactttactattttgatattttagactaaaaatgtggcggaggagttactcaagcatcattcacagacagtcagcatggttattggtggcaataacagaaggtcggaagcacaacgcattgccagtggttcaaacttggtgatagcaactcctggtcgtcttcttgaccatcttcagaatacaaaggctttcatttataaacacttgaaggtactgtcctttccattgttacatttggcgtgttgtctagtcttctttgtgtgatgtaaatgcaaaaagctttactgttgagccacatggccataatttccagtaaacaaacaatattatgtaaaggagcccatagataaatatttgaactgttgacagcagcttatgctatattatttctgttgcatcaatgttagacttacaaatggaatactgccgatgtgatccacacatattccgtggtttgtttaggtttgtagcttgggctgtagcaatactaatagttgaaatgtaaatacacagctttatgctatagatga

SEQ ID NO: 10061 - DNA, 1683 bp, Arabidopsis thaliana landsberg
  unsure (1)..(1683): unsure at all n locations
aacccttggttatgttaaataaatatgaccgtaccaacgagattagcaatatctcgtgcatctacattcatcctacgattttggagtcgaaaaattgaagttattcaatagtttttgtaatatagagctatatatgttaccaaaagtaaatgggcactacttatatatatcaagaaacattacacctcaaccacacgaacacacacaaacgaaatatctctctgaatactctagtcaagattactaattaagattactctcgtaaataaccaccaattacgaaagtaaaactggcttagcaaacaaacccataaataatttgaagtgcttctctagtctccaactactattactactactactagttgatgacgacaagaaaaaagaagttctgattaacttatcaaaccaaggagtttgttttagtggacgttccatagccattcatcaaaccattccacgacgaacctaaaccgttgatataaccaccattgccgtatccaccaccgtcggattttcctgcgcctccgctaccaccaccattggagtagcattgatcttgctgccaatcaagcgataacaacttcggatttggcttcacatccattattgttgctaccctttgatgatcttcttgatgattgtaatggtgatgatcataattagatagcataagtctttggcatgtcgatatatccatgagaccaccaccatttccattgcctcccgtagaaatcccattaaatccaccattgttgttgttgttgttaagacctacaccgtgattcagacccatgtgatgattatgatgatgatgatgatctccgttacttccatgattaaccatgaccaggttgtcattgttcactcccatgagatcaaacttactgtccaagaaatcaataggtctagggctctgcgaaagcaaaccgccatacttgctctccaagaaaccaacgttaccatgctccggagttgagtaagaccccatcatcccaccaaaatgtgaaaaccctagaggagaatgttggtaattttgatgagaatgtgctaaagccataagatcagaggtattggcggtaacgatgttggatggttttttgccggaagaagtggaggaggaggaattagaggaagatggtttcttgtttttacggcatccaccaccaaccggaatattccttagagttccgccttttgtccagtaacggcgacaagtcttgcagaagtaacgaggctgagagaggctgtagttattgtagtaacagaacttagtatgtgttgactcgcaacgaggacacttttgaggatggtcgtgaggtggacgcagcctccttccaccgtccatcagagctgcagcggctacagccacggccgaggcttgtggtctagtgctgcaagctgctagtatgtcggctgctgacggagaattcgttgaagagtctaacatgcttcctcctgatgactcggattcctaacatttcaatttacagaaccatatgaaaatgtggaaaataaggacgtgataaacacaaacaggtcttccatttgtatattgacatttaccttagacatttgttaagaaatanattttgcttaaaatgttacaaggcttatgttcattttttggaaaagaaacacaaattctaacgatggagctaggtctaagtgaagatacctgga

SEQ ID NO: 10062 - DNA, 1716 bp, Arabidopsis thaliana landsberg
aaacatacacccatcattttttaatattttcatccacctataatttgctattcacattttttaacttgtaaccatataccgatatacgggatatgtccacctatcatctcgaggaagagaaggaacaaaaatcgtcggtaaccaaacaaatccatctagaatttcaatctaaaaaaaccagacagaaaaacagatgttagaagctggcacagattggactgacgtggcagatatatgaagatctggttggtgcacagatatgccttgtcatcgccatactcgacacaacctcttctcacgttcaccgcctctttaactgttttttcttcttttttccaattatcacttctcttattcttatttttattttcattttctaaatttcaccattaaatatttttttattagggaaactaacgacatttatgatgcttaaattttaaaaaagttttaaaactataataggtttttgatgtctttgatggtggtggcgcgccgatgcataaagattaaagtgagttagtgtgcatgttctttttttttcagcaagaagaaaaaaaaagaaagaaatatgatcaattaatttacacaaaaaatcagtaatagtttagatatgtaacttaattataattgagctggaatgtgaaaataaatagaaacgctaaagtcgtccattacttctaaagttttcaaactaactagttatgtttataattcaacacacaaaaaactagttatgagaattgtagtttatatctggattccattattctattggattgttgaatttcttggatccatcttcataatacttttttatcatattgctaaagtaaagaaatgttgaatagtgggagtggagggagatatgaagctttgacttttctcacgtgagtgagaactgggaagtggagaaagctttgtctttaaacgtatatctttgacagtttcgtgacataaaacattgaccgaataggtccatgagatatcgggtcgggtcgggcgtatcactttacgtacggctaatgcacggcgcaatacgtggtccgatgaatgcggcaatatgggtccttaattttttttgctttttttttttctgaaacttgttgaatttgtttctaattaaaaattcactttcttctatgtaagtgggagtctttctctacctcctaaagcgaaatctcttaaaatttagggggtaaatacattggcggcaatcggtaaaacatttttgaatggaaacatatatctataaagtgcatctacttatcatatatacttaatgattaataattgaggttagtattgagtttttagcaaaattaaagatgtgaaagaagtcgcaaatgacaatggcaatgacatgcatgaaaatagtaaaagtgtttaggaccaaaaaagggtaaagaagtaatgatggcgatactgttgagcttagcaaattccgttcgtgattgatgctagctacaacttgttttttaagcaaaccaaatttattctccctttcacttaacccgattagaaatagactcacaccttttttttatagattaaccaataaaactcatatatctggatgctctgtaattttcttatatctcaatatcgcagaccagatttcatatatttttggcggatttaaaaagtttaaatttggagtagatgactgaataacatttgagctaaccacatttgggtattgtttaaaatttgtat

SEQ ID NO: 10063 - DNA, 1094 bp, Arabidopsis thaliana landsberg
ggttgctttttaagcgaacgtattgtgtaagtgtacatgtcatatctttacatttgattattttttttattttgtttcgtacaatagtaatttttctactatacgtaatatcaaagtataattgcttactttaaaatgtgaatatataggcctgattttgtggagtatgcaaacttcacgttccacgagtatggggacaaagtgaaaaactggattacgttcaacgagccatgggtctttagccgttcgggctacgacgttgggaagaaagcaccaggacgttgttctccttacgtcaaagagtttggaaagctttgtcaagatggacggtcaggattcgaaccttatgttgtcagtcacaatttactcgtgggtcatgctgaagctgttgatgctttccgaaaatgcgaaaaggtaaaaacagaataccctatttaatcacattcgtttctccacagtgacatataaaccaacttttttaaaagttttacttattaatttttcggttttttgaaaaagtgcaaaggtggtaaaatcggaatcgctcatagtccagcttggtttgaacccgaagatgtggaaggaggtcaagcgactgtaaaccgtgtgcttgatttcgtcattggctggttaaaaacacaaatcatcaactcttgatatattttaatggtattcttgattatatacataattgcaacattgtgtttttctttttctttaggcatttggatcctaccacgttcggggactatcctcagtctatgaaagacgcggttggatctcggttgccaagatttaccaaagcccaaaaggcaaaactgaaagattcgacagacttcgtgggaataaactattacacttccttctttgcaaaggctgaccagaaggttgatagtcggaacccgacttgggctacagatgctctagtcgaatttgaacgtaagattcgtttatttcgttattccttacctaatacaatagtacatcatgttaaatgatatcctatgctatatgtcaatgtgttaacataaaaagcaaaaccaaaactttagtaatctactaaaactaaattcttaaaaaggttttcaccgaaa

SEQ ID NO: 10064 - DNA, 1490 bp, Arabidopsis thaliana landsberg
tctgcgaaaggctggctttagttggctcccaaccaaatcctattatcgcctctttatttgccctcaatatacaactttggtttgtacgaaattattattttatttagttagtgatcatacttcttcatatggaaacttataattatagtttatgaattagaaaaccttattttatttttctagcatctggtatttcttcggcacatgcatgcatgatgcatccatggaccataaatacgaaaacaaatccatttcatatatatttacttcaataacaaattcgtttatgagtgatgatactattaattataatgtatttattccatagttttttttctggtttatgtaaacaaacttacatcaataacagagataaattcccagaaacatttacatgtgtatgaaactctaataatccgcaatgaacttagaaatataaaccggtaacaaaagaaaagagaaatttctgaaaagattatatatcagaaaaagaaaaaaaaaagaattacagtgagactgacagtgatagattcatgagcgccggcagcgagtgatggcgctgcagccacgagagtaaggattggcctgagcgccacgtagacaattgtagtaagatgcgccgcgacgtgagcacggaattgtgtttctcctcagcgcaccatagctgatgtacctcctcgtagctaatatgcgccggttgatctctgagtccatctcgaactcctctcccatttctcctccgccgtagaatagatctcctccgtctccgagggcggcggaaacagagcactcggcaattgtaccgcggcactctgtttcgaatggagggaaatctccggcgaattcggtggattgagaagatacggcgacggaccagttatgaacggcgagaatgagtagaatcgcgaatatcgccgccgcgccggagtttctggagagtcctctcattttcttctgtacactgtagctttagctctctctgtgcacgaactatgaagaaagagatagagagataaaagaaaaggtttttaaaagagaaggagcttaatgaaatgccactgaaagatggaagtaattacgaataataccacttggtgtcgtaaagagacagctttacaagtggccttttgttagcttcagatctaaggatgttttaatgcgccaagtgtttttgatggagacatccactacttttttttcttttttttcttaaagattttgttggtcacttttacgatatactaaaatcatattcaccaaccatccacacaattttacaaattagtaaaatttcttttgttatataaatgaataatttacattttgctaatttattttggaaagtatactgttttaaattgttataatttattagaatcgtaagtagaaatacagtgttcttttctaccaaaaaaaaaattaataaaaagttctgtttatgtttttgcttatgtttcaaggtactactatactaacaagaaattaaaacg

SEQ ID NO: 10065 - DNA, 1006 bp, Arabidopsis thaliana landsberg
atttaatactatttctcttaatacactatctcattattcaaccgataaataaggaaaataccaaatttgatttcttcccatcacacaaatatttcctcttcatataaaaaaaaatgaaacaactacaattttaatatccatataaattccaatatgaacacctggttctttcttcagcacatgcaaaaagcacccatacataacatttgatatattaatcagaaatgtataatacatctatatatatttctgttcatatatcaaacttatattgagactgtatgaaactatattgcaatgcaaagtataaacatagtaaacaccaatcaaaacaaataataatctgaaaaattgtataaaaatcaaaacaaaagaatttgagagtaaaaattttaaagtacatagagaaagagattatcgcctgcaacgagtaatagcgctacaaccacgagagtaaggattagcctgagctccacgtcggcaattgtagtaagatgcgccgcgtcgtgagcatggtactgtgtttctcctcagcgcaccgtagcttatatacttcgttgttgctaaaatacgcctgttgatctcagtgtccatctcgaactcttcctccgccgtggataaggagcactcggcgatggtaccgttgcattttgactcgatcggcacgaaatcgccggaggattgggaggttacggcggcgaataagaagtggacggtgagaattgcgatgattatcgcaacgggttttgtggagagtcctctcattggttctttcttcttctttctctgagggttttttttttggaggtttcaaaagttttattgaagaaagagaaagaaatggtttaaaagagaatgagttattgaaattgccactaggatttatattatttacgatttatgccacttgacactaaaagttgtttaacgcgcttttcccactaaagtctaaattttcgtttttgactttttattttttattaaattaggataagagatgaatgac

SEQ ID NO: 10066 - DNA, 853 bp, Arabidopsis thaliana landsberg
aagtctttgttctgttcttcttgcagggggcaatcaggaggccgtggtgaaggaagagtccctccccgtggtagagggcctccccgtggtagaggcaatttcagaggtagaggtgctcccagaggtgctagcagagggtttcaaccaagaggtggtcctcgtggaggcttcagaggccgagggagggcctagattcatattctatagccttaagctatctttaaattgctttttttaagaaccatattgatgataactgttttcttggttctagttttttgataccttggttttattaacaagagagtaaaaaagctcattaactattagagtccaaggttttattacatacagaagcgtcttctagtacttgtaaacacatatctgttaactcaggatgacctctaagccaaagtaggaggataaaacaaaaagtagattaaagtttggctcaattcttattcaggagctgctaaagagattgcataagagattagataatctttaagctccccagcctctgagaatggtagcttgagccacacgattaacaccgagtgtgaaagctcccatccggagatcgcaagagtgagttttgcacatctctttcaagtccttgaaagagcgagtcatgtaagtctttagctcatcgttcaccttctcttcctcccacataaagccttgaatgttctgcacattaccggaaacaactaatctgatcaaaatcggttttgttcgagtacttggtctgtcaaaggtaagttgttgagagactcatacatacctgaacccattcgaagtaacttacagtgactcctccagagtttgcatatatgtccgggagaataaccac

SEQ ID NO: 10067 - DNA, 1141 bp, Arabidopsis thaliana landsberg
  unsure (1)..(1141): unsure at all n locations
tgaggtcagtgtcatttattgttgcagtatcatattttcaagcactggtatatatacttatattgctgttttatatgcaggtgaaaaatccccggcgggatttaccgctcggtattgggatttcgctcctgctttgttgtttgctgtacatgatggtgtctgttgttattgttggtttagtgccgtattatgctatggaccctgacactccaatatcatccgcattttctagtcatggaattcaatgggctgcgtaagtccgttaatcggttaagatgcaaactattcattggcaggacttgttttgagtttgatttgtttttcccctgccattctgtcttatagatatttgataaatttaggtgctgtcatggctctctgttctgctttaatgggctccattctccctcaggtaaactagaaacataattcaagtgtttagatctgtaaaattaaggatttaacaatgagaattttgaagaacatatacacgctatgtggatttcttttgtaccaacttattcaccaaagagcttattcgtttttcagccgcggattctgatggcaatggctagggatggtctcttgccttcatatttctcatatgtgaatcaacgcacgcaggttccaattaatggcaccataaccactggtgtttgtgcagcaatcttagctttctttatggatgtttcgcaactggcgggaatggtaattaagatgcattatgattcattaatgttacctggtccagtacttgaatcaccacttagcctgtaactagaatttgacaagctttagttggtgtaggtgagtgtcgggacacttgttgcatttacaatggttgcaatatnnnnnnnnnnnnnnnnnnatgttgttcctccagatgaggtactgataagattggaactggtaaactctatctttattcgatttcaccttagactacaatatagaagattcttgattaaggagagaagtctctaactctcttccaatggccaaaccagaatccccaactcctttataatgctacgcactagtgactagactaacaaggcttttatcangtacctcttccctcatcacttcaagaaactcatccagtcacgtcggaactttcatccgtagtaaacaaccttta

SEQ ID NO: 10068 - DNA, 934 bp, Arabidopsis thaliana landsberg
atcaaatttaacataatagtataagttttatatccgacccgcttctattcgattcaaaaaattcagatattcataatttattcataattttatggagcaaatcaattatcaaaaattaatcttcattataaaaaacaaatgacaaataacaaaattttaagagatgaatatccgtcccgatatgtagttatatgtttataaattgtataattattttacagctaagctactttaaatttttaatcatcttattaattatttcaatagtaaagattaacatataaaggtttgacaaaaaaagaaaaaaagattaacatataaaaaagaaaaataaatttaaaatttatcttgtcatcttggcctaaattttgaatacttttaatatttttaaaattttcgataattagtttctaatcttttaaaacgagtccaagatcgtggtgtggtggcaaaagtgtttttgattatgagcgcgtaagtattatttgcgatatgtgcggctggtctagcttgagtcatcagcattcgagtattgagaccaaattatacgtggcattaactgtgtcgtacactacgatgaccaaattttgacttagagacagaagcagaaaggtacacttcatttcttattcactaatttgacctaatttttatccacaaaaatgagaacctccgctttttcgaaaaagaaaatgaaaacctcatctacctcgccgattaaagacaaagagccatgaaactgggcggatcttcagttggagttgacgtctttgatcctgatccgccttagcgtgcctgataaactaaacaacgcgcagaaggtgtgtagagggtggcgacgcgtaggtaaaaacccttggatgtggcggaaaatcgacatgagaggcctgacccgaaacgatagaaaccttgactggttaactagcatgtgccc

SEQ ID NO: 10069 - DNA, 1691 bp, Arabidopsis thaliana landsberg
ggatgtgaagaactcaaatggcttagctgacttgaatgagccactcaaagggcaagattcagaacctgctgctctgtctagggatatgtattctcattatgggagaaacaatgctcatgttcaaggtcagtggttggagaaaaatcgaactcaaaatggatggatggtccttgaagcaggtgattttttttccttaatgagtggctagttacatgctcttacatttaagtgtctttcctgctcagtatatttaatgaacgcaaaatatgtgatcgctcatagaatggttttgaattttgtgctgattcagtaatatgttaccatttctgcctatcttctatttctcaaatgttttttttgtggctgtgttaatagggcaagataggagcactcagagagatcaggtgcatctgccttctcattcaggacaagtactttctaacaatgcatttcaacctcagagctatcctacaactgatcacagcaaggtcaaattttccggggaaagagcacatcgtgagctagaagttcgctcaaagactcctcaagtttcttatgatagctacgttgaatcaagtgtggcatctactgctccaagatcagtcaatgactaccgccctgaatttttcaaaccattgacccattggtcttcatccgggaggactatgaccagctcaaatcagaaatcttatccagttcaaacgaatccctacatgaattttgacacacatgcaagaccagatttgagttttgagaatagaagccatgtctctaatgggctttatcaaggattctcttcagggtcaaagcagtctttctataatttcccatcaaccggctttaaaccaaatgcttccataggcgaggtagcgaacagccacagttttgtaaatcttcaagggccaaaaaggcaggaatgctcagctgggttgccctggctaaaacctcagcccccttacagaagtggaatgtccaatggcttctttgatctgaatgcttcgacaaatcaattcatggatggaactgacgctggggacgacttgacttgtgcttctgttctgaagggtttgcgatctgcttcatactctaataatgcaaacatgggaagagttgaaacgaacaactctcagagtagtactaaaattattgggagcccaatctttgggaagcaatttgtttgcaagcaggagcgtacgccccttatccctcattccttatggattgctaatcaacacaaggaagtaagtcacttggtaaagcgagaccttgatatcaacctgccatgtgatgcctcggtttctgttgaccagcatggtgctaaagcctactatgtagacaagaaagaagggaaaaaagctgccaacttcagacactacattgatctgaattcatgtgctaatgaggatgacgaagattccggcttcctttccagtctgagtgtgaaaacaaaagcaagaacttggatagatttggaagctccccctactctcgagagtgaagaagaaggagataactcacaggacaaaacaaatgaagaaacttggagaatgatgcaaggccaagacggaaactctatgaatgaactcatcaaggtagcagcagaagcaatagttgccatctcaatggctggtcaccaacgccatcctgatgacgcagcttcctcttcaactgatgcggcttcaaaaagcccg

SEQ ID NO: 10070 - DNA, 1320 bp, Arabidopsis thaliana landsberg
ccattcgaaatttatgaggaatacgcgaaaaagtccgctgagcacacaaatagcagctttcaggtcttccttcttcatacttgtctgattctagctagctagctaggtttcccaaatctaagaaattgtttgacagaataataaagaaagttaatatatttcactaggcagtgtatgtgtttatacacacactcaccgatgcaattaggattcattacgttagagattaattaggattacgataactatgaatattccacatgagtcttttatgttttaggattcataacacaatactaaaaaagatttgcattttgatgagatgaacttaaaggattctcggagatcgttatgcgtatcggcttggagaatcgaagtaatggtgctcgaatgatataagatttatcgatcaaagagaagtcatacgttgtgactagatgatgaagaaatatagccatctgaagcctagcaaactctgctcctgcacatagtcttgcaccaccaccaaacgccatgaacgttttagagccagaaagcaattctttcccctcccatctccatggattaaactcacatggttgttcatagatttgagggtcataatgaataacagatggaacaaccaatacaatccatcctgctggaattgtataccctgcaactacaacacgattttggattggatcattggtaacaaacttatagttattttcatgacgcaaaagagagactcaaacttgcctttgatctccacatcactcaccgcctttctaaacatagcaggtgacaaacttcctaaacgaagagactcattgatcacctgcaattgcaacaatcaactaaatgttgagtttggaatttcatttatttaacaagtacgtttataataagaaaacaaaaagctaccatatgggtgaaattcatcatggatctatattctttccaagtaactccagattctttatcagctctgttttggaggatgctctcatgctctctctgtttaacataaataagcttaagcattctcgtttcaaagaacaaaaggattcaaacttcttcactagagatatctctctaagtaagtttaccttcagctccataagcactttggggttttcagctataaatttcacagttaatgcagtcatagtagaagtagtttcataagacgcaatcagtaaactcagtatcagctctacagatctttcctcgatgaccgtatcgccttctttctccacctcatatatcattgattgcatgaagtctccatattttaattcatccgatggtccttctctcctctcattgaacattctt

SEQ ID NO: 10071 - DNA, 1534 bp, Arabidopsis thaliana landsberg
agaaatattaataagtaagtggtcataatcaaacgtatcttgcctgaaattttatgtaaataggatcttgaagtctctcatctcaagcagcaactcaatgaatacaatgagaaaaggcaagggtaagcaagtgttgcactctgtcaaaccttcaatagcagaaaatatgggttttggccaattcgagatgtttgaccataagttcgcttacaatatctcgatgcagatggatagaggaaatcgaaggaaagcagacagaattagttactgcgcagataaaactcgcggaacatcggcagtatcagcagctgcttaagaaagagagtgcattactaaaggttaaaattggcaccggttttttattttagtgttacgcattatacaaaagtcgtgacagaccatatcttaatcttcttactttcaacagaaggagaattttagtcataaaataaaagtgatggaacttgaaggagaagtgaagaagctatcgtctcatcaaaaccctgagtggagaactcgtgatcaagctcgaatcaaggcaagaaatctctaacttctctgtgtatttatttaattactcttttttattctgatacttattttctttggtgtcatatgcaacaggaagaaaacaatgtgttgaaacttcagctagatgagctcaatttgaagttacggagagcagatgtgagtgtttctcgtgccaaagaagagcttgctttttaccgagcatcttctgtaaagaacccgcattcaaattttgacaagacgcatcagttaagtaccaaactgaaggaaaccgaagaggatagaatgcagcttgctcaggagctattaagtctctgcaccagtatcctaaaggtaagaggaacagtcatagtttttcactgtaaataaactccaaaacgtacgtcaacataatagaattctaaacatctttttgtggactgaaatttccctcaggcagcaggtgtaacaggagaagactttacagacataaaccctgaagttgctgaagaggcacttgaacagctcaagacaaaacttggtttacttgaaagtgaagtacaccactttaggttaaaggtaagaagatatagttccatttgaagcttcaatccctgtagcttatcccaaaataagtattaagagatgattgaaaaaaatcatgatgcagggaaaagcaaagagcagaagaagtaggaatcctgagagaaagatgccttcaatgccttctcctcgaagatcatggagtcagagtccaagaagtatgtctcaggttccttttttctcttctttagacaggtgaaagaacggtatgtttgtatgagaacaatcagtcagtgtatatttatgaatgtttcatgtaactgttatgcgtgattagtaaataatttttataaacaattcaacgaaacatatattacgagcacttcttcttcttcttcttcaattactaacaagagtacaaatcaaaagccagcataacaaaaggaaacattcagaaacagagcacaaattcaacacgatgatg

SEQ ID NO: 10072 - DNA, 522 bp, Arabidopsis thaliana landsberg
atctctacggactttgggaagttcatgtacatgccttaataacaaacatcttttcgatacaagacacagaaaaccaacataaacgagatatttatagcccacgagtctataaaactattggtttgataagggaatcattgatctactgtgtatcaaactatacttaaaagtttacataccaaagcaaacatttactttctagtaaaaatattgtaagctacatgggtgataggtctatgtaaaaatttctctaataagctcattctgccatataaaaaaaacattttgagtttacgcaatcaataaatgtatatcacaaacttggaactggagaaatgagttggagaaagataaaatgctccttaacacatggcattgcaagtgaagggatatggatcaatggggtttattattacttaggtgacatgtctaagaccatgactgctactgcttttgtgatagtatgctttaatgttaggtctgagaaattcgagtttatttatcgagagggctatcataact

SEQ ID NO: 10073 - DNA, 701 bp, Arabidopsis thaliana landsberg
ttaaagtcaaatgttattttcctctttcattacttccgttacgatcatctcttctaataaaccagtgttgtttaacacttcttagaacaaaatggaactcagacagtgatttccagtcggacataaaatgtttaacttacatgcgtctggtaaagattaaatatattaatataaagattgaataagtaaacttatgaactgacaagattatttatcaaagatatgtttggattttggtacaaatattatcacaatcacaaatattaatatcaaaataaaacaaaagttaagcataatttcatttttgaccttggagaagaatgcaaaattcggtcaagctagactgtctcgtacttgcaattgctaataaatattacaacactcgagcaagctttactgtctcctcctgtattaatctaaagtggttttgttcacttttaagtaaaccaaccaagttttgtcttgatgaagctggagcaagctgcatactatcctcttcggtttccttcagtttggtacttaactgatgcgtcttgtcaatgtttgagtgtaggttctttcctgaagacgctcggtaccaagcaagctcttctttggcatgagaaactcgttcctgttgcatatgctcgccggaactttaaattgagttcatcaagctgaagtttcaacacattggtttcttcatgttgcatatgaaacca

SEQ ID NO: 10074 - DNA, 1438 bp, Arabidopsis thaliana landsberg
cgacaaagactgaccagagaagaaaatatgaaagcgaaattcaaagatgaagacttatgattcattgctgggtcaaactaaacacaagatttttccttcgctcatccttacaaaacccgtctctgcttttagcttttcttgagcagatcataaacagaaaacattaatatgagctctaattgtagttgttctcttttgagtctcttctctctccttctgatcattgatctcaccgttgctagctcttgtcctaagacatgtggaggaatcgacatcccgtacccgtttggaatcggaacgggttgctatctcgagaaatggtacgagattatttgtgtcaacaactctgttccttttctttccatcattaacagggaagttgtgagtatctctttttcggatatgtatcgccggttctttaacgtaggctacgggtcaattcgcataagaaacccaatagcttcaaagggatgctcaagtggcggacaagagtttggatcacttttaaatatgacaggttaccctttttaccttggcgacaacaatatgctcatagcggttggctgcaacaacacggcgtcgttgacaaatgtcgagccaagtattgtgggatgcgagtctacttgcagcacaaatcaagatatacctataaatgattatctcggggtactctactgtaatgctaggtatggcgattccgagtattgtaaaaatatttccattatgaatgatacaagctgcaacggtattggatgctgcaaggcaagtttgcccgctaggtatcaacagattattggtgtggaaatagatgatagtaacacagaatccaagggatgcaaagttgccttcataacagacgaggaatactttttgtcaaatggatctgacccggagaggcttcatgctaatggatatgatacggttgacctaagatggttcatccatacggcgaatcattccttcataggctctctaggatgcaaaagtatagacgagtacacaattctaagaagagacaatcgtgaatacggaataggttgcctttgcgactataactctacaactacaggctatgcaacatgttcatgcgctagtggtttcgaaggcaacccatatattcctggcgaatgcaaaggtatataagtaattgcgctaattatcctagttttctatgaccatgcatgataaaaatattccaacgagatcattgtttgataacatgttaattttaataaaatcagatattaatgaatgcgtaagaggcattgatggaaacccagtctgtacggcaggcaagtgtgtcaatttgctgggcggttatacgtgtgagtacacaaatcatcgaccacttgttataggtaagaacatgaaaattttcatctcaagtacactcacatctatctaaagttttcttgtatatatacatatataaattgtg

SEQ ID NO: 10075 - DNA, 1226 bp, Arabidopsis thaliana landsberg
gtccttgaaccccatcgagttcaaagctgaatacaccgcatcaaccttcacaaaacaaaattttaccaccgtaaattaaaccacaaaacagattaattatatcatctatatgtttacttctttttatatgttacaaataacatttttaatttgtattgtagtctcttttcctaatagtatgaatccattattgcaaatttcgatatcaattttctaccttccactaactttataaggtacactcactttgtgtcctttaacgatttatactacttttccttctagagtacagttttcactttccattcatttgacgtaacgaatatgccaatctctttaatttaacaaactttttttttcttttccgaaaccaaacttgagaaaaattaattccatttatcaaacatacaaactactaaaatatcatctcgttgtactttaataatataccaaaaagaaaattcatgaaataaaaccgtttatccaaaaaatttgttgtgcactaaaatttcggaacataacataaatagtaacttctagtaaaatagctaaaacttaaaatatgtcaagaaatgtagaacctgagcatcgaacatgttcatatacttgaggttgctgttggggtcgacacggccaggattggcctgaaacaagcaataagccaaagtttcgggtctccggtcatcttggtaagcgaaaaacgggtacgggttaaccgcgaaaggcgacccggtttcactattaaactctagcaatcccttcaatatatcagcatgctccggtttaaataccgcggtcgaaggagggtctgacccggctagaaccgacattatgtgtactgtcgagactttgatttttccaccaccaagagacacagcctcaagggcaccttggacatttttcatcgccggcaaaagctgcgacatgagactattgtcgccgtatgatgtgatctcatttcccacggcaatgagaacaatcttgctcgctggataataaggtaccacgttggtttcgacccagcttcgggcgaaactcgggtccgatgctagaccgggtacatcgccgttagacgccccgatgacgatctcgatccccgtgtttgctagggccttgattacacccgggtcggatccgtaaagacggactttttggaaagttgtggattgaaggagctttgcactcgctgacggaggtggaagattgtcggcggttaggccgtagtt

SEQ ID NO: 10076 - DNA, 771 bp, Arabidopsis thaliana landsberg
ttttttttattggataatagaactgtttaatctattgaggattaattcatagagattttattttatattacattaggtgtagagtaacatttatattcttcatgccttcatagtaggtggaggataacatttatattcttctcacataagataagaaaaagaacacgtgagcttctgtacacgtgaacgcgtgatccaccaccggttcgttctgcaataccgtctcaagtataaaactaaaaattgatcgacaaaaaaaaaaagactatatataatgcctcccaagtctcttcagtgtcatcaaagtataaagtaaaaacaaagactcgagttaatatgtctagtactgaagaaatgtcatcagtcaaaaacacaactcaggttattggcgttgacccatcctccaccgtacgagttaccatcgttcaatcttccaccgtctataatgataccccggccactttaggtaactaattaatccattaattattccgctatatatatatatattttttttttttgatatgtaacatttatcaaaacgttccatctcaaattgtagacaaggcggagaagtttattgtggaggcggcgagcaaaggagcgaagttggtgttgtttcccgaggcgttcatcggcggttatcctcgaggttttaggtttggtttagcggtgggagttcataacgaagaagggcgtgatgagtttcgtaactaccatgcttctgctataaagtccctgtaaaatcatcccgtgactctattttttttt

SEQ ID NO: 10077 - DNA, 604 bp, Arabidopsis thaliana landsberg
ttgcttctctcaagtctctgagtgtcatgaaccaaagtataaatcaaagactcgagttgatatgtctagtactaaagatatgtcaactgtccaaaacgcaactccttttaacggcgttgccccatccaccaccgtgcgagttacaatcgtccaatcctccaccgtctataacgatactcctgccactataggtaaccaatccattaattcatcctctgacctatttttatttttattttttgatatgtaaaatttatcgaaaacgttccatttcaatatgtagacaaagcggagaagtatattgtggaggcggcaagcaagggagcagagctagtgttgttcccggaggggtttatcggtggctatcctcgaggttttaggttcggtttagcggttggcgttcataacgaagaagggcgtgatgagtttcggaagtaccatgcttctgctattcatgttcctggtattactatttacttccattatttgtattctcttttattatcatcttatcttgtattttatccataaaatgatttttgatacatttttaaccaatcaatgactttgaaccatatcctcaattattgcatacttatcctag

SEQ ID NO: 10078 - DNA, 525 bp, Arabidopsis thaliana landsberg
tctattgcgagtcaagtctctcggtaatatcgaagtaagactcaagctcaagttaaaacagaaaaattgtcaacttcagaaaacactccgtttaatggcgttgcctcatccaccattgttcgagctaccattgtccaagcctccaccgtctacaacgatactcccgccactctaggtaatctattaatcattttcattttaggtaggtcaagtttacgtaacgttctacatgaattttgttttcagaaaaggcgaacaagtttattgtggaggctgcaagcaagggatcggagctggttgtgttcccggaggcgtttatcggtggttatcctcgaggttttaggtttggtttaggggtcggagttcataacgaagaaaggcgtgatgagttccgcaagtaccatgcttctgctattaaagttcctggtaaatgctattctgctgacttttttctcttattgcttttttgggacaacttttatctttgataaaccgcaaaacaattgtgcttgattatctgaatat

SEQ ID NO: 10079 - DNA, 1207 bp, Arabidopsis thaliana landsberg
aatttcttactcctttggcatttagcctctctgcataaagttccattgtaaaatgcttttaactaaaaggtctctaaacaagaatgatactccaaagaaaggaaacgtacgtgtaatctgtgccctcggggaaaagagcaagccataaagcgtctcggggatccttaaaactcgaaactatctgtctcaagtttgcttcatcgacttcccatctcctctcaacaggaataaactcaaagaggtgaaacgcccaaccaaagagaggtaatttcatcaaactactcttaagcacatatttgatattcccaatctggcctttacgcagtgcaagatcccagaagtacatccaatcaacttctgttcggtggtttgcaatgagcaatactcgatcctcgcaaggaaccttatcaccagagaagataactttggttttgttaatcttctcaaagaggaaaggccacaaggcgagccacgagccaaagaagaaggaaacacatttacggctatagcgaatgctgaaaagcctcaacactacagctgataagaacccccagaatatcaacatcataaaagctgttgaaactaacaccatcagacatattatacctcttaacactctaatcagagacaacttatcagaatttggtacactctttttttccattttatacaccttctagtcttctattcttgatgcaatgaatcacaaagttcatgaatttcctgttaccagaatcaccatcagagctcatatggttgaacacaacatacttcacctgcaggtaatgatcaaagacacatcaaaataagaatcgatagcaaagtactttatcaacagaaaacgaaaacaatgtcttgtaatttaatagacttattcaaattcatacaatctgattaatgttggattaaaataaagaagaagcttgtattctcaaacacatatatacattgtctaaaacaaaaactctcaccgcgataatcaagattcaagcacaaatctcagtgaggattaaaaaagccaatcaagaaaacagcatttgtaaaatttattattggaaaaaagaaattcagacagagaaaggaaccagatagaagaagacagcttaccatggaactgagcttccaggtttatatttataaacaaacagtgcagaagaagaagaatttaatggccgagaaaaatatcataaggactcgatcgttggtg

SEQ ID NO: 10080 - DNA, 938 bp, Arabidopsis thaliana landsberg
tgcaactctcatctacaaattataaccaattatatttttaatatttgggtaccaaacaaagatatcagtctagatagatgctggctaagacataccagtctccttaaggtctgagttgtgttcttcttgtctttttcttttcctacccttcttttcgctattcttctcctcaagtacctatatacagataataaagcatcattttgataaataccaatcatgaacaccaccatctagtgaaagagagattttcaaacgaagaactaactttaccttctgtcgagttgaattttctaagccattttcatctctcattggctcaagtgtcttcttgggggaagactttccttgagtatcagcctttgtttgtttcaacggtgttgcagttctgactcgggaaggggttacaggttcaacagaggctgaaaacattgactttaaagatcagtttcatgatgcagaaactaaactcaaagagctgaacaagatcacaattacctattggtttcacttgtggggttatgaccagaggagtattatcattaataacatcattagccctcttacttctcaattctccagtggcctatttgcagaaaacaaaatttgttaattcaaagacatgagaaaagcaaacgaaattagtgaatgcctaactcacagctctactttcagcttttgtgagtgtctctgcacttttctcaagattcagtgatcttctggcatgttttgtggtccttttaggagtcattgacttagcaccagaacaagagcgcattggcttcgttttcatgacgttggaaggagtttctatcacaggggtttgctgaaaaaaggacaaaacacacaacagcttcaattcatcataccaacaaatcaaaaaccgaaagaaaattgattgaaattattgaatatgatacctttggtccgtcctgccg

SEQ ID NO: 10081 - DNA, 512 bp, Arabidopsis thaliana landsberg
gaatcgcgaatcaactttactaacgcttcggcgactccgttctcaaccgcaaacgcgtgaactcgcgtttcgtctaatgagagaatctccttcataataaacgcggcgttttgacgaacggaatcatccgtactcttcaacaaacccgccacgcaacgaaatgatgtcgcagacgcgagtttcgaaataccctctaaaccaatcggaaacatccacgtcagcaaagacaaaatctcattcaacataaacgttaatttctcatctcccgagaacttgtcgaaacaatcacaaagaacccatccgacgctgttttcattaacacactttcgatttttctcactctcatcccctaacttcttaatcttctcaataatcaccccacatttctcgtaatccccacgccgcgtcgcagacgataattttctactaatctcgtagacctcacatggcattaaagggacacgtggcgtcggaatacgttgaatcaacggcgatcctttctccacgcacca

SEQ ID NO: 10082 - DNA, 534 bp, Arabidopsis thaliana landsberg
  unsure (1)..(534): unsure at all n locations
gcaagttgttggagactttggaagagtttgttagagatagggcaaaaagagggaacagtcccgagaggaaagagatcgaagctcctcctccggtagttgaagaagaggagcctgagcctgatatgaatgagatcaaagcttcttcttcctcccgagaattacactcctccacctccgcctgaaccagaacctcagcccgaaaaaccgcaatttaccgaggatttagttaacttgagggaggatgaagtcacagctgatgaccaagggaacaagtttgcgcttgcactctttgctggtccaccgggtaataacggaaannnnnnnnnnnnnnnnnnnnnnnnagtgacctctgcttggcagaatcccgctgcagagcccggtaaagcggattgggaattggcattggttgaaacagcgagcaatttagaaaaacagacagccgctttgggtggtgggttcgataacttgttgctcaacgggatgtatgatcaaagaatggtcagacaacacgttagcacctcgcaattgacaggt

SEQ ID NO: 10083 - DNA, 1094 bp, Arabidopsis thaliana landsberg
tgtgtacaaatcaaccaaaagaatgaaaccaccactactatattattttaatctattgtgtcctgatattagtgagaataatagctgatattttgattgatttatgagacttaaaacaatcttggcgcgtcatttatgtgctaaattacccaaattaaaaatatgcccaattctctctcaagaaccaattctatatttttagtggaaatgataaaaattgcatatatattactttaagatttacatttataaaaataaaaacgaacatgacatagtataccgtacttaatttcacgatcgcaaaagaaatatactaagctcttgtccataactaccacccggattcatcatgtgaaacgattccgagtcactcgaaccagtaactcgctcaaacctagccctcaaatacaacatctgatcctcctcttccgacggcaccactccggctccgactgacacagactgcatcatcctcaagaaaacggcgtcgttctccgtcacctttctcctcacggcaaatcccattttccttccgttacaaaacatagaccaaacaggaacatcaaagatcgaagacgaacgactattgctgcttctacgacggtcacactcgagggctatgcgtagaacaccttcctcgtccatttctttggctaaagctgccgtaggaacagctagctcgaggaggagcagcggtgaagatcccacggcggcgtcttgaaggcagaagctgactcggccacgacggtgtccgaagaaagttccacttacggtactgctactctgggaggaggaagagtggtctgaggatgaagacgaggatgaagtggaagagactgaaagggtgtcgttttggtatggttgttgttggtaagtgcaacagtatggaatcatgcattcgatgagtgaacgaagtgttcgtcggtgacggaattcgcgagaacaatccacggaggtaggagtggttatgatttgcatgtggtgatagttatgatctctttgctttcctaaatcaaccattgtcctcatgatttgtttctctctttttttaaaagctaagctcaaacttgatcgagtgaaatgaaagaagagaa

SEQ ID NO: 10084 - DNA, 1165 bp, Arabidopsis thaliana landsberg
tagacacacttctcatcatactcaacaaatcaatccagcggctctcgttcctccacgtctaccaccacgcaacggttgtgattttgtgctacctctggttacgaacacgtcaatcgatgtttcctgttgggctcgtgttgaactcgacggtccatgtgattatgtacgggtactatttcctctgcgctatcggatcgaggcccaagtggaagaagttggtgacgaattttcaaatggttcagtttgctttcggcatggggttaggagccgcttggatgctcccagagcattatttcgggtcgggttgcgccgggatttggacagtttatttcaatggtgtgtttactgcttctctattggctctcttctacaacttccattccaagaactatgagaagactacaacgtcgcctttgtataagatcgaatcctttatatttattcacggagagacgtgggcaaataaagcgattacattattttccaagaaaaacgattaaattgtcatgattattatatatatatctagtttggatatgttgatgtgtgttgttagttgttactgtaaaatgttgggatgcatggtttgaaattgttttatatattaacgaataagatgacaaaatatataaaaatgtcacataaaatcatcatgatcgtctgattcttcttattgcatacatctttctatacaacatttgccaaccaacgtttctttaaaggattggacactgagattagttctataatattttttatgcctaccagtgttggttcatcaaccactggtcgtaccaaaccctctctttatgataatggaggagagagtgaccacggtttttaagagccgccgctgctacaatgggcctatctcgtagtcctcataaaccgggctagaactacgggctacggcggcgtggcccaattcaacaaataacaacaacagtagcatatcatctaaatataatattatacgatactatacttaaaaaagataaaaacaagatcctctgggacccactttcatgaaaattagccgattgggtaagcctttgatccttcatctctcgctaaaccatatcttcaaacgtcaactccccaaacttcgtcggcgattcaccaaaggctatggcatcaatttactcctctttaacctactggctcg

SEQ ID NO: 10085 - DNA, 1684 bp, Arabidopsis thaliana landsberg
acagccagagttacagcataacttgggtttattgttaaatcactcgagcatggttttctgaagactgataaggatttgaggatcgaaaaaggattagccttgagcttgcagcaagagaaggagaaatttaagatgggggtaaagaaccagaaaacgctgtttgacaacttgggatatgttgcagaggaaatcgatcgaattgaggtggagattgcgtctgggaatttaaccttggattcacttgccaatcgtttcaaggacttgcgttcaagctatcctgatgactataagtgttgtaacttgtcatgcattgcttcctcactggccttgcctctctttatcaggatgtttcagggttgggaccctcttagtgatgcagagcatggtatcgaggctatatcttcctggaaaatgctgctggaagttgaggacaatcaaagtatctcgacgccttatagccaacttgtctcagaggtaattttacctgctgtgcgagtatcaggcatcaatacttgggaacctagagatcctgagccaatgttgagattgctagagacatgggagaaaatgctaccctcacttattttcgaaacgattttgaccacagtagtgctgccaaaattgtcaatcgctattgaatcttgggaaccacgtttggaaactgttcccatccacttttgggtacatccgtggctgccagtacttggtcagaagttggaaagtgcgtatcagatcattcgaatgaaattcggtaaccttcttgatgcttggcatcctagtgatgtgtctgtccacactatcctttccccttggaagactgtttttgatgctgcaagctgggagcagcttatgcgtcgttacatagttcctaaattacaggtggccttgcaagagttccagataaacccagcagatcagaacttagacgagttcaatttggttatggggtgggtatcttcagtacccattcatctaatgactgatttgatggagagattctttttccccaagtggctggatgttttatatcactggttgtgttcagaaccaaagttcgatgagataatgaaatggtttttgggttggaaaggaacattcccacaggagctttctgcaaacaggaggatcgaaatccagttcaagcgtggtctagatatggcgagggaagcagttgaacggatggaaatgtctcagccaggggcaagggaaaacataagttaccacaaggcacaagagcagaggcagtctgagggtcgtgctaaggttcaggctcaggtggatgaccccgaggagctgagttttaaagaagcagtagaattgtttgcgcaggagaaggagttgctgttgaaacctaaacctcatagaatgcacaacggtcttcagatctataggttcgggaacgtgagtgtgttactagactcagcaaactctaagttgttggcccaggaagaaggacgttggtttcctgttgatcttgacagcttgcttaagatgcactatagtgctgttactggaaaacaatgaaacattacccctaataaggaagtaagaaggtaattttgcatacgacttctctatttcccctctgtgtttttctttgtagaaaatgtgtactgtttggtgagcgttctctaggattgtcaagaagataattgagtcctcatattgtccattgtttaatcgt

SEQ ID NO: 10086 - DNA, 516 bp, Arabidopsis thaliana landsberg
  unsure (1)..(516): unsure at all n locations
tataaaagggaaaagttatctcctttaggtatatgtgtactttgtatctacttatcatcacatatgaatagcatatttaaagacaagtaactaataaaaagttgtaccactaaactatgcatcatgctggatgtttattttgtgtgcattttgtgacaacataaaataatttgaagaagaaatatatcaacttcccaaaatagaatttagaagataaaaggaggttttggaatttagaaaggagaaaggaatattatgaaacaccaaaataaatacataaataaataaattgaccccaaattgatgtattcaaatagaataattaatttgagcacaaatcttgtggagaaatcttaattcaagttttagatttggaaaataaaaagggagaacaaaaacagaaaataaaaggataaaagaaaaggggggattggcgtaatgggcccgatcccacgtatgcggcccattcgnggggattctcgcgcggcccangtacctaacgctagcccaagtcgc

SEQ ID NO: 10087 - DNA, 1008 bp, Arabidopsis thaliana landsberg
aaaaaagctcctgaacaggaaaaatcccttggggaacaagtcaaaaggccgggtttaatgtcatagccaattaaatcttggtacccagaaagcatagatcaatatatagagcttaacttcgtaagaaatttcaaaaaaccaagaaaagccagggtgcaaagagataatcttcctctacttttgactgctgctgcttgtactcttctttttaagcaggtttccgaatttccggagcaaaggtttcttcttcttcatatgttgttcctttaagagcagatttccggaatcttcagtgtggtctgttaaagaaaagccattgctgtactgatccatgttctcactactttctgctttcgaatcaacttcctcttccacagagtcgagctcggtctctctctctggagatacttcgcttttttctatcttgtagctatcccacatcttgaattcagactctttctctacatttctttctccttcaactctgtgcgctaccttatgaattgctgctctttcacccatcaaatgtttatcaattgcttccattggactttcttgtatcatatgttctctgcttctctgttgataatgatcagtctttgtcttttcgtcaccattactagcaccgtttacttcagaaaactgaaccaagtcataatcttttccgatgctgtttagctcactgttcccatgctttgatggttcttccattttctcaagggcagcagcttccctgcattttagctcggtttctttttcaagtaaactctctttcagcttcgacaactcctctattttctttgctgctaaagcatcctgcgtttttagctctaggttttcttgagtaactctttgaaactcactctccttttcaagccaactttgctcaagatgtaacaactcatcaatctttttcaaagacgaagcctccttggccttaagctcttcgttttcatgaaagacaccctggagttcgttctgcttatcaatcaaagtctgtttaagatt

SEQ ID NO: 10088 - DNA, 376 bp, Arabidopsis thaliana landsberg
  unsure (1)..(376): unsure at all n locations
ggcgaatggggggggggtnnntttatnnnnncctccctnctccccccannntncanctnttaacaatcatttaccacctcacactcacacaacactcataaaattcaaaacaataatcttaatcctttctatatcttcccacttatcataaccttatacccaaaacacttatcttatatctctccttccttccacttcaatcatatcaccaatcttccattctcttctaaacccttttttccttttatttttccattctttctttatctaacagggtcatctaaagacactccnaccacgaaagacccacggatgttttgagggcatcgattcatgtccctcaaatcacatactagaacgtgtcagccttactctt

SEQ ID NO: 10089 - DNA, 1365 bp, Arabidopsis thaliana landsberg
atcatctcttagaaattgttcacagattgcaattctcttagatctctcaacatcggagacgtcgacatcggtcgcttttctcaactcctccgaatcctccgatttagcaagactctcgtcttccaccataactctaaccctagattctctttacgaacaagaccctgatccttgaggaaagcggaaacaacagaatcaacagaggaatggccgaaggagtagaaggagacgtgagagttggaagaacaaggagtcgtcaagatcgcaacctgtgaatcggaggagagaagacataatagctccgcggctttactgtaaagaccggtacgacgtttggagaaacaaacggctcgtgactctttcttctgaatcttctcaatcgaaattcttctctttagtcctcccattctgctttctttgatttcacagagattttgagggacactacctctctctctttatagatagtgtatgtaacaagaaacctagaaacaattgtatatataaaaatgtcggtggttttataggagggatctaggcccgtatcaggcccattgcaagaggaaattcaaaattttgtcttcttttggcccaaatcaatttaataaaatctgaattaggggttttgttttttgatttcatgatataaacgacaaaaaccaaaagtacatatataaccagaactcaagagtcttttataataaaggcaaaccgaaaaaacagaaccggttatcaagtctctctcttccttttctatccaaataacatccacttgtaataatcttatcgacaaacaatcgacctataactacccacgtgtcatcacgatacgattattatcctctctgatccaacggacccaaaacatctatctctctttctcgaccttttgtctcctcgatctaaagatggcggattcggacaacgattcaggaggacacaaagacggtggaaatgcttcgacacgtgagcaagataggtttctaccgatcgctaacgttagcaggatcatgaagaaagcacttcctgcgaacgcaaaaatctctaaggatgctaaagaaacggttcaagagtgtgtatcggaattcataagtttcatcaccggtgaggcttctgacaagtgtcagagagagaagaggaagacaatcaacggtgacgatcttctttgggcgatgactacgctagggtttgaggactacgtggagcctctcaaggtttatctgcaaaagtatagggaggtggaaggagagaagactactacggcagggagacaaggcgataaggaaggtggaggaggaggcggtggagctggaagtggaagtggaggagctccgatgtacggtggtggcatggtgactacgatgg

SEQ ID NO: 10090 - DNA, 1154 bp, Arabidopsis thaliana landsberg
gatatagccagccttgactcaaagcctgaagctacatttcaaaatgatgcatttgttctatcatccgaggaacttgctgaaaggaatttgctaaaagggattacagctgatgagagtgtgattgttcatgtaagtattttctcatcttttctcagttatctacatgcaaatggtgtaggccttgaactagctatacttttagctccactctctcatcaagtagtagttttcttagatgaatgaattagagtggagctgtaatcatccacagtgcatttagtagtcatgcatgtatgttttcttctaaagattataaccagtgaagaaaaaaatatccaggatactccggctttaggcaaagttattgtaagacagtgtggatatactgcggtggtaaatgtcaagggtcaaactcagaaggcaatgtctgatttccgtgatattttaatcgatgacctgccggatggaggagctaatgctcttaaccttaacaggtatgtgtccctaagatttttaataatatgcgtattttgcacaccgtacatgttcttattaaagtttctattttgttaagggcctctcttgcattcattactttttgagtattaattcttaaatgaatttatcaaaggttttttccgactgtatctataacattgcggtgtttacaaaagtaacaaactttctcacaatttgttctcatcccttgagaaaagacatatttcagcatctaacttgttgttttccatcttggttgttaactttattgcagcttacgggtagagtttcacaggccccatagtgttggaacatctgtagagaaccagcccacacagcttgattgggatgatttagaatcttatagatgtattatacaggagttagtaaaaattaacttaacaaaggtagaagaaacaagggtatcttctgtaagacccatcagatgggaactcggttctacctgggttcagcatgtacagaagaaagaaacagacgtctgtggaaagcctgcaactaatgatgagactgaactttcagttaaaggcttgggaaaacaatctaaagatctaaagagctaacgtaagaaatcagaaaatataagtgccgtgaatgaaaaagataccagactgcacgagttaaatgaggaggatgat

SEQ ID NO: 10091 - DNA, 1170 bp, Arabidopsis thaliana landsberg
  unsure (1)..(1170): unsure at all n locations
cttagttatagattttaactcctccacaatttttagatccgtcttctggtggtgacggagcaggctggagctgaaatatcgagatatcgtagccgtgttgatactaagagcttttcccacaatgtaaacagcgatttctctatcttccggtcttcctgcatatcattgccactcaagagtttcaagatggaaggttaagcactcaggaacagaattcggtttacgaacagatatattcggttgatccttgatagaacgtaaaggtttgtctggaaacataaggcatctgagttaggtaaagaaaatacaaaagagagctatttaagctaatataaaaaaccgcgacattttgatttacctcgttgagcttgagagtttgtagattaggagaatgtttgagcaaactcagaattcgatccccattgagtcttttgtgcaaatgcagctcaagataaagaagctggtggaagattctatcnnnnnnnnnnnnnnnnnnnnnnnnnnnnnnngaaaaaccatcatcaaacagagccacagaataactaaatgattaggaaagaaagataaaaactaagagtataccattaaagagagtgaaccttaagacgttcaactgaggtgagaaatctcaagaggttcttagtttcatgttgattagcttcaacatgtgcctcaactaagttaggcatgtcctcaacaaacttaaagcaactgtcctgacacgcgatttttaagtatttcaaagaaggaacacttatttcaaacgtcgtgctacgaaagcggtatgactcgtcacatatagataatctctgtaaggacggcacccatatagtaaacgagttaagacagtcatagtgaactctgccaatgaagagatctaaatcttcaagaacaggacaagctgataaaagtgtggtgaaagattctcggcaagagtatttcacgcgtgtgaggtgcaaacttttcaaggaccggaaacaaaccgggaaagaaacatccacaagaaccttgtcttggagtttcatcacgacaagtgtttggcagacgttaagattccatgggaatctgatagtactgtacctataagaagtgattgagatctcatgcagaatgggtttaatatttgataaaagacgatctatatcggaaaatgtgtcatagtttgagatt

SEQ ID NO: 10092 - DNA, 1270 bp, Arabidopsis thaliana landsberg
ctttctcatggcgccgttgaaaacagcctcagcttcttcgttcatgttctgctttaagtagctgctaatcgctgcgattcggcatccgcatatcgtaagtccagcatgtcgattcccattctgcaaagactttcttgactccatcaatgtcatcgagtttactcagtgctcgaagcattgtaagatagcttgaattgttgacattagggtatcttttcttaagcaaatcccaaactcgataaacctcagaagcatttgcaattccagtatacaagttaatgagaaaatgataacaatcacgtacgtcaggattcatattgttctccagagatttcaacgcctcttctgctttaccgtagagaccgactttaatataaattgctgcaagattagcaaatgtattccaagagaaaataccttcaccttctgctttcatttcatcaagaaccttctctactccatctaaatcctttaaacttccacagctttgtatccacatggagtaagtaatatcacaaggagtaatactcttctctttcatcgcaacaaccaatgcaggcaccttctctggttgacctagccccatatacatagccatcaggttattaaacggcaaagaattactcacatgattgagatcaaccatattttcaaaatgagcctttgctttaacttcctccttttccacacagtaacagttcaataaggaaccataagtggactgattcttaatagaatcgtctaaactgttgaagtaggtctcagccgcctctaagcctttactctttgcaattagattcaaacgaatcgcgtgatcgctgccagtaaacgctatttcctttctttccatccactcaaagatctacacataattcagaaaaactcaaacactatacacatttaagcttcctatacaataaccctctaacaatggtggctaaaatcaattccaaaggaaagaggagacaaacctcgagagcgcgttgaggttgacgaaacttgcgaagatcctttgcgtagcgaatgaggtcgtgttttttgacaggtacgccttccatgacgaactgatttagcgtttcctccattttccctcctcccctcgtgccaaggcttgagagtttcttgtatattgaccgatgctttttcgccttcgtcggaacagaagcagcagcctcgccgctaatctccgccgtagcagtagcgagcgttgcacagaacctcctcgcgagccgtgaaacggaatgcatcatcagatttccggattttgaat

SEQ ID NO: 10093 - DNA, 1244 bp, Arabidopsis thaliana landsberg
ggaggcctttgggagccgttgcgaagagttgtgagtagtgtggatggttcggtgatagttggaggggatttcatcacgattattcggctagatgagagatgtggtggcaatggtagactctcatcagactctctagctttcggggaatggattaataacctctcgctaattgatatggggttttgtggtaaacaactatacttggaggagaggaaaatctgagaacttccttgtggcaaaaaggcttgaccgtgtcttgtgctgcccccatacacggttgaaatggcaggaagctaaagtgtctcatctcccctttttagcttctgatcatgcgccattgtatgtccagctctctccggagtgtcaagggaatgcgagtagaagaccttttcgcttcgaggcagcgtggctcaagcacccgagttttaaagatctgcttgcttcttcgtggaagaatgatattaacacacgagctgctctgaaggatttgcggtacaagctgaaaaaatggaaccgagaggtttttggggatgttcaggtgcgtaaggataaattgttgaaagagataaaggtcacccagtctctagtagatcaacaaccctcgaatgagctgttggaggaggagactcttttgctgaaagaactggatgttgtcttagaacaagaagaagtcatctggtttcagaagtcaagagaaaaatggattgatcatggggatcggaatacgagcttctttcacacgtctacagttattcgaagacgaaggaatcgaattgaatgtctgaagaacgatactgatacttgggtttctgatgggcaagagttggaacagattgtggtggattattttcagcgtctctattcactagacgatgttgagttgaataatgagaagctgccacaaaaagggtttgtggatctgcagagagatcatcaccgggatttgagtaagcctttttcagcgtgggaggtggagcaggctgttaggagtatgggcaagtttaaggccccggggcacgatgggtttcaggccgtcttctatcaggacagttgggatgtggtggggacttcagtgaccaaatttgtgttggatttcttccgagatggagttttaccggagaagacgaatgatgtgttggtggccttatacctaaggttcttaaactgaaaaaattctcagtttagggctattacttgtgtatgtgctgttcaagaattcaaagatatggtggggaaatgaagga

SEQ ID NO: 10094 - DNA, 1282 bp, Arabidopsis thaliana landsberg
  unsure (1)..(1282): unsure at all n locations
aactccttaatgtgctaaaatattatgtaacttttccagtaaaattatattttgcataaaagtagttgtttttgttttaaagggattagattgtaaaatcccagaatttaagatatttgcaaactacacagacacacttctactttgaccggtaatttcattacttcgccggacggccggagattttatcgctctctctcttcctctccatctccactacttaaatctctccctccgtatctttctctggtgttcgccaatggcggtatttcctatcggttctcactctgcaccgccgcatcagttgacgaagagacacgtcatcgcgacttcatcacctatctccatctccacccgattgccgcaaaatgtttccttttcgaaagtatctggagttacaggctcgacgaggttatccaaacatggtgttctcgtgagggccgaggataagataaggagctcttcttctccttcttctctcgatgaaccaatcgatgaggttcgagtttccacgatgttgtcttagtacaaaattcgattttgatgattacccattttcgcttttgatccaatcttagctaattactcatgaacaagtcacatattttctaattggataagtttcattcatatagtgacctgaagaagaacactaaaatgggtgtagtaatcgatggtcattgctacagaaatgaaagtttatatctttctgtgatccacaggatttgatggactcatcaggattatgtgacccgttatgctcggttgatgaacctagttcaagttactttgaggcgaattatcagccaaagacagatataatcaaagctcttgctattcttgcagcagctcttacaggaacagctgccattaaccattcctgggtcgctgctaatcaggtgtgattctttgtttttatgttctttggtttcaactcaaaatgcagaattttgattaacaattatctatggacaatgttatgttacaggatgttgctatggcattgttgtttggaataggatacgctggcatcatctttgaagagtctttagcttttaataaaagtggaataggacttttgatggctgtgagtttgtngggttgtgcggagcataggggtaagaatctgcgcaaaaagttgtctatcttatacttaaatttatgattaatgtatatgcatttttgtgtatattgaattccttgttaacaggctccttcaactgaaatagctgttttagatcttcaacatgcaacagctgaagttagtgaaatagtatttttc

SEQ ID NO: 10095 - DNA, 1688 bp, Arabidopsis thaliana landsberg
tgcataaccgatgaagtcgaatcagtctttgccacgttctcttccattgctacaacttcccgagctaccatcaactttcatcgattcctctctctcttgacatatctcactaagcatagcagccacatctttcattgtaggcctgtcttcgggtattggattaatgcataaaagcgcgactcctagcgtttgcatcatctcttcaacctctgactctggtcttgcttgtagtccttggtcgattacttgtatgtctctgattttcttgacccagtccactatgtggagtccatctggtatcgttggatcgattggttgcttacccgttagtacctcgagcactacgactccatagctgtacacgtcgcttttctctgttatcttcattgagtatccgtattctgcataattatagtgttatagccttatgggaatatataacgttatgcttcccaattgatatttgttgttagttactaaggatgaacatataaaaaccaaaatgcttacaccaaaattacatcgaaaatcttgtagcgtgtaagtatatgatagattggtcaatattttaactatatgattcactttcagactaatcaaaacgaaaccgaacaaatattgattagtatgaaagtcatgaatcatatatatagtaaaaatattgaaccaagctacaagcaaaatatcgagaccaaaccaaatcaattttttttttaaatcgtatacagtagatgatataatattaatcaaaaattatttcttctaccattttttttctaaaattttaaaccaaatcgaaaatcaactgaaccaaaatactattcttttcaaaatgccaaaaaccaaaaccaaactataaacctgaatttctaccattactaggctaagactactagtaacttatgatgtatcaagttaactaattagcagcaaaacagaaatttggtaagtacctggagctatgtaaccataggaaccagcaatggtgttggaagaacgagcaaagtcgccatcatcaacaagcttagcgagtccgaaatctccaatgtaaggttcaaaatcagggccaatcagaatattatttgccttgatgtctctatgaacaatgggaggaacacagtcatggtgcaagtaagccaaaccctgagctgcaccaagtataatcttgtacctcacttcccatcctaagctacatacaccgctcctttcgtgaagcaaacttcccaaactcccatttgacatataatcatacataagaagtctagtgttcttgttccaacaacatcccaagaagcgtacaatgttcttgtgtctgatcgatccaagtgtttttacttcagctgagaatgagtctcgaactcctgatgacttagttttctcattcagattaggtactgtcactggccagagctttttcaccgcgatgacttctctgttaggcatttcagctttgtacactatcccggagcaacctttccctataacattaccttctaccaaacacttgagtacatgttcgactgtgaagttgagtttctgaaaaggtgtgaattgccatgtccatagattttctccagtctctgaatcgttatcatctcgaatcatttgtttagctcgtataaccgccaacacgcctaataaagcaggaaccgctgtcacgctgaattagcaatccaatggctatcttg

SEQ ID NO: 10096 - DNA, 919 bp, Arabidopsis thaliana landsberg
actgagcaattaaagaataaatcagcttcaccagctcaagttgaagtcttgggtcacgactctgagatatcaaatacaaagaaacagagactgcggaatgataatcacagtgtgacccacgatgaaggttcgcgaaaccaaaagcaaaatggaagtaggcataaggatcatgttggcttaagccctttcaaaaaggaatccacgagtcagactgcctccaactcaatcaaagaggctacagacttgaaacacatggctgatcgtcttaaggtttggacatttttatggaaaatgttgcagtggttacgcatgttgtctcttccttggcttaacattgacagtaaccttttgcagaatgctgtgtccaatcacgagagcacaggtgtttactttcaggcagcgcttaagtttcttcatggtgcctcccttttggagtcatctggcacgaccattgccagatccaaggatatttacggcagcacagccaaactttgcgagtaagtttggcattcaacatgatctaaatttgtgacttttttctactcgatttgttgtgcacctctagggagtgagatagctgaattcttctgatagtcaacgcaattaagtcccccaatttactatttagagggagcctttcactgtgatggtacttgttcatgttgccctctcattttagctcagctgctgcattgtggccaatagatatttctagcatgttaagatgttctagtgaaccctgtcctgatgttacgaaatttttactgtttatgtaacaggttctgtgctcatgaatacgagaaaaataaagatatgggggctgctgctctggcttataaatgtatggaagtaacttatctaaggataacatatacctcccatggtaacataagaagatgcagatatgagttgcaagcag

SEQ ID NO: 10097 - DNA, 547 bp, Arabidopsis thaliana landsberg
gcgacattcggatgcgttaaccgatgtgtcgacaccaccaagaaccatattttttaggagagacttgacatgagtcatagacagaggagctttctcatcatcgtccttaactctaagcaagtattgtaagaaatcttcttcttcttcgctcttctttcccaccattttgacatgactctccataactctatcgaacaagagatcgagcttcttcacatggcctttcatctgcttaaccaatccttggaaatcgaatcttgagaacaatggaaagaaatctgaatagttttgaatcccttctatgtcggagatatcagagattagggttttgagctcgtttcctaagcttgttctctcgtctccttcaacagtcgcaccccacatcattcttgtcacgacgttgaaaatggaaagaaagatttgctctccgaggttgactggtgatccttcatgagccatttccgacatgtggacgatggtttgtcgggtttcttcccggcgagtggagtaggaagcttcgagagttggggtagtgaacatcttcatg

SEQ ID NO: 10098 - DNA, 908 bp, Arabidopsis thaliana landsberg
tttccttttttttttcttcttcttcctcttctacgatctctttttctctctttgttgcagtctcttctcatcttgtccactctcgtctctcaagtagggttaagtataggatcaatttccgacaacttgtacaccaatccctttatttaactaaaataatatatccaacccagtctaaaccggtttgaccgttactatttcaatcttcttctttctgttaaaacggttttcgatttaattttctttttgaatgtgagaaacgtgagaactaaactggcgacttttatattaccatgatattcgtcttgatgtagttgttttcaaaacgaatttgaggattttgaacgttgattaatcgtttttgattttccccgacacacttgcacttgttctccgagaaatagtttcaagacaattgcaatgaaaaagtgtgtgtttgccgcttttgcgttccctgcatttgtatatttgctttattagagtcttatcaatctagtaacaactctagatcgcttcactgtgtaaatcactactgagaagctggattaaaccagtttttttttcattgtgttttggttaactggttcgattaaggtaattatcaaaaaaacatgcaaaaacatattaaaacaaaacaaaacacaaaaaatgcttaagatgagtacacactttcgacaaaaaaaaaaaaaaagatgagcacactttggttttagttcgattttataattcatacaaacgtattgtagaaggttagaaaagatgttcataagttattagataaacaaacacattgtgacttttatcacaaccataagatttggtgagaaatgatcaacgtgggaccttacacatattttccccctaaaaaaggtaaaagattcaaaattctttcggaataaataaaacca

SEQ ID NO: 10099 - DNA, 916 bp, Arabidopsis thaliana landsberg
aaaggctaaaggtgaccataaaactagattgtactatgctcaacacaaacatacagaatcatacaacaaaacagctctttcaggcatttcgtcgaacaccttccgttcactatataaacatttaactctaactacaattcaaatcaaaattccttcgaaaatatatatccaaacaagtttccagatcaatttcacgaaatttccatggaagaaaaaatacctttgagtctctcgtcgatggccaatttgtttacttaatatctgaagaaaaaaattatgatttcaacgagtttatatatataatagatgttggaaattaatcctgtaattaaccatacttgagagacgagagtggagaagatgagaagagactgcaacaaagagagaagaagagatcgtagaagaggaagagagacaaagagaaagctttgtcgtaggaagaattagaaagaagaaagagacaaatgggccatgtgttatatgttaagcccaaatattaagtgggttgttttgtgtattgttaagacaaaacaactaatggcttgattggtttatccgctaacaaccacctagcggttgttaacggtcggttgtagttgttagcggttggtaccaatcataaaaattgctccgtacagtttcgaactgctcgaaattgctggatttcaaaaattcctttccacaagcatttgcggctgcggttgcggttgatttaaaaagaaaagaaattaaaaaagaaaaataatcaaattaaaatatatattatcaagtttttatattcacattaattctataaaaaaaataattctctaacttaaaattttcaatattactaaatatttttggtttggacataaaatttatttgaatattatttatggttttaaacattaattatgtttaaaaattatacttt

SEQ ID NO: 10100 - DNA, 1233 bp, Arabidopsis thaliana landsberg
gattcttcagttccttgtccggttcttgatcttggaattgactcttgtcgtccgtcactatccaagaaagatagaagaagccaaaggcttgctttgatgcttgtcattgaatatctctaccgatctctgtctatctctcttgcgaaaaaaagtactgttactgttgtttggtcttagactgattcttgttgaaattacgaaccaaaaatcattgtgttgctactagttttactgtgttgagtttatgatgacagtgttttcgactttgatgatataataaaagactgcttgatttgcccaaacttaagctgcttgataaagaagtgagaaactggatttctacaattgaacaaatatgtttcatacaattgtggaaatgacagtttcagactcatccgttacattttaacaagaatattgccttgtctttttcattagtactacaataaaagcgataaggatagtagtattgtgttttctctgtgtgatgagtaaacaaaaagaaagaagaaagaaagagaggagtgaaaacggtaagaaccaaaccgcaacaaactttaaaccttgagaaaacgcagccagacgagtgcaagggcttttgtgtagtggaaacacttcatttctggctttgatcgacttcttcatcaaatactctgtgattgagaaagagtttcaatcttgtcgtgaagcgtcacgacaagatgatgggcatcatcaagaagcttccagacattaagctgaccagccatgctattacactcttccacaatctcatccatactactgtatttctgtatgatcagtttcctacgtagtactaacgccgcgattgcatagagcaacaaatcatccgttggcggtgcttgttgccggattctgctccatggcgacttcccaactccagctctaatggcagcttgatcagcccacatcacttcccagagacacagcgtctgttcaaaactcaactccctcctaaacataacaagcaccatcctgtaaacgaaactacaatcttctgcttgaagattctccaagtgtttataaagctgagagtctttattttttatgatctttgatacaatgcttagctgtctttgaatccctgcttcgtcaagcctgaaattgtgccgagctttcttcatgataccaacaaagcaccagaaagcctcgtgatcctctgagatcacagcgaggatttgagataacagatcactcatttcttgacagtag

SEQ ID NO: 10101 - DNA, 577 bp, Arabidopsis thaliana landsberg
tgtcgacgtcaatttcaaagtagttaggacctctgtggtaattgcacgtcaaggctttacctagaagacaagcgctatagttccccaccgcggctttaactacccaaggacctttcacaatccgattcacgattttgaatctctggttccggaaggcatcgtcgccgttgatgaaccggtggagaagcgaaccggaaggaatcggttcttccgtcgcgaagtagaacacggcgctgtgatgatccttacctggaatctggagattcacggcgaagatgaagctcttgagagattgaccgcgagattgagcttttctaagcgcgtgagctacacggttatcgggacgagcgagcacgttctcgagtttggtacttgatttgagccagtccatgccggcggggagaaaggaggtaatcaccggcgggagttttttgttttttggacaagtaagaatcggagcggagagagaaaacatcgccgggaggagaagcccagccgtcggtacctgtatcgggatctacgcgacggagagatccgccgttggttgattcggtaatccattccggtatggcggagg

SEQ ID NO: 10102 - DNA, 1241 bp, Arabidopsis thaliana landsberg
ccctcggatgttgaacagtcagctgtgtgagaatgacgttctcctcaacattctttattccatattcttctacaatttcatcgttccacttgttgtaatcataatcttcgccactactttcactaccatcaatagtaggatcgatggtacttcccccatagatccatcgtcaccctgataatcatcatacccatcaccatcttcgttgtccccccatcttcatcctcatctgttttatcgtcttcaatctcgtcttgctaatctatggcctcattattttcatcaacatttaaaacactatcacacacacagtcactttcagcatcgtcaccatgagtcctagagacattattcccgagtgtcttgacggttgtaatgaaagagacaaacaagttgagagaaggatacccaccacgaataaaaatcgtatcccaccctcacttgactgtcaatgtagacaagagggcgttcagtatctatcatcactaacatctctcccggtatccagtaactaattatgggattgatctctatggacttcaaactgaaagtctcgcttagtgtacatacaaattccgtgtacgtcatgttttccttaacacgtacacagcgaccaaacatgttttcctctggttcaaatttccatttttcttctttgtatctccactcaccgaccatagtaaatacgagattatccattacccaactgcttcataaattcaggagaaacccaataaatgcaactgaaaacatgattatatcgacaaaaacaaatagaaattcgttatacgcacttataaacataaatatctacacatttaccattttcaaccaacaaaattggaaataaaaaatctctgggtttttctataaaaaacaaaattgatttcgaacacaatgaagatcatagtgtgttataacaaaaaaaatctttaaaacttcattacttacacgataatgattatcttggctccaaacttcgtaaataaacaagataaacacttattgagcatcaatgtacgttcgcaattaatgtttgttcctgggttcatttttaactcaacaattattatcaataattttataatattataacatgtaatgatgattttgcattaattataacaagagttcacgtctaaactttttgggccattaaatggttgatctcacttcgtttttaataaaaaaaatctcccttctaactgtacagctgcactcttcaacgtgaaacaaaaata

SEQ ID NO: 10103 - DNA, 501 bp, Arabidopsis thaliana landsberg
cagtagaatcagctagatgatctccaaattctacgagtagatcatataaaacagcaaatttttaaacccttaatcactcgacttgttctgcgcaaagcaagaacaagtgaatgttctaataatgatgagattggtgtagcagcacactttaggacataaaggtagttcctaaaagattgactctattatcgaaagatagaagaaaataatcccaagaacttgacgttcattacttgtgagaagagattggtttcatacctttcattttcgccaagtacatgacaaaatgggaacccgttgccggtgtgatcaaatacgcccctaatgtgtttgtcctgtaaatttgagcaacagataagtgcaagagcttgccaagtttaaacttcttttagctataaaatcaagaaaagtagggaaattataagagagtcatgtaccagtcaggtaaagggctgtatacatgactttccggtgttattaacgcatcgatctcgtttgata

SEQ ID NO: 10104 - DNA, 755 bp, Arabidopsis thaliana landsberg
tggaccctatatgttctccgtagatcttttatctctgtaaatgtctaaatggagatagttatgagttaaacattaagctgtgtttactttgattttatacagtttgttgctggatgtgggaagttttttgaagggacagctgagcagatgtatcagtcgttgtgtgtgactctggctgcattacctaaaccgacacaggtttactgcggccatgaggtaaaaaaatcaacagcttcattatgtcttttgagttcttaactcataaaaatggatgcctataaactgaataatccgctattcatttcttatggttctcagtacaccgttaagaacttggaatttgctctaactgtggaaccaaacaacgggaagatacaacagaagttagcatgggcccgtcaacagcgccaagcagatcttcccacaatcccttcaacactggaggaagagctcgaaacaaatccatttatgcgtgttgataagccagagatacaggttattactccatttggttcatcttcttgaacaattcatgattcggttttatcagctatcactgttgatatcgatctttactttcttgtcgtatatcgagattaactttgttattttccaggagaaactcggttgcaagtcgccaattgatacaatgagggaagttcggaacaagaaggatcagccagggccatgatgataaatggagagcttcaaaacctataaattgtgtgtgttgtgtacatgtgttgaatgatcct

SEQ ID NO: 10105 - DNA, 1036 bp, Arabidopsis thaliana landsberg
ataaaatgtttttaatatgctttttccatcataatttttcggtctgaacaagaaattagattcttgacggggaagtgaaactagagcaaaggattggttatgtaataacttatgtaacaattgataaaaaaaaaaaaaaaaatgatcaaaacggaatatcaccttgcaagctgtatcaaacccaaaactagtaggaacctctttgcatttcaaatcaccatcaatggtcttggggcacccaatgactcgggttttcaagttcttactcctaattatacaagtagataataagtcaaatgctgaatcagcaaatattaaagattctggtcacatggatcttcaagaacaactactttcgcctaagataaataagtttcaacataacagattcaactgcaaggtttacctgaagttttcagcaagaaggcaagcattggtgttggaatcatctccaccgataaccaccaacccatccaaatcaagcttctttgctgtttcttcagcttgtttaaactgcacatgagaggcatatataattactcactgcacgaaatagaggctttggaagcagtaacaaatatcttttcaaaccacaaaaaaatattcaacctggtcaggtgtttcaatcttgtctcttccactgcagatcatgtcaaaaccaccctgttgagaccaaaaaaagaattataaccacatcgacttaaaaagacaagtatatttaaccaaggactaatgctccacatctagtggagtgtaaattcaaatcttgtggaaggatctgaatccaagtacctggtttctgtaaggctgaatatattcagcattcaactcaacatatttgcatttcatgataccagctggaccacccttgaacccataaaatgtgctacctttcgcacgctcttgcaggtaatctaacacgccgaaaacaaaatcaagagtggaacaatgtcagcaactattctacaaaaaaaaaaaaaaacatcatttgacgtaaaaatcaaacccttaccaaacaggccagaaataacattgt

SEQ ID NO: 10106 - DNA, 1742 bp, Arabidopsis thaliana landsberg
tcttctttcttctcctctgttttcacttccccttagttccctcctctgttttcttctcctctggtttctcttccttaggcggcgtcaccggagcagtgaattcacgtttgttcaaagcctcccttacaagctccttaaactcctcaagtgccttcttctgaacttcctcagcagttaaaacaacaaccttctcagctacaacaacagtctcttcctccttcaccggaacagatttctccgcttccgccgctggggcatccttctccggagtcacttccttctccggcaccgccttctcatcagagacaggagcagcaacttcctctttctctgccacaggggtaggaatagtaacctccttatcggtaataggtttctccttcaccaccggagcagcagcgacatcagccgatttctgtacttcctcttgagccatctttcttgtctgattttagaagagagatggagagagttttgagttgtgaggagagagaagaggaagaagaggaggcttttaaaagaagaaaacagaggaatttggaagaagggaacagactggtcggagctgttttgacagctcattcgaaacacctcttttctcagtgggctcctctctctttcttttctcccaacggccgtcttttttgcttccaccaatttaaaacttccttttctaaccatttttaccaatttaacattatattagttactatatctatttttatatatcccataatcgacactttttttaatatatatatcatcgtatattcataaaattctgattatagcattcttaatgattctccttgattttgaaattttgaagatattcaacagcttttttctcccataataagtcgtcaagattctttcttctatgtgcgtaattaatgtttatttagtcgtttgcataaatatcaaatctttacaattaaatagtgaaaaatttcaaattaggatagagaaggcaacaaaaaagtggaatcatttgcgaaacggaaagagaaagcagtagcatgctagtcatgtttttaataatttttatttttaaagtaaagtgtgttttcaaatcatgacatcatgttatatcttcgcatttgtattaaattaaaagagtatatagtagtgatttatttttgttacatcaccattatcactacacttaagttccttttttatataaaaaagataccattgcaaatgatccttttattattcacaaaataatctaaatatatagttttaaccgaaatcagaaacaaatttaataactgtttttttctgacgtcagcaaaaaaaaaaaaacgttagcaaagatgatatttttttcctgtaatatagataatcttataaatttttggataccagtataccatgagtatagtacacaatccaatttgtttaaaatattagttgataaaaaaaaaacaatacgaatctttaaacgcatgtcattcttaccctctttttcaagttgttgacgtatataaacgttagaatttgtcttttacctctataaccaatgacacctatgttttaatttacttaagattcacatgcattttccaaaacgaaaacctcggatacttttttatgctccgaatagaatcatatttacatatagattctttttattttaaattttttgtgtacataatatatctagctatatgtacacactaaattaaatatcatatatatatattcttctatgacatatcaacacatgcgagaaaaga

SEQ ID NO: 10107 - DNA, 401 bp, Arabidopsis thaliana landsberg
gcacatacactacgggtttagattgattagtaaatggataatctcttatgattattattccagttcttcactgtataattcgcactccactgctagggctaccattgagcaccttaaataagatgttagatggtatgcatgcccaataaaggacccgggatctgaactattgtatactagagaggcttgccagtgagttattcgattctgacccgaggacactgatgcttgttatgaactaatgactaccttgcacctaatagaattatgatgctgcatgcagactcataccaatccaacccatgtgatgaatgagatgtgaccaattacccaacctacataagtacttgtgacagataacatcatcatgttgcatccaatcatataaatggtgactaatc

SEQ ID NO: 10108 - DNA, 561 bp, Arabidopsis thaliana landsberg
aacctatagttttttatcaagagaacatttgagtattgacttttaagttttacgttgtgatcagtatgctcacagaaaatgtgttcaacgttggtgtaatgaaaagggaaacactatatgcgaaatctgtcatcaggtatatacattctttctcttgatactaatgatgtatgatttgtagaggatgcagctcaaattaactttctcttattccagccataccaagctggatatacctctccaccaccaccaccacaatctgaagaaactactattgacattgggtatgatcattttcattattctgtttctgtcatacactttaggtttggtttcatgacttgtaattgttctgacttattcgtctgttctttagtggaggatggagaatctcgggtttggatttagatgatccacgtctcttggcaatagcagaagctgaacgtcagattttagaatcagaatatgatgattatacagcttcagataccagtggagctgcattaatccgctctgctgctttaatagtaagtcaaaagctcctcaacaagtatcaattac

SEQ ID NO: 10109 - DNA, 1540 bp, Arabidopsis thaliana landsberg
caaaccacacctagctctacttggatatttgtgtagctaattatttaattaacttcaatcttaacgttaactatgaagctgtgatatagctgtaggataagatcttccaatgctaattttaataccctttgttttgagttgttaacgattaatgtgaattgaaaaaaagaagaagatgatttacttctcaaatcataccaactatttgtcgggtttttggtaaaagattgatacaatctcacttattatatttagaagaatctagaacttaggattatgccacctaattaacgcctaactgtcccacatttagttatatagtttggtctttaatactgttattgacgtttgtttaattgtttctatcaccaatttcggcgcaatgcattttttatactctacagaacttcatacaatttgtctaccaataatttatatctgactgaaatagactaaacataaaattcgatcctttgaatatttctccatgtggctaccagattttactagtgtatatattacttctaaactacaattggtcgctatggaaatatcactagctcacaagtcgcaacaactatttaacctatgtctattaattaaaggaatttaatgttattcttcattagttattattatcaatcgcaatcatcattaaatctcaaatatgatttacaatatgttgcggggaccaggccacttgtcgattttggatggttagtatagtagttcccgacaattttggttggtcacatcttttgctaacttcgaatacgggttggtatacacttaggattttagacaaaaccatatcaaagactgatacacttaagattttagacaaaatccattatatgaaagactaaaccaatcgaattcggtatagtattcattggttacagaaaatggtaattgagtggatccgactttaacaattttgggtttggttaatgttttcatgaagagagagaagcaaaagcatgtgatagaggataaataatcacatttagggcaaagattccttcaaaagatggggtccacgtgggtatggaggggcacagtgtccggtgggttagggaacagtgcacaaaccccaacggacccactcgttgcctctttcatggaccggtctagttcggtacggttcggtttctgtccttagccaccacctttttctcacttctatatataactcctcttcatgtatcaccttcttcatactccataacatcatttatatctctctctttcacattcagttccaaaacaaattacacattcttgatttgtgatcgttatagagaaaatgaagacgaccggttcgagtgtaggaggaacaaagaggaagatgtggagccgtggagtgggaggagtggttagagagcaaaaggctaagctttacatcataaggaggtgtgttgtcatgcttctttgttggcatgactaaaatcaaatcattatcaacatcatcatcatcagcttaatgaagactaaccaaagattttcttcctttttcctctttttttgttgcgggtcttac

SEQ ID NO: 10110 - DNA, 369 bp, Arabidopsis thaliana landsberg
cgaagacacacggatctcggacgacatgacacaagaggattgccccggcagcaaatatttatagtcccaagtgttatattctctatgtccttgggcccacgtgtcggggctcagtacctttgtgcatgccccccttcagttataaaaggggaggcatgtgacgttacagactcagacgcaacttgaggcagacactctcaagttcatacaagctcccaaacaatacatcacacagtggagtagggtattatgctccggcggcctgaaccactctaaaccctcgtgtgctctcgtgtgttgatccaccagtctcgtagcaaggcaaacgcttaggcccctcctctctttaggatttagggcgagtgcaat

SEQ ID NO: 10111 - DNA, 667 bp, Arabidopsis thaliana landsberg
  unsure (1)..(667): unsure at all n locations
acgttacgtccctacaaaaaaagctgaggtagatgacaagaaagctttagggtttccaaatttaaagaaacgtggatcttttcagaatccatctgttatggctgttgttaggggaggttcttatgatagtacttcacttgtgaaaagtgttcccaaactagttactccggagcagatcaaaagtttcattgcaaatttgaatctacttgatcaaattggcaattttgagttgaaccatgtctatgctaatagccaaaggttgaacagtgaagctatagtttcttttgttaaagcgctatgtaaagtctccatgtcagaacttcagtcaccaacagatcctcgtgtctttagcctcacgaaactagtcgaaacagcgtaacttctcattctatgatcttatactaattttacattgctctgctttgccattctctgatcaaatgaactgttttctttctctgtgacaggcattataacatgaaccggatccgattagtttggtcccgcatatggaatgttctttctgatttcttcgtatcagttggcttgtcagagaatctctctgttgcaatatttgtcatggactcgcttcgtcagcttttcatgaaattcttggagcgtgaggagctagcaaactaccatttncaacatgagtttcttcgaccat

SEQ ID NO: 10112 - DNA, 686 bp, Arabidopsis thaliana landsberg
tagatctcatgattggaattaaacttttgataaaattaaatctttgtaggttgtttaaagaaaaccctcatccagacgacaaacaaagaaagagattaagtgctgaacttggtcttaagcctcgacaagtcaagttttggttccaaaataggcgtacccaaatgaaggtaagctacaaattcactctatcacttcaatttgaacaattattagattatataatcttgatttctaaagtctcatctcaaattaaaatatatttcttatgaaagtttccacttatgacaatgaaatctccaatgttagtacgttcatataaaagattaaaagtattttcgacaatctaattaattattttcgtgagttgaatcaataggcacaacaagacagaaatgagaacgtgatgttaagggcagagaacgataatcttaagtcggagaattgtcatcttcaggcggagctacggtgcctctcttgtccttcttgcggcggccccacctgtccttggcgacattcctttcaacgagatccacattgagaactgtcgcctccgtgaagaggtacccatttgcatttaacatttatgtttagaaggtcatttcttcaaattacatttatgtttcattgggtttgctatgttttgggaaaatatatcagagaagtgactatagaaatgacatttcgta

SEQ ID NO: 10113 - DNA, 1338 bp, Arabidopsis thaliana landsberg
cgttctctcagtatttccggttttatttacgtttcaacacaaaaaatatgtaaccaatcggatttttaagcctaaacacaaagacaaaagatgacgcaaacctggtataagtgcttatgatccattgtatctttgataaccggatccacgattttcggaagctttgatctatccgtaagttggggcattgcctgcaaatttttcgaaacggtacactcattaaccaatgctatctgattcatgtattgatggcaataacgtcaacacaaaccggacttacccaagtgacaagagattgacactgaaccgaactcaatttctcaaccggccgtcttcctaacaagagttcaagtaaaaccacaccaaacgcataaacatcactcttatccgtcaattttcctgagggacataaagatgttgcaatgagacaaactcaataaaccggtttagcgacccaacaactaccatctctaatcaaataatgatttttatgtgtgattagttgaaataatacatcaacaaacaaaatgatttgatttagaacaacaattttagacgtaatgaaagaaacttaatgttatggggtcacatgattatgactatcaaactatgtgctataactctagtgatatgacaacgagtcaaagtcgatcaatatagagggaaatgttaatattttaccatctaggagatattctggagcaacataaccaagtgttcctgatagtttaatgttgtttttgccgtgagcccccaccattaccgcaagaccaaaatccgaaatctgaatgttgatctatcgttagagatggaactaaagacaaatgaatgaaatgattcttgaatcaacgaaacaaatcttgttcggttagctcagaacagaatcatcattaatgattcaagttgtttaccttggcgttgaaggaagaatcaaggagaatatttgacgatttaagatctctgtggataaccggaggacgacaacgctcgtggagatactcaacagctctatttccaaaccaacataagaaaacggtttacctaaaccgaaattaatcaaccggtagagaggattgttaaatgtgggcacttgagtgtagaaccttgctgtatcaagagcaaacttcatccgcatgtgccatgttaaagccgatccccgagaaggtccttaaccattaatgatgcaaacattaaattttatcaaaacaaaaattatttatttcatgtgggcacatgatttgttttatctctgttatactataatattaatttaactcatgatctattacacgatgatgagaaaatgttttgagctatttttaccgtgtaactgtgtat

SEQ ID NO: 10114 - DNA, 842 bp, Arabidopsis thaliana landsberg
aagcccggatctatcggttagttgtggcattgcctacaccatcaacttatctttttatcactaaccgtttcattttggacgtggggagttgttaaaacgtacccacgttacaagacattggcattgagctggagttaatttttgaactggtcgtatacccaacaagagttcaagctgaacttcccctaatgcataaacattaatcttatccgttagttttcactacatacatacccaaaataaacagttattgtctatagaaagcgattatttaagcggaaatgttatcgtataatgaattcatgatagagtgagacatgtcctcaatatatcagaataatatcacatgatatatgactactatgtgctacacgacctacgatatgagaacgagtcatgagtgaacataagttccgtcaaggaggtattccggggcaacataaccaagtgtcccaaagagtttaatgttgttcttgccatgttcatccagcgatacagcaaggccgaaatctgaaatttgcattgttgtaatcaaacagtaaccaaacaatgcgattattcggtactcaaaatcaaatataggcaatgataatgattgtgaaattctcattttacattgaaacaagaactaagatttaatcaacaacattttgagggaaaaaaagacgcggtatgaaccttggcgttgaaggaagaatcaagaagaatattcgaagatttcaaatctctgtggataactggtggacgacaatgctcatggagccactctagtcctctggagtcaaacagagcaaaaaggaaaacagaatcaaaaccgatattaaccgatgagaaaaccggtc

SEQ ID NO: 10115 - DNA, 1093 bp, Arabidopsis thaliana landsberg
  unsure (1)..(1093): unsure at all n locations
tatggatttttatgtttgatccactgataagctgtattgtttgaccttaatgttggttaaaccctgattttaatttttctcttttccagtgacaggggtggatcattggtgaattcttgaggtccaggagaatctgtcattttcaacacattgtgtggaatcatctgagaggtttggtaaatagatagaacaaggatctatgaagatttgagttgaagaatgggctattgttccatgaagtcctcttggattggtgtatctttaatttaattaaaactcaagaaattgtttaattatatcatgtgctcatatgatggattgatgagcgtggtaaggtatcaaatgtaaggttgaaatcagcagatagatccttgtcaagatggaaacaaggtgtgttattattccttgtcaacggatcttcctgtaatttactttcttgttattttccaattcttagatctggaatgtactttttgtctatcttcaggcctgcagagagagtattctcaaatggtnnnnnnnnnnnnnnnnnnntgaaaggaacacttcctcatgggaagggaaagtatgcatggcctgatggtatcatttatgagggtgattgggaagaagggaagatatccgggagaggaaagcttatgtggtcatctggagctaaatacgagggggatttctccgggggataccttcatggctttggcacattgacttcccctgatggatctgtctacgctggagcatggaggatgaatgttaggcacggtctaggaaggaaagagtattgtaactcagatgtatatgatggctcatggagagaaggattacaagatggtagtggtagttattcttggtacaatggaaataggttcattgggaactggaaaaaaggtaaaatgtctggcagaggggttatgagctgggcaaatggtgatctctttaatgggttttggttgaatggtcttagacatggatctggagtttataagtatgcggatggtggtttttattttggaacctggtcacgtggcctaaaagatgggagtggagtcttttatcctgctggaagtaaacacccttctctaaagagaggcat

SEQ ID NO: 10116 - DNA, 946 bp, Arabidopsis thaliana landsberg
  unsure (1)..(946): unsure at all n locations
ccaaaactcaatcatctaccttttgcttaatcccaaaggtcgagaattgattttttttcaaagattacagacctatttactcgcgccatgttgcctataagcttatctctaaaatcttggctgatagactccaaccttggctccaatttatcatctcagaaaaccaaactgcattcattccgggtcggatgatcattgataatgttcttatagcacatgagctgattcattccttacagactcggaatcttaaacaaccatatatggctttcaaattagatattagtaaggcctttgataaagttgaatggtcttttcttgaagcaattatgaagannnnnnnnnnnnnnnnnngatggtgtgcgtggattatggaatgtatcaccactgtcacttactcagtccttgtcaatggttctccaattggcaacatcctcccacagagaggtattagacaaggtgatcccatctctccgtacttgtatttattatattctgaaagactctcagccttaatccgtcataatattcatcaaggtaaactgcatggatttaaggcaagcagaaacggccctcctatatctcacttgctattcgctgatgattccctcctgttctgtaaggctacagtggaagaatgttctgccctcctgcaagttcttaaccaataccatgcagcatcaggtcagcaagttaatttccaaaagtatgcctatactgtgggcaagggcctgatctgtcaacaaaaacatgatcttactaatattatgggagccactaatattagcggtatctggacgataccttggtttacctgaatttgttggcaggagtaaatataatgcttttttttaccttcaccacaagagttatacagaagctccaaagttggtattctaattttctctctgctgcagggacagaaagactaatgaaagctgatgcc

SEQ ID NO: 10117 - DNA, 524 bp, Arabidopsis thaliana landsberg
  unsure (1)..(524): unsure at all n locations
ttggaagcttgtccacaaagtcagatgtgcgctggttcagtggggtgcaccagtcgccaaggtgctgatgctcggtctcgagcgcctcccactcccgccggatagccaccttggtttcccgaagagcctagtgagtgcgggacaacacctatgggaggggagtcagcattgcttcaggttcgacgccagactagagcggtcgcctaaggataacctccggagaccccggagttggggggagaatagagctagacgcgcctcccacgcctaccactaacggtgcatccaatggtatccccgccgctaggccttcagcagctgttggcaacattgccacctctggacccccagctggaacttaggaacccgaaggagccgcctcgacgatggcaggcggatcctcggggaccgacggtgctaccttagcaccagcgccaccctgtacgatggaagcaaacgcaatgggaaccctttctgccactgcccatggaggatttgnnnnnnnnnnnnnnnnnnnnnnnnng

SEQ ID NO: 10118 - DNA, 944 bp, Arabidopsis thaliana landsberg
tacaaattatactcaaattttaaaacctgggaaggaaattgactttggcggaagccggaatgtgttctctctctgaaccaaatgatcggtcgttgccctgtgattcatagaatgttcagaaaaactctaacttcaatctcaagaagacacttctcttcgtcttctcctgaaagtccttctctttactcattccttaaaccctctctcttctctcacaagccaatcactctctcaccatcactatcgccgcctcaaaaccccaaaaccctaactccagatcaaaaatcctcctttgaatctaccctccacgattccttaaatgcccataacaccgatgaagcatggaaggcttttcggtctctcaccgccgcttcttctctaccggagaagcgtctcatcaattcccttattacccatttgtccggtgtcgaaggaagcggtgagagtatatctcatagacttaaacgagcttttgcttctgctgcttatgtaattgagaaagatccgattttgcttgagtttgagactgttcgtacgcttttggagtcgatgaaacttgcgaaagctgcagggcctgctttggctttagtgaagtgtatgtttaaaaacaggtactttgttccttttgatctctgggggcatttggttattgatatctgtagagaaaatagaagcttggctccgtttcttaaggtgtttaaggaaagttgtagaatttctgtagatgagaagcttgagtttatgaaacccgatttggtagctagtaatgcagctcttgaagcgtgttgtcgacagatggaatctttggctgatgctgaaaatgtgattgaatctatggctgttttaggtgtgaagcctgatggattgagctttgggtttcttgcttatttgtatgcgaggaaggggcttcgagagaagattagtgagcttgaggatttgaggat

SEQ ID NO: 10119 - DNA, 639 bp, Arabidopsis thaliana landsberg
  unsure (1)..(639): unsure at all n locations
ctctacaatatccactgatcatactggaataaaaaattcttctacttgcaaaccctaaaccatccatcaaatcctcaagctcactaatcttctctcgaatccccttcctcgcatacaaataagcaagaagcccaaagctcaattcatcaggcttcacacccaaaacagccatagattcaatcacattctcagcatcagccaaagattccatctgcctacaacacgcttcaagagctgcattactcgctaccaaatccggtttcataaattcaagcttatcatctactgcaattctacaactttccctaaaaaccttaagaaacggagccaagcttccattttcacgacagacatcgataactaattccccccagagatcaaaaggaacaaagtacctgtttttaaacatacactccaccaaagccaacgctggcccggaagctttcgctagtttcatcgactcgagaaccgtacggacggtctcaaactcaagcaaaatcggatctttctcgataacgtaagtcgtggaaacaaaggcacgcttcagtctgtgcctgagggaggcgtattgatctgcgtggtggaaggaggacacgtgggtgatgagagaattgaggagacgcttgtccnggagagaag

SEQ ID NO: 10120 - DNA, 492 bp, Arabidopsis thaliana landsberg
ctatatggatagtactgcttgagagaaattgcggatagctcattgaatttgttggtcaagcctggcttaagatggaaccaccacaacaacgtttctccaaacaaagtttcggagaaaaacatgcaacttcaatagtcgaaaagccttgttgtgcttttgaactccgacctatcctttctcttcggccatgatcttcgagatatttgattcgcttcacatcgtcttgtgactgatgtttggttgacttgtaatccatgtggcaatcttcggatgggattcaaacgttaagttcagaattcgattccaacatttgctcttaataagagccggaaatgaagccaaaggggccaagcatggatttattggcttatatatataataatttttcttttctaaactcttcttagtctggtggtataagcattcccccttactttctaaataagaagttcggtaatgtatacttttataatcaagtgtactcatatgtaa

SEQ ID NO: 10121 - DNA, 917 bp, Arabidopsis thaliana landsberg
acaaccaatatttctggtaaaaaatcatacgatatctttattaaaaaaaattaagcttaaaaaagcatgttacaatttaatttctttattcaacgtttaacaaaaaaaaaaaacttattcaaattgttgataaaaccaaaatcagagactgaggaggagagttttagactaagcacatcctggaacaaaccaacaaatcttcgaagacaggtcttctaatcttgtatgccatgtgattgtacttgtcgcaagatcgaacacaccgcaaattggttgtctcttcattgtaagataatgatcagacaaatagtcatcataaagaaaacatattgaatcactcttgagtcctcccccactaatatctttgtccggtgctcttattgtgaccccatgaccaaaaatcaacatttcatctcccaaggactctactatttcccaatcaccaatcttaagattcagcttgtagatgcaaaactttttatctaaccctactaaactcagaacgattagaacctttccttcccttgtgaccgcaagtctcaacttataaatcgcatctacgaaactaaaaggatgactaagataagggttttcttccatgggttctttaggagaatttccagagaaatcaagaatgttgatgtaatgatcaaatgtatacacataaagcttgttatctttataagccatatcctcacattgtgtgcatgtgatactccatcgcttatcatcatcatcatttcctatttttttgtatgagaagatatagaactgtttgatagcccaagcaacaacgtaatctccatttctcccgtttacccacaggatagcagtttttttaaacctaaaatcgttcccgtcaagagaaacttggtgccgtatagctcaagaaagtatcccgactcgtcatcatttcg

SEQ ID NO: 10122 - DNA, 1726 bp, Arabidopsis thaliana landsberg
aatccctaaacattaggggaaaattgcgttgataaatgaaattacaatgtcaaatagttagaaactaaaataacttttatttttttgaatttttacaaccgatagattatgagaaaacaaggcaacaccgcacgtgtatcgaacacgagcaactctccgtcgtcaccactcactgagtcaaaccgtgacctcaaatccgagtcatactttaactcgttttgcttagtgacccgacccgctatgacccgacaaaccaacattggcttcctccctttcccaccgccagctttctcattcgccgtgctacttccggcaaacgtatatatcgacgcgccaccgccttttcctcccaaaataccccacgcgctgccacctgcaccgtaacttggacccaaacagtaaaacctcattgtttcattcccgtcggcaaccgaacgcgcgttctcttcacgcgctttccccacgctcctagctttcacggcttcacgatactcttcgaaccgggtcaaagtcttagacccgttttgcactttgaaaatcatttcgacccgacccgaaaacggtttcggaccccagctcgtctgaaagataatctccaccacattacgtgactgatgaccttccgatagctccgtcaatgtcggtaaaaacggatcacgatcacgaactccggttgatcggatccgggttgatggtgataaaaccgggtcggtttctcgtttatccggttttggattgggtttcttcggtttaggtttgggttttttggtttcgatcacatcttttagactctgtgtgctttttctgcaactgtagcttgacatgagatgtttcggactcgggctcggattcgggttcgggattttaatcggattgtaaacatcatcgaaagctttcgacttgcattgtaacgatttgacccacccatttgccataatcaagatccggaaccaaagctctctgttttttgtttttgtttcagtctctctctcgctctttaaaaacttggaaaagaaacagaagcagaagaagaaagcaacatggcgcgatgatgatgatgaatattaaaagtgtacgtcgaaacttgggagtgtaaattacggttttaccctttagtttaatataacatagtaattttttacaacataaatttatttttttgatttatgtaagatgattctacgatatgaccccattccttcatatcacttttgtcttattgattttaagttttttcaaaaaaattataagaatggaaaatttgtttttttgattttatgtaaggtaatgcagaaaaacaagacggaaataaatgtaagataaaaattgacagccggattttattgtttttattttggtacagtcttgtgattcttgtctttttttatcataaatggatcacaaaagaacacgaataacattttttaaaaatacgtcaacttcgtaactctatttgtttttatctcaacaatagaatttcacatgtaatgtctattcaagtcaattaagatatcctgaatcaattagtcgatgacaaaaatatttcgaaatcaacgtaaattttacgctatcttacaaaaaatattcaatacaaaataatgatttcatttcaacctttttcttagaatacgcatttctacttaatttgtatattttgtttatcatacaaattataagttttcttcttgtcataattaattaggggatcctctagagtcgacctgca

SEQ ID NO: 10123 - DNA, 1413 bp, Arabidopsis thaliana landsberg
accctttgaaggcttcatctcattaacctgaaaaatagtagaaaccccaccagagctaaaatctattttccttatactcctctccaagaactgaatcctagtcctcaagaaatgtttcctcttttcctcatcagaaaacgtcttattataaagctccttgttctgaaactcaccatagacattgtaacaaacagggtgaccttctcggtcatgtccatgcataaacacaaccttgtcaagatcatccacaagatcttcctcgaccaattcatcgatcttgaactcctttctccacttgattgtgttcttgagcatagcaaacgaatctttcaccttgaactccctagctcttaggaattttaacaaaacgacgtcgcttctatcgtcttcaagtaatggaatcccccaaatcttgacttcttctggtgtgttggtgaattggtgattgtctagagcttctcgaacaagatgttttagttcatcgagtgaattcttctcggaattagatagatcagaaagtttgctgctttcttctttgaatgaaccaagattctgtggaatcatactctttttctcttcagctacttctttctgcgatgcttcgtctttaacctcttgtttctccgtcgatgcagtttctgtttccgtcactgtcggtggatgatgctctgccgcggtttcttcttctggcttggtggtggtatctgcagtttccggtggattagtctcagtcactttctccagagtttctgtctctgtcggtagggcatcttgagtagattcagatacttcaggaggcgtgaggctcggagaaggtagcttttccggtgtaacgagagtggtagtagtaggttcttcagccattttttacttgtgccgtcttgatctgtgattgttgttcctaaattgggcaaaagtgaattttgggtttatagaaagaaagaaagaaagtggagacaaaaaaatacgttgagacgtcgtcgtatgtacaaaagggtatattggtaatgccaatcgaaccggtttttttattttattttatttttgctgtaaaagattaatatattgtctcgttctagcatcaattccaaattatatatcaggatttttggtgtgacaaaaaagacaaaacaatcgtgaaattggaatccaatgacatttgaagtatacatttttatctttcaattttgaataataataaaaaaatatgtaaaaacagaagagatccacgtgaaaaatcatatgtttgatttttttattcctttgttttttgtttctttttttggcgtcctgacaccttcactgctctacgaatccaaccaacactgtaaaaattctattttgtctcagttaaaattctaatataatccagttgttggttacagtattttccaacaacaatacttttagaac

SEQ ID NO: 10124 - DNA, 1619 bp, Arabidopsis thaliana landsberg
gtactgcatattagtattaagtaaattttgttgttcacataatcataatgcggaaacgaaaagcccaacgaagaaaatgatagataatttataaattgtagtcgataataaataattgtttttagtggttcaactcaaatttgatttttgacgatatattggcgatccctagtgtacctgagtgtattcaaaacattggttataaacttataagtgtgtgtttgtctattgaacagtcctttgggatattttgtgtctgcaatgatcaaggtttcttataaataaataattaatgatcaagtagcaaaaagaaaattcgttttactttataacaatttgtggtcacatctaagtcattcaagtcttattacaaacaaaacaatttgggttgacctgtgatttatagataatataagttctccatttatgttcaaatggaatcttagatacgcccaaccctacacaagtcttcaaaccaagtttccaaggtaatgtattcaataacgaaagttgtttttgttaaattgagctcaattaaaccaagaccatgtattttgttatccacaatatatagaatagctaaaagtctaaaattaagttggaccaattcaaaaatagatttcaaacatttttgtattttttttataaagactttatacattttcaagagtcaaatatggttggtttataacctaaacattatatggacaccaaaatttgttgagagaagaaaatctaaaaatataaaattgaagtcacctgtgtgacctggaccacctggtttcatttctaaacaaaaactcctcgaaagaatccgtgtgaccaggaccacttggtttcatttctaaaaaataaaaaatgaagtcacctgtttgacgaaaaatgatgaacacataacgtgagatactgggagattcatttatctttatatatctattcacgaatatacattttgaatacatacttttaaatctatcaaaagcatgaacaaaatccttgtttacgtactagctttgagtattctcttgttctttgggttaccaaatacaacactggcccgagtacaatatcgatctccaggttcaagtgagtattttttcttctcaagcaatttttataggttcgttacgatttaggcttggttgtagttcaaatttatggcttgttatgtttaattatgattaagtttgtttatattttgatattttggttttgataccatgtttagcaaattatatcttgaaatgaaagaatattcaatcataaatgatttaagatgtatcatttacttttcactatagtttaatttacctatagtaatgaaaaataaattaatcatttaaaaaaaaaaaaaaatagaactgatgtagctaattgatgctttcttccagggaaggaaatagggaaagaggtttgggatcaaaagatcttccacgagatcaagattgctgtgcgaggcagagattcagtgccatctcattcaagaggttgctgtccgaggtagtgagattaacgatcaaaagttctcaagttttgatagcaacaatgggatatatataactattgtatggcccgtgctctgcccgtcaaaaatagcattagtttttcaattaaaatta

SEQ ID NO: 10125 - DNA, 1613 bp, Arabidopsis thaliana landsberg
cagattttgtagcctcctttatctttcttagctgttctctttctctccctgtccctcaatataaatacaaaagaacccaatacttccttcttacgtaccaagaaagttagtttctcaattcctgataaaacatacacaaaacaataatcttaatttcaagaaactactactattgctaaaaatcagagactttcgctaatggctatattcggtaaactgacaaagctcaagtctgccataaagaaatggccttccttgaccaagaaccaccattcaaccatgtgtaccgcctctaccgccgtatctgaggtctcaaagtgcgaggatctccatgtggtttacgtcggaaagtcacgaagaccttacatgcttagttcccacgtcatcgctcatccgcttttccaagaactacttgaccggtcgtctagatttatcgaagaacgtcacgaccaagagaccgtcttagtagcttgcgaagtcgtattgttcgagcacttgttatggatgctcaaaaacagttcctctgatcacggcgatgaggatgatcgcgaaagaggatccgtcgaggagttggctgagttctatacttattgacggcgcgatacatatccatatatacttttatttcgttaattttggaatttgattcgacatgatccaataatgcggtcatgcacagaccattttctttgcttttgtttttctcccgagcaaatttttagagttaactagtaatctttaactaatattataattatgtcggtcgaaagagggtagtagtatcttgccccaaatgatgataaattgtaacatatgctaaaattgttttttatgattagctccatttgatatacatgtactctacagtagtacgtagttatgagattttcgaaagaataaaagtggccgccacatgatgatgcgcagggctacccaattgcacggacggttgtcctacttgcctttctagtggcatcaagctgtcacggaaacaaatatttaagtataaattactaactacgtctataagtgtatccaagttgtaatgtgaagtgaaattaggtataaacttcttggagtaattaattaaacatgactacgatgtgagtatgtatggctcgtaatcataatggtggtttttaataaaataataaaatataggatgctcattaactcgaccagcataattatttatgtagttcttaatatctcatgtcaagctatagcctatatgtagataatgggatatctttgcctgaatataaactttttcaaagaattatgtatttcaacgttgaaaaaaaattcgtattaattgaatctgtataaaaaaatggacactttgtggatttactattggggaatatattggagaacttgggccaaataggcccatttaataagattggtctcgcaaaacggcatcgtggcgtagaaacagtgacgtgcagcttggtggtcttcaagtttgactgttaatcggtaaacagaggctgattgtgcgacggtgacggcaaatccagtgagtgagttcctatcatctttgcttcgtttagtggaaactctaaaactttagaatagttttagttagtctttagcatttggcttgttct

SEQ ID NO: 10126 - DNA, 1401 bp, Arabidopsis thaliana landsberg
tggatgacttctgagtgcgacttctcccaacgtttctttgaaacaatttccatgcatcttctggtgccaaacaactaagttccatatcatcatttaccttcattttttaacaaacttcctcttgccgagtggtcaacaatacttttcatccattttcttgtgttataagtggaacactgatcttatttagatccacctcacttcataaatcgtccaataacaatacaaatctctttctactaaggatattatatttgtcaatagccttttccttttctgtctattgtcaatattccttaccaaaccctagtatttcgccgatctgttcttgaatactctcaatctgacaaatctttagacaccacaacccaaatcacaatatcaaatcaatttcttgaatcaaagtattgatctgaggtagggttgtgatcttgcctactccatccataccgtaaaatcctagagttattacatcatctttcaagagaaggttccattcccgttgaaagaccatttccaaaccaactactgtaggtgaaatgtacttcttctccaacttaggaattacaattttgcttgtaaccactacaaaatattattctttagctttaagatttttgacttctttcaacttcctgaatattgttttactgtaaaaaatgcttaatttataagttttagaacaaatactacacacaaaaatgttcgatttcgtttgtgctggcacttaacaaatcattcacttgagactccataccttcgaccctcaatagccattactggacttgagcaaacgtttatagaccgttatcttcctcaatcttaactattgtcaaaaaatcatcacgtacctctacgagctcttgcatcaggaacttcaatgactcgatattctcctttttgtgagtgtgattttcataaccacataatcttccactaatatgatccaacacttgatcacatgataattgtaattgtactcaaagacaatttcacatattttttaagaaatcttgaactaaacgcaaagatgggacatgtaaaaaggagagagactaatcggtatatattgtagtaccattatttttttaagacatagttgagagatcgttctaaaacatcacattagagcatctccaatggtgagaggccccaacggattctcagcattttttaagaataaatttttgaatttgatgagattagagcttatgttgttattttttaattttgcaaattccaatggtagtcactctctgtggggttctcgggtcacaaaataaataaaaattttaacaattattttaattcataaaactgaaagactattacaattcataacatattaaattatattaatttcatacatattgaataaatttgcaaaaaaaaaaaaaaaga

SEQ ID NO: 10127 - DNA, 813 bp, Arabidopsis thaliana landsberg
ctcccccccagattgagaaggaaacaaaattattggtaaacatcaattaacagaaatatgatgatagataaaacagcagacttgattctggaaattcgacttggcattgtgtattctagaacaaataaaatgtgtcgaaatgaactcaaaggtagcttaaagactcatcgttattcataacactacaatccgaacatgagcaatctatgagacctagtagtacctaaacgaacatatccgtttgtataaacaaatatagagacagagcagagtcactacttgcagcagaaacgataacgataaatcgttgagcagcatgcattaaagaagaaaaaggaagaagtaacgatgagcatctttgggagattaaaacaatttgactaccttcataaggagattgagtaggaccaagaatcataacattgaaatatctcatattttcctctgatggagacgcacttatcccaggagctgcaatttcgaaagatatacaacttagaattaaaatcaatagttccagctaccaaaaccaactgtttgagctaaaatcaactgtgagaaatcaacaaggatcgaatgaagtgatgaaattaccaggttcactaagcagacgttgagtttcctatcagatcgaagaacaaaaaaaagtcagatcaagatgacgaagatgatataagatcgtacaagctatcgaaaattcttcccagttctgctgaggtatataatccgtcggttccttctttggatttcagattagaattccccaaaatgaaactgaggggagataccgatcggaggaagctacagaggatc

SEQ ID NO: 10128 - DNA, 773 bp, Arabidopsis thaliana landsberg
atccatttaagtataattttttttcttttgcagaaatttcttctatatataatcatcccatctcctcataactcacaacaacattgaaacccatttcttcgcctttaaccttacttgaatttttgtgtgggtcctttttttttctttctccaagccattgtaagctccaatcttccacattctatctcttcttcctcattttcttccatacatacacacatatatatttctgttaccatttaagtgatcataaagttttcttgtgtaggaataaaaaggcagagaaaatggagttttttggtaaaatgataatttcattgagtcttatgatgatgataatgtggaagagcgtggatggttacagtagtggttgggtcaatgctcgagccacattctatggaggagctgatgcttctggcaccatgggtaatttgcttactcctctctgacactttatagttatatcattcttattttctgaccaatataacttcaaacttcaaatttcttaggaattttaaagtttttattagtgagtggtgacaattaatatgctactaattaatatgctacataagtttgtatctacacaagtcttatttttgtgttgttgttgtttctgtatggatcaggcggcgcgtgtggttacggaaacttatacagtcaaggatacggcactaacacggcggctctaagcacggctctattcaacggcggccaaagctgtggtgcttgttttcagataaaatgcgtagacgacccaaaatggtgta

SEQ ID NO: 10129 - DNA, 670 bp, Arabidopsis thaliana landsberg
ttttcaagatcatggttaaagcttcacaattttgtatattttgaaccgtaaccggtttgcttgctgtgggggatgaggttaaaagattcataagttcgttttctacttttcttcttcgtcatccgcgcttaaagtcttagacctgacaagagaaaacaaaaacgaaacctttattattcaagaatcagtctttgcttcgattcagatcttttcacagcgagcgtccatgggttcttctttgccatttgatttaatcttagagatacttcagagaactccggcagaatctttgctccgattcaagtctacgtgcaagaaatggtacgaactcatcagcaacgacaagagattcatgtacaagcacttggataaatctacgaaacggttcttaagaatcgagaatcgtgagagggttcaaatcttggatcccgtgaccgaaatcctcgccgtttcaacaatcccaaacgagcttcgccacaagtattttactctgattcactgtgatggtctaatgttgggcatgtgttacgaagaactaggtagtgaccccaatcttgcagtttggaatccggttatgagaaaaatcaaatggatcaaaccgtcaccatcgttggtttgtactggggaagtgattacttggggtttggatacgacaaaacatttcgtgata

SEQ ID NO: 10130 - DNA, 1692 bp, Arabidopsis thaliana landsberg
catttcagtctctcattattatttctttattttttagtgagggagaggaacacttttctttattacattggtctcaatatcagggatgaacaagaagtcaagattactaaccgtttgaagaggtaaaaggaaaagcagtgaaattagctccagccttagtggttgtgttggaaactaggatattctcaggtttgttggtttgccatttagatttttcaatagtcggattgagtcgaacctgcagcactcatcaattagataataatcaagagaaatataaatcatgattcctaactaaactatagaaaacttttgttttttttttagagtaagagaggagaatgactcaatagactcaaaaacgaaaaataataggaataaaaaataaaaacataattagtaagaacctcccccagacttaaacgacattgtcccagtggcattatttccattaaagaggggaaaatgaaacaaaaataaaagaaaataatagaaagtgaaaagaaaaatcaaaccagtgggttgcctcccactaagcgctcgttttgagtcaatagcttgacttggtggagttcaagatgtgggtggagtggtggaggattgatgctgcctcctcgccttctaaggcggtgtgtaaagggatctggctggggcagctgcaggtttcgatcgacaatcagggatgtgtcgatcgacactcatctcgtcacctgcaagaacaacaggagaaacaagctttcgaggaactctaggcttgttatcttgtgaagcaatcttcgaattatctaaagaattaatcaaaggtacccaatacaagagatagaagagaacttatcaaagagggcctcaagtggtgtgggctgaagaggatgtctagaatcctctgtctatgaatcccaagggtgtcgatcgacaggagggctggtgtcgatcgacaccgatgctctacaattctcattggcgaggtgagctgatgggagcgttgtgtgtggctctgttttgggattttgagcagttagaggaggtgtgtctgtgctagaggcaatactactgataggcttagtgagcgctgaaccatccatgtcaaactccatctccatataacaaactttgagagagatcctacctctcttcacatcaatcctagcaccagctgtagctaggaatgctcttccaaggataagaggatccttgggttccttctcataatccaggtccacaaaatcagcagggttaacagagttaccaaacttaacaggaacatcttcaaggattctttcagggattcgcttggaacgatctgcgaagagaaaagtgatgtgagtcggcctgtaatgagtcatgcctagtctctcagtaacagacttaggcatgaggttgatacttgatcccagatcactcaaagagcggctgaatctgcttgtaaagtaaagcaatcaagaacaaagctacctggatctggaaccttctcagtggtctggtctggagtgatagtgcagatgtactcaacaatgtccactggctgtgccttctctttcttgaccttaggcagcatgatggcactgatgtcccgtgtcaacagcttagcttcatcggagctaataccattgtcaacaagtcgcttggcatacctgttgagtggagaagaacatgtctcagatgcatctttagggagagaagtgaggatcttct

SEQ ID NO: 10131 - DNA, 1341 bp, Arabidopsis thaliana landsberg
aaatgccaacagatgagaattaagtacctggacttgatccaaacgagagtgttcttcaccatcgcttagaagaccaataaggtgcacagtgcctttctcaaaagattgagagatgtatttgaaaccttcatcttcatagattttccctgaagcaagggcgagatcaacaagcttagcaccttgagcgtaaattcgaccagctccaagagcattgtggccaacttcactgtttcccatgtcgtcttcgctggggagaccaacggcggtaccatgagctttgatcaacctccatgtgtcgggcttcccctgtgaagaataaaatcgaaccgttgaagtccataatcggaatccagcgaaatcatcgaggaaagaagtggatataaacaaaaaaggaaacatacgtctttaagggaatccatggcaggagttggagctttatggatgcaattgtattgatcgggatcagattcaccccatccatcgagaacaatcaaaccgatagttttgcctttgggaagcttggggtggtccgcaagtttccagttaacgtcgccggagctacccataactgtggattcagatccactcgccggtgagaaattaaaggtttaaggaacagatctgagaagcgagagagagagagataacggaagcttaccagcggagaaacagaggaaagcttctcaaagagtcttatggagattcgcagagacagaagtggttatgtggtgaagtatggtaggttgagagctatcactgacataatatgagacttttatagaaacatagaaatggaaaagtagcgatgacgtggtaccaatttaatgggctttactttgggctcaagtaaacattgtgaagcccccaaaaaaatggaaggagacgaatgttctagttttagctgctatgaacgaatgttctggatcatgccgtttgtaatagtcatggtgtgcgccatgtaaaaaaaattgtatatacctttttattttggtcaacgtaaaaaatagcatacagaaaaggtcaaaccggagttaacttaatagtttatacggtatttgaaccagaatttgatcaaaaatgggtaagttttagtaactgggcttacattaatttttgttgacagtaactttttttatctaaatcattatttaaaccttgagattgcattaaatcaaactgaaattacacgaaaaccaaaccgaaaactcatgtaagaaattcagggttgtgcccatttatttattcaatatcatgataatttttactggggaacccttcaaaagggttggtgagaagggcctaaaaaaccaattttttaatggggcccaaaatacaaaaaaa

SEQ ID NO: 10132 - DNA, 2065 bp, Arabidopsis thaliana landsberg
gttgttccgttatgtgtttgtagatctatgatctgagttactgctctgttttctgagatttaggagggtctatgtctatgtttcttcaccgttgcaaatgagttataatttctgtttacatgtagtgaaaaaagttcagttctgtgacataagaaagtcttaaaatttacgcaaccctagtttttttattttctaagatttcaattaaagaacattagcttgtctcttcatgatagttttccactgattattatcacaactttttttttttgttagatatttttaatcgaaattattgtagagataaaaatataaatacgtttttttttttttggtcaaaaaatataaatacgtttagttatagctaaatcttaggagtataaaaaaaaaaaagtaaataaaaatcttaccagtttttatatctcgtatatcttctgtatttttagggtttttctgttacatcattctatgttcacgtttctttgatttttttttgcttgatcatttttaagttgattcgctttttgtcgtttaagtgtaatggattttacaacagttgaggtcccagatgagtggccacataattcgaattcctttgtggacatctcaacaggtataaccgtataattcattcatgtcttattttggttgtgtgcgtttccgttcaaacgtagaaatcttattagacatatcaattgtcaagtttcagatcacaatggatcttcacctcctgtaactccaaagtctgatacagtagcttccaactttgaccaaggaagttctgatgtttctggcaatcatgattctaactcttcttattccgatttagattcggacacggaggccttttactcatcttttaaccatcacctcgtatcaccagggtcaatggatagccatgacttatccccggagaaacaaatgagttatgaagaattgatgaagaaatatgtccagtgtgaagaagagcttaggactacgagtttgaaacttcaagaatttgagcaagagattgagaaactaaaggagaccgagaaaaaagaatcggttgttctgtttggcgagtatctacgtggtgagcgagaaatcgcacaaggagaaattgcgattagggacatagctattgagactgagagaaagcgagttctcgaggtgcaaagacaggtggttgatttggaaactgagctttcagacttaagtttcaaatttgagcatctagtgaatgagcatgaggtgagtagggactgtttagatgtgtcattttctgaaatctctaagctaagggaaatgttgtgtgattgtcagcaaaatttctctattgagaaaacaaaactggtagatcagataaagcattctgaggcagagaaaatggagatgcagaggaaagaggttgagttgcaagctgaaatcagtgcattgaagacagacttggccacacgtggtgagcatattgaagcattaaacaaagatttcgacaagcacaagctgaggtacgacatgttaatggcagagaaagacggagtatgtgctgaagtagacaatctaaaagcagagatgagatcaagagacatccaaattcagcaaatggaggagcaacttaaccagctggtctataagcagacagagcttgtgtctgaatcaggaaatgccaagaacactgttgaggaactgaaagctgtggttaaagaactggagattgaagtagagctgcagagtaaggccaagaaaactgtggaggaactgagagctacggtctgggaaatggagaagcatgcagagttgcagaggaatgcgatatcacaaggagaggaagagaatcgagaggcgattagacagctttgtttctctctggatcattacaaaagcggatataaacagcttttgtggtatctttcgggcaataaccagcaacatcaaacaaccatggtcgtgtgagtttcgattgaatactcttatcatttctttagtcgttacagtcttatgtctttctttgtctcgtcatgtttaattatgttattctgagttatgttctctctcaaactcttggacattaatcttaagattt

SEQ ID NO: 10133 - DNA, 1546 bp, Arabidopsis thaliana landsberg
taataaacatcgaaaaggacaagacaagtagttgctctgtctcaacagtttcatgttcaaaactggaaaagttgtttacacaagaccagaaactggaagtatttgaatgatatgttttgttcaacagaaacatttggctggtggcccaaattaggtggacagaataaaaagtggagaagctggacaagtacgtacttggtttgattcagataagttttggtggtagatcaaatagagagacatgaactgtaaattacaagttaattctacttttatcaatagtcaagtagagaattgagctacagaactactatactaagaggaaataattaataatgtatttaacttacatttataaactagttaagagctaagcaaaaggtctaagttattgttgattagctctcaaaatgcatataagcgtggtggacaactcggaggatcgaatcagtcaagtgtgactctctgtctgcaattcttggctgcagatagaagaaaaaattgtcatgttaggaagaaaagatacatactgagatctgtggtatggttatgtcacagtgcatgagaaagagaaattaccaggacttaagattcgtaggcattttgttatggactttacagtagtcatagagtcagatcctgcaaattgaaacagtaagagtttatcagtgaaaacagctataggagttttatatttaaaatgttacgtgaagattggactaaaccaaccttttgtgttcatgtctttcccttgaatcatttctgttactgttgatgtatactctgatacaacctggtcaggctctagattcgtgtttcttgattcaggagatgacctgtgatacagaattgaatctaataagtaaaatgatagtagataattagaattttcagatagttattaagccaaagagaagaatataccctgaagcagtctctatgtggaaatttgatggctgtggtagggaatggtttgacatttcttcacaaccaatatcaaaatcgaatagtagctccgaaaatgaaaagtcttcactcagaagatctatattggaaaaatcaatgtcaaataaatcagcttctgcttcagagccagatgaggaagttgaaaccatatccacagtggcaggtgcgtctaagtgcattgtggcttcagtatcatcgaagttgagccttcctttcacatgatctcttttactcgacattttcagattagacttaactggcgaaaaagaagaaaccgtatggctcctctccactgtataagaagcaatttgtttgagaggactgactgtgattctctccttagtaacaattgtgcagtttgtaggagtcacttctttatcactctgaggagatactttctgttggtggtgtcctaggacaagttgagttgctcggaggagacgtgcctgatttgtcaacaaacactttgcccacttgatgtaagatcagacgactcattagtagctacaccattgttcaatggccgttgcatttcagaaggtgtttgaatgtcaagtaattagcagtttgtgggatcctt

SEQ ID NO: 10134 - DNA, 1133 bp, Arabidopsis thaliana landsberg
  unsure (1)..(1133): unsure at all n locations
actgaacatgaaatcgacttgaaaaatgtgaacttatatattttatttatttttctcatgtttttaatttgaaaagggaatgcagaaactatgtttgaaacgatcgaatgttaaaagtggctatgaaacagaagccggcctagccacaagctagggaagcatgtgcttgcgggcggggatgagttatttataactaggctctcaagtattctgtaatgtcttttagctctactggttaaatactgggtggatgaatgagaggtttaacggttcgattcttacacttgcaattgcagatattaaacatttctttttgggaagaattaagcctctttttttgtttgagcttatggtcctcaaaatgttagaaacctttcaatctaatttctctgttctggtttgataatacaaaaacttaagtcttgtatcgtttcttgactttgggttcactgatggacacattgggacagtttggtttggttaaaggggatgcccatcatagcttcccgtttatatcaattctgaatgcaattacaacgtgtagacgtaggataaacgtgacggccttaggaagaagagtagctggaacagaattgtcaatgagtcaatggtcttgtattgaggacaaggtagaagtctcgaacgtggtatgtactntgtgtcatttttattaattcatcaatgagtcaatttgtttttaaatgcctatttgagaagtgtctcatattatatccatggattgatatcataaagtgaaagctcatctctgtttgctaaatgtcaaaatctctttttagaaagtcaagtagaaaaatggagagacgttgtgtgttctttgtgatttttttccttatactacatcttgttcaagctcaggatccaataggtacttacccatatttattgtttttattctatatatgttttattccgttttaatttttgtcatttactcaattaattgtaagtacactcaacataacaatcacagataaagttcacacatttttttttcttttggtcaaatacgttcacacatttatgtggcgtagatagatattcattaaatataaattagatgtccacatttaaagatagtatgatacagtaaaaaattaggtattttcaacact

SEQ ID NO: 10135 - DNA, 1270 bp, Arabidopsis thaliana landsberg
ccgatatataatgtaatactaaatgttgctttagtttttttatgcgacataaaaataaatcagttgttctattgtggagtattttagaaaagttgacttttgaatttcgactatatttacatttcaaagagacatttattttgcaggaaaaaatggactaaagagagggactaattaatgcatgacccaatcggttttacgagtaatacctcgagagaattaggggagtggtgaagaagttttccttggagacgaaactcatgcatgacccaatcagttttacgacctttaggggatcgacctcggtaaaacacaagtgtctttctcatacccacaagaccaccgtttctttggattgctctatctttcccggtggctttccaataaccggtggccgtagcccggtttgttctgtagcctgttgcgtatttacggtctttttggctgtaaaagtaccattctttccctcccactctcgccgtttctgaaaatgacctttttatatactatcaaacttaactattgataagaagttgggcgttgaatgtttttctttgtatattacatagtacatactaacatacattaatggattttagttttctattaagggagggggtattttctccaacatattttagaaactttatgataagattaagatatataaacagaattctcttttcagaaatagtcttcatcttaatgacatattcaataatatccaaatggtttctatccgtatcatatattcatatcttaaccaaccagtcatcgaataggcatccaacacgtctgcaagattaggatgatttgttcttttattatgtaaacggacggtatcgttttcattctaaattaataaactatatgcgtctaatgaatgtgaactaagcatttataattgtgcagctaaatggtcttttcacgagaaattagtaaggaacaaaatactaatttgcaggtggcttgcaagttgaactttttttttttttttttttctaaacaccacatatactcgaattgtagaagaaacaataaccagatcatgttggaaacaagaattatggatttaatagctaccgatggaatggtttaaactatatgatatagagttgcgagatgttgtgtaaacacagaattacttacgaggaatgtcccaaggctcgcatttgttaagatcgacgtcgatcaagacaactggttgatagaggctgcgaacggttcttctcattaagtagtcacagacgagctagtcgtctctaggatg

SEQ ID NO: 10136 - DNA, 1211 bp, Arabidopsis thaliana landsberg
aatgttataatatcttactaaagcccagttcggaacaaggccttacccttatttaaagccccagtagatctgtttttgaattgtcgctatgagtgaatgaggatgggtaggtcgaccctcagaattcttaattggcacatgttgaatgtgagcccaaagcagccaccaataaagtgaatcaactccgtcattttcaatgctttttcatgcaagagggaacattaaaatatcgtcgttattagtattaattatgtttttgacctgtaaagaatggacaaaacttatactaaacaaattatttcgccgtcaaaaaggaaacaaaagttcagatataaattcctggtagcttcaggtcaagataaagtcaggtcaaaggtgatgagctctataatgagtcctccaaatgtgatttaagtttaagaaatgaacacacttttcttaagccggcattagttttatgttattaccccacaaatgatgatgatgatgtcgcatggtccttcacgtgattacaatattaatttgccaagttgatatcgtcatgactcatgagcaaagtgctggtcgaacatcgacgtattcttggataatgttcgatttttgaactggtcctaattctaatatcaatattcttacgaaactaatcacattggtctataaaagcccactcacacttcatcttccacttcaaaattcgaactttcgaagattctcattctctccactacagcaacaaattcacattcctctctgtttttttgttttcgattctccttcttcaatggcttccatgtccaccgtcttccccaaaccaacctctttcatctctcaacctctaacaaaatctcacaaatccgattccgtaaccacatccatttcattcccttcgaattcgaaaactcgtagcttaagaaccatctctgtacgagctggcttaatcgagccagatggtgggaaacttgtggatcttgttgtaccggaaccgagacggcgagagaagaaacacgaagcggcggatttgccgagagtgagattgacggcgattgatttgcaatggatgcatgtgttgagtgaaggttgggctagtcctcttcgtgggtttatgagggaatctgagttcctccaaactcttcatttcaatttgttgaatctcgatgatgggtctgttggtaatatgtctgtgcctattgttcttgcgattgatgatcaac

SEQ ID NO: 10137 - DNA, 799 bp, Arabidopsis thaliana landsberg
gaagtttctcttgtttaagctgggcttcagctttctctgcgcgtgtacgttgagtttcaatctctactctgaattcgtcagtcaatgatatccactcgctttccatttctgtgcacctaagtctttcttcctcgatatctttttcagcattcttgctacggagttgaaacgaacgagccaacagagatgatctcagttcattggtggacatggttacaggcgtctgcaattttcttttcagatcctcaatttctttgagtaatgcctccttctcgccaatatcaaagtctgtcttcttggagtcatcatccgagatttgttttacgtcatatgtttcagttatacagctgagaagctacagaaccatggagttgggatttatgttacaatctatcatattttcttcactatagtagtcacatagtaaattaaagtaagaaccaacctggttttcatttgcagaaggaagtcgttctccattacttgctcccataagtttttctgtttcatcctcagtttgaagtttgtgttgccctaccttaagaagatatgatataaccagactgcttaaccatatgtactgatccaagtttcagtaggcataagacatagaaattgggttaccaggcgcgttagctggtcaatcttggctgcttgctctgagcacaattttttaaagctcttgctgcttctcaagaaaccccttccaatatgaaatcccatcctgaataacaaataaatccagcaaccgttagccttcagggataactgtaaaaaactaaaatctattaaaaacata

SEQ ID NO: 10138 - DNA, 1077 bp, Arabidopsis thaliana landsberg
  unsure (1)..(1077): unsure at all n locations
gtgaagcgcagtatgttaattcttaatctgtgggaaaattaaactttaggttgaaggggaaccagatattcttgcaatttaagaggctggttttttcaattgtgtgtctgttcctgatggagctccagagacggtttcttcaaaggaaattccatctgaatccaaggtaggtttcatactttatatctctttttttcccatttctctcttatttgatttcttaagcattttactcttctgtcaaactaggacacggcgtttaagtacatatggaattgcaatgactatnnnnnnnnnnnnnnnnnnnnnttaatatttttggtttgatgtgtgattgttttgaatgtcaatattccaagtataaaattgtttttattggtaggcgtctcggattgttattgctactgacggagatggacctggtcaagctctagcggaagaacttgcacggcgtttggggaaagaaagatgttggcttgtcaaatggccgaagaaaagtgaagatgaacatttcaaagatgcaaacgaggttagattagattatatgtaaaatttatgaaactgccttcgagattaccttgatttaaatgaccacaatgattccttacttgggcgattcttaggttcttatgtctaagggacctcatttactcaaggaagctattttagatgctgagccatatcctatactaggattattctccttcaaagatttctttgatgaaattgatgcctactatgatagaacacatgggcacgagtatggtgtttcaacagggtggaaaaatttggacaacttgtatagtgtaagcgttaaagtcatgtccttttttcaaaaatattgttgtaggctcatcaactaatgtgatatattcaatttgctcctgatcaggttgtgccaggggagttgacagttgtgacagggatccctaattctggaaagagtgaatggattgatgctatgttgtgcaatcttaaccatagtgttggctggaaatttgcactctgttcaatggagaataaggtgtgtttctgaacttgtccttaattggaaaaactgctttatagtagctttac

SEQ ID NO: 10139 - DNA, 463 bp, Arabidopsis thaliana landsberg
caaaaaacatctgaagtcattaggggggtttgttaaatcttctttaaattattttacgaaactaaactgtgaagagcagtatgttaattctttggggaaaataaaactttaggttgaaggggagatagataaactcgcaatggaagaagctggctttctcaattgtgtatccgttcctgatggagctccagcgaaggtttcttcgaaggaaatcccatcggaagacaaggtttgactggtcttctaggtttcatactttatatctcttttttttccgttctcttttatttgattccttaagtattttactgttcggtgaagctaggacacgaagtataaatttctatggaattgcaatgactatctaaaaaaggtgtgtgataatttattatttggtctgaatgtcaatattccaagaatctgggaataatatggtctttattcgtaggcgtctcgaattgta

SEQ ID NO: 10140 - DNA, 913 bp, Arabidopsis thaliana landsberg
agtcgttatctttttcgatcatttttactattgtagaattagggttttcgaggtgatgatgataacataagcgaataatactaaactttagaaccaaaaaaaatcgataaccaaatagatacgtaccaaaactgtatggataaccgaacgctcaggactaccaaaatttatataccttgtactccaattttctttattccaatcccgttaatctaaccgcgtataaaacaccacgtactccattttgatttcctgtgaaaccacattttgtatgattagttgttgttgttgttaaataaaaagatatgatttatccctttagtttattaaacatgaccttacaaagacaattttaattgctgtggaggtaaaaatcaagggtacaagaagctgctaagctttatgggccagatatacccaaaataggtccaactatttaaagcccatacaaaatggtctaggttaattagtgctcgttatataaaaccctagtttctctcttgccgtctctataaaatctcttttcgattatcagcaaattccttcatcatagtctccatcgggttttgattactttgctccatgaaaatcgtagtttcaagattctttaagtcgtatcaataggattcaatgtttttatcgatttggaatctgggattctctgtttctagttgtcttctagtttttgggtttgcgaattatactattgtagaattagagttctcgaggtgatgatgataacatataatcccagctctatgagaccttttgtggtcaaggagtataactatgttcatacatttatctgagccttagaatttctagcttcttgcctcataaaatctttgttagattggtttggttttataaaaaatagcgttttaaaatcaaactttgttaatgtgtgctctgt

SEQ ID NO: 10141 - DNA, 1212 bp, Arabidopsis thaliana landsberg
agtaactacaacctctttctttcttttctctccctctattgatatccttaatatcttcctttaatcccaaaatccattaccgctgcataaaatctcattcaataaagaaacaccattgattcaattcccagaaacatcaacctctcacctgtttccaatttgtcggcaacaacaacaaatttctattctgggttctgtgaatttcgtagggagaaagagaaagagagagagagagagcttctgggtatttttttttaatggagaaggagatctcgttgttgctattggtcatcatgtttttaaatctaacgctcactaccgtcgccgacgtcgacgccgttagggttccgttttgtgctacgaagtctgttaaagattcaatctttgggctccgagatcagacttgttctgtttctggtgttgaatcagacgagcgtcctcgttttgttgctgtcaccgaggtaattgagatttcaatttctagggtttctgcttgaaagaatctatcttttgtttcttatgaatgttatcaaatgttttgtgtagggtgatgagcgttggttgcaaatagcattggatatgattcataagaacaagtgtgattatgtggctttgcttttctatgcatcatggtgtccattctcaaggtcatttagacccagtttcgatgttatctcttctctctattcctccgttcctcattttgccattaaggaatcatccgttaagcctaggtgagttaatgaagcgccacaatctttaaactggttctgttgtggtgatgatcttttggttatttgttgtgctgcagcaccctttccaagtatggagttcatgggtttcccactctcttgcttttgaattcgacaatgcgggcacgataccgaggaacccgaatgcttgattctcttgttgctttctacagtgatgttaccggtatggcttcatatatgtagtcttctgttctgtatttaccctgatgtggatagtgtttttgtagtgaggttaggcatttagtagatactagagagttggttttgtgtgatggtattagttgtttatgatcaatagctcaactagtggaactaacaaggaatgttatgagattgtaggcattgagacattggataaaacttctctcgagagaagcgtatcagttcctcatctcggtaacgaaaacaacacagagccagaaaactgtccattcacgtg

SEQ ID NO: 10142 - DNA, 523 bp, Arabidopsis thaliana landsberg
cgtcctggttttgtcactgaggtacttttaagaatcaatgatttatttctcacttgctttcttgatctaagtttgtgatttatgtatttgtttgtttatgaagggagatgatcggtggttacaaatggcttcagatatgattgatgagaacaagtgtgactatgtggctttactattctatgcatcatggtgtcctttctccagattagttagaccaagttttgatcttatgtctctgttatattcatcggttccacactttgcaattgaggaatcatcagttaaagctaggtgggttttgtataaaagactgaaatcgtgtaatttgattgagaacttcatggtttgatgctcagttttttttgtggtgtggtatggttcagtaccttgtccaagtatggagttcatgggtttcctactatcatccttatgaattcgacaatgctcgtagtttaccggggatcgagaactcttgattcccttgttgcctttacactgatgttacgggtaaggtatttgagtt

SEQ ID NO: 10143 - DNA, 1073 bp, Arabidopsis thaliana landsberg
acataacaagaatcacagtttaaaacacagctttttacaaagaaacaaaaatcgattatatcctttgctcctgcaatagtgtttggtgttaaggatgtctcacctttctttcacagattttgaaacatcaagataattgagccgacaagttcctagtagcagttctggtagttcctctactgtatttgcctgatttttgtaacaacattgaaaatgatcattatgtgatccttaaactgaataataaatcttacaatacgaaaacattgttctgtttttttttttgcttacctgtatcaaaaatgccatttctataaccaaattgttgagatacccaagaacaagattggttacacctcttgcaacagttgaagacccaacatcaatgtcaagctaagaaataaacaaagctcaaaaacattatgatgttgttatcatatcacaaacaagatcaactttgattaatattttacctctaagtagttcttgccgcgggtgtaacaaacttcaagtgcctgaccaaccaagcaagccttctttccaacactttgtttcacaatccatgaacctttggagatatgagggatgagtttaaagcgcgagtttcgataagcattgtcaccattcacaaaactctctaacaaaggatgctcctccaatggtgttttcagcatatagtacaatgctagactgtacatagccgaaccagggacctgactcaatacatttgctacttattagtgtctcttaactattataaaaccattgcttctttagatttaaaagctctcaaattttcacctgtatgtttacaatgaagaaaaactcgggacttcctttcgctgcgtattcctgaactagaccacctattcgttcaccaagatcatcttcccgcttatctgaacttatccagtcagctccaatcatttgcatcaatgtgccttttgcttttacctatcgtttgagaagtacaaacatcatcacatatgtgttgactttgcatttaagattcaagaagaacacacacatatttataactaaataatggattaccttttgttgatcttttaaat

SEQ ID NO: 10144 - DNA, 763 bp, Arabidopsis thaliana landsberg
gaaccatcgcaatggcaatatggcatcctcaatcggaattgccaaggtttgaggaacccttggacaattcggcaccttaaggaaatgaaaaaagagcatttcccggatatcttattcctcatggaaaaccatgaattctgatcagtttctattgaaagtttttagatggcttggctatgattactttcatactatagaaccagttggaaagagtggtggattagcgatcttttggaaaaatcatttagagatagattttctttttgaagataaaaatcttttggatctaaaagtgtctcaaggaaaaaaaagctggtttgtctcttgtgtgtatggtaaccctgtgttgcatttaagatatcttctgttggataagcttagtagtattggggttcagagaaattcagcttggtgtatgataggggatttcaatgacattttgtctaatgatgaaaagctagggggtccatctaggttgatatcttcttttcaacctttcaagaatatgttacttaactgtgacatgcatcaaatggaaagttcaggaaatagtttcacctggggaggaacaaggaatgatcaatggattcaatgtaaattggatagatgttttgggaattcggaatggtttacgatgttttcaaattctcaccaatggttcctagagaaattagggtctcatcatagacctgttctggtgaactttgttaatgaccagtaagtgtttaaaggtcacttcagccattgaaaaacgggttgcaaa

SEQ ID NO: 10145 - DNA, 1515 bp, Arabidopsis thaliana landsberg
  unsure (1)..(1515): unsure at all n locations
attcagacaattgggacaataacaacgagcgaaaaaaaaaacagagttatgttgttgatttatatagagctgaataagtaaaagtatatggctatataggtaatctttgaaggtgtgaaatgcaacgaatagatagacacttcaattttgtattttatacagaactagaatcccaaaagttattccaatatatatatatattaatcagattgagacatatcagtggagccagctttcgtcactacacactattacctgaatagcaaagactccatgctttttcatgggaacaaacttggcaatactttgataaggttcatacaagttaagctctcggagttccacgtcagcagcggcttccacaaactccacaccaccgttactgcagagaatctcgttctctccgttggtgggattgatggagacctccccggaaagaacgtagtaggagacaagagcctccgccatagccgttttgagggcatcaccaataatgccataaagtggtttcttgtagaagaagcaaacgttgatgtcgacaggagggagaagcaggtcgaggttggagagagggataaccctgttttccggcaaagagagaagaggagcagccgccacaacgacctccttcctcgtggtggtcacgttgaaactacgtgcttcagatctaatcacagataggctatgatatctgaatccgtccaagaacttcgagctgtggagagaagaggaggaaaagtgaatcatcattattgtttttttttctttcttttccacgaaagggaaatgagcccaaaataaaaccttatccagaataatacgaatgcggatggggtaaccttacgaccaaagcactgttcagtgatggtaacctctaacctagcgatcatatagcgaccaaattatatttttgcaaattgttcgacaanaagtattaaaataactatctattacaacacgtgccaatgtattgtgatttagaatctaaaaggttccaacttagcagaatcttgtgcttgatttgtataattgcattgagccacacataacaaaccactgtttaaaaagatgtgaatagttgcagcagcgggtgggcaaattagtccagaccttttttttgtttgtttacaaaaccggtttgcagtagacaaaatcaacttttcatgtacgtaactacgtatacgtatcactacaacttttaaatacaaagtaaactaaaccaaaattactaaccaaactactttttatttttggttaactatggctgtgaaagataatggatttagaagaccgggaatactcaaaccggcacgtatccggttaataaagacaccggcaaatttaaattcatcttccgtcgccttcgtaaagtcgccgcagctcaaaattcaataacaatgttcctttcccgcgtgaaccccacggacttccctccattcgtagcttctcgtcgtctcttctccgcctccgcctccgccgcttctcttcagcaatactgcacggagaagccaccga

SEQ ID NO: 10146 - DNA, 550 bp, Arabidopsis thaliana landsberg
tgatgatgataataaagatatagtgtggaccgcgttggtgattatgaagttgcttttaatgggatcatttgtcaataaattctcgaattgtctaatattattggaccaaaaaagagagaaaaaacccgtaatattatattattggtaataacttaataagtgaagtggagtgtgaagcaatgaggaaggaatctacacttatagagaaaccaccatatatatctacattcaattatggattggtttagtccacgtgtcgtcttacattaaattgtcttggttgaaatagattgatgatataatgtgtaccaaattaatgagtttttaatgtaatatttgtaccaaagaaatttggatgccctgttttaaattagtacactgtacacctaggtataatcttgtgtaaaattttcaggtgttcaaagtcttttttttttggtgagatttcgttaatgtaattaaagaggttgactaaatattttatttactaattcctgtttgactggtaaaacattgagcgacgtctactctctttgatttattttcttaa

SEQ ID NO: 10147 - DNA, 945 bp, Arabidopsis thaliana landsberg
  unsure (1)..(945): unsure at all n locations
ctcttataattctttcttgctcattcctcagctcctcttatcattttgaatcaatacgaccacaaatgcttttggggtaattcttcaattattttctaaaatcttgatcaatgtcccacgtataatctttttggccttgtatacacaccaagtaggtaactaataaatctttttgggcccagtgcaaaaaccatcagagacttcgtcagggccatacgtaagtccgtcgccgatcggttatccaaccagagataaggcggtgggtgatcctccggcagcagcagagaatacaaattccaagggctgctgcgaagtcgtaatgttaatattacagtacatatctaatttaacttactttctttatagatagtttggctctaattattagcaagatgttcatccgacgtgcaactctcttttaatgatctgtctgcctacactattggcagttgtatccagggttgcggcgaatgtgtcatgtgctgcgcgtcaggattttcaggatgatgagactcaagactttgcccaaaccagaaaaacaacatatacgtaatagaggattcatcagtatgttatttgcttcactggttgaaagagatccatgattcccatttgcttcgtctattttgtttctatataaatcaaagtaaaaaacaaaaatagctagtcataattcgtagcaacaaaatatgacgtaatgattttttattcctaagtttaatacaatatataataatataaacaacacctaagtttataaagttgttttcctttgcagtttaacggaccacaccaacttaaggaacaaagccaaaactattaatcatggtacagaggcagngggataatccctttttcattttgatgaaatgttaaattaattaatcatcaaaggaggttttttaatttccatgggagtttagggccttcccaaaaaaaaaaaaa

SEQ ID NO: 10148 - DNA, 870 bp, Arabidopsis thaliana landsberg
agaatccatacaagcgactaatatatatatatatatatatatatcttgagtcaagataacatattgatggatcttctattacgtgttgtttttctggtttgggcaaaggacttcagtctcatcatcctcctccgcagaagcagagcgcgatatggccacaacacaaaagaccactgccaatagtgtagacagacaacaaatcattaaaaagaaagttgaacgccggttgcgaataattagagccaaactataaacatataataataataaaaaagtaaactaaatgaaatatatatgtactgtaatacgacgtggcagcaattgggctttttctccactgcttttgccggaggatcacccacccccttatctctggtcggataacccatcgtcggcggaggacttacgtacgtccctgattgtttttccactgtgcccaaaaagattatttaattgtctaattgctttgtgtagaataataactgttcatggttatgcatgcatggccaaaaagattagacgtcggacattaattgatcatgattttagaaaatagttgaagaattacctggaatgtatttgttgtcgtgttcattcattctggtttgaggagctgaggaatgaggaagggagaattatgaagaggagagagtgttgtggtgttttaatttaacatagacgaatatataggaagcttctaaataaaagaatgaaaagtcaatattgaatagacatacctattttgcaacacttgtgttatatataaatgctagtgttcaagaaagtcaatttcatataatttttatacagcgctttcttttcgaaagacacgtatataaataatcattatgattatctggtaattatgcg

SEQ ID NO: 10149 - DNA, 1116 bp, Arabidopsis thaliana landsberg
tcgcaaaagaaaacaatatgcttaatccccaacttcaatgcttcggttagtcctcggatcaatgccttaagctctgctccctgacgactcatgccattgtctatcaatggtcccttcatctcaaacaacaaattatccctctggtcacaaatagcaaccccaaacccagacactacgtccgtcatcttccccttcccgttctcatcgctaaccaaacccttaaagtaaagcctatacaagaggtttccattgatttttccggcagcagtgttaaccctcgaacttccctcaccgactaattgcgccggacgaacagtttcctgaggcaagggtttcgtattgccatgtccggtagacgtactccgggagttaccgagcccaatgttagggtttcgttcatctgtacgtacaccagtgacagactcgtgggttttgccttttgctttagagtttccaccgccgacggctctcttaaaatcgaaaccgtaaccgctacttgttttcgccgtcttcgaatcgtttggattgttttcaacgataaggacaccacacgtagccacaatcggaggtgacggtggtcgttgaggagtgcgagattgagaagatagagaagccgcgagtgcctcctccatctgtaaccgaaaagcatactcggaatcgaaatccatacttgctctccgcagagctagaatcaacaactgttatgctctgttggtgaatggtgacgacagacgagtgacgacgaataggttttttgctttacgtcgtccttttaattaatatatatacagagaaccgtcaatcacatcatacgtgtgtgggaaggggtaccaacgtcatttgtgaatagcttacatgagacgcttcttcgttaaacttggtcaaaagaagtcaatggaccataaattctcgattttaaccagtaaataaaaaggtaaactattatctccatcttatcaatcagttgagtaaaaagtggaatctataatatcaaattaaatctgttattaaagatagtatcaaggtagtaattaatgaaataagcaaagcatttttttcctccttctcatccgatacttccgatagttaccaatttgaatcaaaattatctgttct

SEQ ID NO: 10150 - DNA, 447 bp, Arabidopsis thaliana landsberg
  unsure (1)..(447): unsure at all n locations
tgctgccttctgttgtcgtacgactagtgtcctctgaagatgacgttgacctccctgtcaatgcgtgggaatgctccacccctcccacttctggttgctgaggctgcctgggctcgctaggccctcctcatggtgggggaagtggtagacgctggaacggtcgaccattcccgacggagtgcttgaaatccctgcagttccgcaaggtgtgtcgcatgtccttgtggtatgggcatagggcatcgaggatgtcgcccagtgtctactcgcctccatggggtgctcctcgggcacgagtgacgngtggtccgacggcatggacctcctcacgaggcctcttcttccaacgcctgtcgggttgctggttcgcgtcgtgccatggtgccggtggtgcacgttttgtttctctgagagatcctgggcctgctcgtcagcagtgatgtagag

SEQ ID NO: 10151 - DNA, 526 bp, Arabidopsis thaliana landsberg
catatagatgcattgtttctttcctacaaaagcaggcacatgaaaatgctaactaaattggctgtactaactgccagaaaggagttgagataactataccatacccgcccatcagtagatggtttgatgccagaaaccatcatgctcttaagcccgagctgctgttttgactttctgatggaatctttaccaagtaatttctgcagccagaataaagtcggtaactatgaagacattgaagagaacaaaatttttaaaaaaatcaaacaaagaaccaacctttcttgtagcccagaattcatcttcagtcagtactttactttccacaaattgcttatgcaatctctgcagctcactttaaatcacgtatgttactcatattagaaggaacttgatgagccaatgaaactttgaacccaaaaaggcaacttaatgttccaattacatacctattttctctcagaagcttgaagcgcagctcccattccttaatactgagttgctcggaagatgtcgagacaacgga

SEQ ID NO: 10152 - DNA, 1822 bp, Arabidopsis thaliana landsberg
cggacccgatctgtcttctgcttcttcagtggcggagaaacgaactctgtttaatctccaaactttgtgatatgggaatcagccagcctcgttcgaaaccctagacatgagaaaattatacgagactacaaatgtttattctattaaaaaattattatatttgtttatttatttttaatattatgttataatagctttaatatattattacatatagggttattggggccaagggcttgatttttaatcgatcactatgacaaagcctgctgggccgtgcttgttgttcatcaatctgttgctgaggcaggttcgtagtaatcaagctgcaatttcttcgcttggcgacgtaagagtatggccgttgaagacgtgaagacgattgatttcgtcctgaaaagtgacgagcgtgtctagtcgtctgcatgtctttgtttcctgatgatagagccaatctaggatgctctggaggagttcgtcaatgctggagttttccttagccccgtggtggtttcgataatgagaggcactagtggagctacttgcgtgtcgggtatcctagctagaaacggtctctcctccttttcttttaatgtcgacgtcctttacatgagttacaagtagtacttaccgctggtgatggtgttcatgcagttgtcgtaggcaactgatgttaagacaaatctttatagcgacttcacatgcgccaattctcgaacctatcttattatattaagtatagttttcaaagttagtaattcatctgatcgtaacacgtatcaaatttatagatctcaaattttgatacatgtaaacaaatttctttttatttatttagaaaaaaacatttataagaaaattatattatttttataagaatattatagtatatatcttatttaaacaatttttagaaagtaaagaagataattataagataactatatgtattttattaaacagaaaatagaaattaaaaaatcattcactgattctaatttacagctacaaattctattaaaaaatatataaaaatgattactttttccttaactttttaaaaaaaaaaaacaatttaagaaatttgacaatcttattatgtaaaatacaataaattaaggaaattttataatcaattttaactatagaagaaataggcttgcaaatactcacctctatataaataactagatagtcttctattttctcttcaaacaaatacaaacaatttcatttggcatgtattcatttaaaaataaatcatttgacatggaaattatctaataaaaatgacaagttatttaagattaagttaattggacaaattatagttatcattgtaatataaaaactttttttgctaaatagaaccaaaatgtttttgaataaatattgactgcatgattcggctattgctagtatcgatgaattatgaatctttccatttgtcgtttcaggatttcaataactgaactttaaatagaaccgtctaattttataaagtcaactacttataagtctagttacattaataaataacaatggcataacatgacattaagttacttgaaagtaaaatgttcgagatcaaatgtcttggcactggaaaagcccacggagttgaagtggttgtttgagcgacataactcacaagtcatgtcttaccatagattcaactcaagaagcaaaatgcataatctgtacaatagatagatatgtaagaatcttataatatcttcacccacaatgtaatgatttttgaattttgatataaactgtatgttgtatttttatttaacataagttaatttcgggatcggcc

SEQ ID NO: 10153 - DNA, 1172 bp, Arabidopsis thaliana landsberg
tgctacagaacttggtcccgatacgtctattgtccgcaaagaataataatactatgcacaactacgacataaaatttcgggggtttaatcaaatcgccatcaaaccaatctaaacccggaaactggtataagagatcaatttcctggttcagctaaaaaaactttggcttctttagtttgggctcacctagatgcaacgatatgttaacctcttcttcggaactgttctttaaagccatgagattatccaatttgggtatctcttgccctttaatggcggaagtagactcgttaaccgatataggagcaatgaagatatgttcctcaacttcaagtgttggtttgattgcttcttctatatggaactcaggcggaataaatggctcaaagctctcatcttgtttgtctcctgatggaaccgggtcaggcggggatgactggctaacggttgaatcaagggctgtaaccgaagtgtttctttcttctcgtgctgctgctgctgctgcaagtgtacaaaagtcaaaagaacaagtcatgagaacttgggaaccattgtcatacaagtgctaggaaaagagttctaaaaccttcaagttcatggttggatgtgatgagatcaagctccaagagatccaaaaggcgaccaagatcaactccgcttgtccagttctcgggttcttgaccggctattagtttaagtcttcctcggttggctgttcctccccaaatgatcccaactggtcgtggcttctgaccatttggacccgttaagagtattaggcttccactgtcaccttcaaggtcaaaagtttgctggttttcaccaatgaccagaaaatccgtgaggaaacagatccctttctcgtcgttgtattccaatgcataagccattatggttccggtggtatatccagagcttcttccaactttgacaacttgtttcccaataaggctatcaattggggattgcaagtctataacgtgcacatctcctatctcaccaatgccctttatcaacgtagttacattgctcgtgttgaaatcttctgcaaaaggaataaaggcaccatccgctctcacaaacgtttctgcattgggatagatatgaaagatgccctgtatagtcagtactcagtatgaaacaagagtgtccaaatatgccagttcctgaa

SEQ ID NO: 10154 - DNA, 962 bp, Arabidopsis thaliana landsberg
caatgagtgttttcccaattcctcccattccccagattccttccaggagaacctcattgtattcgtgatccaaaaaatgattaagaccttccatgtgagctttcatcccaacaatatttccagagtctattttatgcatcaatgtcacacgtcttgaaatatctctagcaatttctccaaccattatagcgtcatcaacactaataatattgaaattgagcaggaaaattataattcaactttccagtgtgctgctaaacaaagtgataaatgtgtgtaaacaagaaaacgaggcttaccagtggcttgaaaccacgcctgaaagattggcgattaggttaagagcttctctccacctgagaaccttatccaccatttcaagaccttggtactttactaaagagaaacttcctagctgatgcctcaccacggaaggatctactccatagaagatgggaaagacttcaagtcttccctccttcataagctccattatcagttgaagttccaataagcaccatctcgaagtagcgtagttctcggagagaacaacaacagcgaaactcgaactccctagtgctctgtggagttcatcggaaatgtgatcgcctatctcaagcctttggtcatctttgaaagtaacaatgcctctgctatcaagtgctgcatataaatgactgacgatggttttgcgggtgtcttctccacggaagctgaggaagacgtcgtacttcgatacacgaggtgcagaggaggacaccattgttgaaaaatcaatcaaggtcgtctaaaaggtttgttctctggagttttatgcattaaggacgacttgttgaacaacatcatcttcttttcttttcggggaaattgcacaagtaggaaaatgtggaacttttgtgctcaattaaatctagtggttgacggactttacagctttacagtgacaagtcaacgctaaatgg

SEQ ID NO: 10155 - DNA, 1340 bp, Arabidopsis thaliana landsberg
cttcagttaacggatccgctttcatgaaatttctacctatatgcttaactgaaaccacattttcttgaatcctttctcacacaatatgacactctatgtctatatgctttgattgttctacttttgttgttgtttgcatatacactgccgcaaaattgtcacactaaactttaaatgatctttcgacacataaccaacatgtagtgtttttcacagactgttcaaacctaatgaatataatgttttccctaacctaatggccggtgtattctacaattttgaaagatttgcctgagtgacaataaagaattctcaagcttgtttctatctctaatctcttatactgcaaatgttagaacgaatactttggcacgaaaaattcgtattgaatcgcttcatatatgtaaacaatttttcctaaagttgactcatttgaacattaatataatttgatgaccaaaaaataataaaataataaccattattaacgacaacaataacatagattcgtttcagttatatgtaaaccataatcttcatgattaatccagttatgtgtaaacttaaatacttaaatattagaaatcaaaattacataataaaacagaaaaagaagcacatgtttaaaatttattttagatatggttaaaaaggccaggcccagctttatattattaatagaagagtccacatttagagcggagactaggcctatattcgcggaagcgtcaattcaggttttcaaaacgtcgtcgttgtgtcttcctcctctagattcttctttttcttttcaatttcaccaaaatcccgagttcccgacacaatcgcccttgttcttcccctttaactctgaacacatcaggtttggtttcgtgtttcaactttgagatacttctttagatttcaatcggagagtcttttgttccgccaaagtttcaatttttcaataccccacgacggcaaataggttcgttcttcgttgccttcatggaatttgattgtttttttcttaaatcttgatcctttttttccgtatctataggctctgtttttgccttagcagatttgtttttgggtttggacggagaaagttttgatttttgaacagtgatattacaatgacttgcatttatttgggtctgggtcttttgtttgtggctttggatggtgaaagtttttgatttttagcatttttattacaatgacttgcatatatataggattcggtcttttgttacaatgactagcatttagttatgtcatttggttgtgtctcattgttgattctgctttgtttgaacaaatatctggaaatgtgtgtggttaaagggctttgattt

SEQ ID NO: 10156 - DNA, 1074 bp, Arabidopsis thaliana landsberg
tccatgagtgcccgtcggcattgaatatgcctccaccgagtgatcaccatgaggatcagtaaaaggtttacctgtagggcagttaaagaagtttgttctgagaatgtactcgacgtttaatgggtttgttgtgatgatggtgcgacgattgccgaggagaggaactaagatggtttgagacggagagagacggagaagctcggtgtaccattgaagaagacgatgacggtttttgttgaaagagagtatggagccaatgagtggatacgatggtggtccatatgtggtgttttcttggacttttttagttgaagatgaagataaaaagaagatgatggttataagaaacgctagtatcaaaaaactcagaagaaatgccatattgtttaattgttttttgttcttggttttttttttgtgttggtgtgttggaaagagtttgtgaatgtgctttttatatttgctaattaagtgtttgtgtgtgttcttggtgggtattgcgtgtgtgtatatagaaagggaaaggtggcgggtccggaccaatctgtcccgaaacatatcgcttttagtattaatttgatttcttatatcacattttgatcgacgtaacacggtattatactattatgtgtctacggagatattattttatctccttttttgtctttagtgtagctgtatgtcactgtttcattcctttttttagtctaatatatagttttttttgagaattgtcctaacgaaaatataaatgtttagtcaggctattttgtctcttttaggatgacgatattgtttcgagttcctaatactgtagtatagattttctcttttagtgataagctccatcaggatattgaactgttagtgtaactgtgagtatgtatcatcaaatgattaatattgtaataagcacattgaacaactttcctgaaaaaaccacatttgtgtataaggaatttataaaattaaaaaaaaaacaaaaaaaaagaatttataaaattaataggacatcaaacatttcttttaattaatttattcgtttataacatatggttgggcttacttgaccct

SEQ ID NO: 10157 - DNA, 1297 bp, Arabidopsis thaliana landsberg
tgtttgttaagtatacacgattaacaaacccaacacccactagctgaactaatgtactagatggttcttttaaaagaaaacttcaaattcggacatattaacttaacatgctcgatcgagtcctaaaatcaaaagattatgggtattttgcaaaactttgggcctttggggtaatctaaaaaaccaaacgtcaactaaatccaaaaaaataaaataagtttaagcggacggacttacattataatgggtttatgttttttattattattattatgataattatttttttaataataagaggttttacgccaaaactcgtaacttttttagactcgaaatcacaatagtttcgtcccaaacgtcattcaaaccagcgacctctaagttttgtctaggatttttactagttgagctaacgacgcttgattatgtttttattattgactaaaactcataaactttaggactgaccaagttgttagttttgttgatgacttaaagtaaaatctgttcacagtttgcgagaaacaaaaggggaaaaggaaggtaagaggttattatcgtgtggaagaacaaaacttcaaagattggtttgatctcccaacttgctaatttcttctaattgattatacttggatagcttggattagaagcaaactattgctttgtactctaatcatacgaggaacgttagtttcgaaagatctttattcagatggctaatatattagtacattgactcaaccttttgaagctttatcttcaaaataagtattttcttttcttttttggtttaggtttactttcaagtaattgtgagcctaggacccaagttttacttaaatatctctgtcgaaatgcatgtttttcttaaatctctcccaatggatacttgaactaagggtactaacaaggtcctaggaagcgctaccaaaattaagagctagttggttacaaaatgagttatcttcaagaaaaagaaaaatataagtaataaacatcatacaaatagtctgtcataattgagtcgatcttttatagatgtaggagtaacggacttctacaatgctttcctggacgtgctcatttattttagtactgttcttttagacgtttagatgctacaactagattcaaagaagtcatttcgatagactaattgccttttgacgatggtaggttgttgtctaatggtgcggcatgcatcatgcatgatggctgtagaggtagttttaagtacgcaatatatccggattctcttttagagacctctgagtggttttcttatactcaagtc

SEQ ID NO: 10158 - DNA, 1167 bp, Arabidopsis thaliana landsberg
aaacagtcttccaaagtaaactaataaatgacaccacaagtctccttttcaagtctctttctctctctctttgtttaaatcactgcctttgctctctcaacataaaccaaacacaaaagacagtgttcataactctcaacaaatcatgtactatctcccaacttcttgtatgttcttgtttttcctcttctcctctttccaccctcttctttctgcttcaagtaaacaagaactcgggtggtgtgaagctaagtttcagtgtgggaacatcaccgctggtttccctttctccggtgggaatcgtcctcaaatttgcggtcatccatcgttggagcttcactgctataacaacatggcctctataatcatctcagaccacttttacaatgttctccatatagatcaaacatctaacactcttagacttgctagagcagagctggaaggttctttttgcaacgctacttacacagccacaaccttgccttccaaaatctttgagatttcatcaacctacaagagcctcactgttttctacctctgcgaccctaaggtttcttaccgttcgagttatacatgtcctggtagaggccttgtctcagtgtctcaaaattctgattaccataactcctgccaagacagtttcacgattaacgttccaaagagctttgttccagaagagaaagagttggatgtgaccaatttggaaagtgctttaagagaaggatttgaggtgaaggtaaaggttgatgagaaaacttgtcaaaaatgtacatcctctggtggaacctgcggcttccaaaattcaacacagatttgctgcaaggaagcctcatcattaggatgcaataaagtccatccactacctgatggtaagtttcttcaaaacccgttacatctccacaatctttacaaaaatcttgataatgccactagccaccataatcaagaaactaatacaagatataaacttcacttgtttgattcttcttctatctccaacaaattagcatttaagtcactcactctctttcactaattgatttttttttttccacgttagtcagtttcattagttaatgatttttgccttagtccacactaaattttttttccacaatatctttagattctctccaactgaaaaacaatgaccaaaactaggac

SEQ ID NO: 10159 - DNA, 1101 bp, Arabidopsis thaliana landsberg
cctttatttagatttttgactgcaaaatcattaatcaaaatcacgtactccagcttttcaaccatttttatattaataaatagcaaaattgtgttttttaattttgtaatcaagttcaagcaccttaccttaaaaaattatactataaaagacacatctttttttttctttttcttttttacagtcttaattgttttattttagttctcacaccacgctataatacattttattttatatttttattcatattttggtacatttcccttcattctcttaacttgttaataatgacgatcataattggaagaaaatcttgcctcgagatatttaaccacgttcacatccagctgaaacgcttttgctaaaatctccggcataatcgaaggcttcgatccaaaaacggcgtctgcgattgtgattgtaccgggattttggctaccaagaccagcaaacgcaactgcgttcgtcctcccaacgttcacttgaaaatgtatcattcctatgggaaacacgaaaacgtctcccgggtaaagaacctttgagaacaatctgttgttgtcttggttcgatgttacaaaaccgactaagagtgttccttcgacaaccacgaggatctcagtggctcgtgggtgcgtgtgtggcgggttttgacctcccggggcaaagtcaattcggacaagagacactccgagggtgttgagtccagggattttgtcaacgttaacgtttgtaacgttggagccaacgcggtttattgtgtttccggcgatgtttagtccggaagtaaaaaagtcttcagctttcacgtattttgggtctttgcagaattttccattcacgaaaactgataaatagatgaagatcttattgatgttattgatttaactaattgatgttagagagtaaagatatagtatctcataaatcataattagtacggtattgaggaactatattaaggagtatgtatagtaaattagagagattaccaccactagcgtcatcgacggcaacacaaaagtcctgaagaggacttgggtcgtaacaagatacaaatgaagatgaaaaagccaataagatggctttcgctgcaagaaa

SEQ ID NO: 10160 - DNA, 508 bp, Arabidopsis thaliana landsberg
gttttttggtaataatggaaattaattttgaatattttgttggtcaacgctggagttagtcgaccggttaatctgaaatgctatatttatgatgttgaccacataacgctatatactttctatatgtggtcatgcaatctatatacatcaaaaagctggatattctttaatttacttgacatgtgtagtcatgtgttgcgttatacttcaagtatctaacaatcttttttctttaaatttttttgataaattaaatttattatattactatactagttaacatattaatcaaatagttatctgccacacaaatattataccttatataactcgttattttgttcttcatatgatatgataaatgagttaactcgataaatataaatttagcacataaattataaacttattgatatatactttgttatcatgataacccgatagataatcatctaactcacaaatatgttttactcttgtatttaataaccaatatatccagaatcag

SEQ ID NO: 10161 - DNA, 407 bp, Arabidopsis thaliana landsberg
ggcccggacacgttttaactacaactaacctattttcccaaagcttttcgacgaatccacatgagaagggcgaggtttgtgtactttaaggaaggatgccggtcagccaacatgaatgctaccgtggggagttcgctcaacacactccacacaggattcatcatgtcgtcataactccaataggaggtgatcgtggaaaagatgcgacgaacccgatcgaactcaatcctgttgtgaacgaaccagtactcaacacaccaacaccgaccgtaaggtgagagccggtagtacaatgaaggcaaggacataacaacccgaactccaccagtacggccggatgacccaagagctttgatgcatagcattttggcgcaaatacaagctcacgaccgacataatgcctaacc

SEQ ID NO: 10162 - DNA, 1044 bp, Arabidopsis thaliana landsberg
tattaatcatccttatcaacaacaaacacataaattagccattctagtagggtttatatttattgatcacaagattcaacaagacattaacacagatcacaagcataaattcgcgattctactactattattaacaataatcacaagatctaacacgtcattaacacaagtcacaagcataaattagcgatttagtagggcttatgtgtattgatcacaagatctaacaagatattaacacaagtcacaagcataaattagcgagtgaaaacgaaccgtgacaggtctctctggcaattgaatgcaaatagaacaaaagatttctaacttcttcttttcttcatcatcgacaccatcgtcaccaccaccactcatcagtctctgcctctttttggctttctcagcttcggtcaaagtcacatcagcctgaatcgcacggatcgcagcaacgagaactgaaccggaagattcaggtgcggagattccggtacccggtgcggcggagggaacgacgacgccggagcaatcgggacactcccactctccagtggaagaagcgagtgattcggggaggagacacgacacgtgccatggagtgacgcacgtgccacaagtgagagtctcttctgacggaggtgtcacctggcaccgcatacatacaccgtctccgtcgcaaggaagctgagtttcaatcgccattgttgaaacgagtgagagagagagagagagtggtgttatcgagagatgagaagaggaaggggaaaaatgaagaggcgggttttgaaatttgttggggaagaagaaaaaacgagagcgtatttaaaaagtttcacaatgaattaaataaagaaaaaaatctcacagtctcgataagatcgtgagtcgtgacagaatggcagctaatatattttatttttccttaattgttttgggtcaaatatatgacgaatttattgcaaaatgtaaatgataaagacgtgattagtggtggtttaatggaaaataactgtttctcaaatttaaattaaatttgataattgtaat

SEQ ID NO: 10163 - DNA, 2085 bp, Arabidopsis thaliana landsberg
tgtgctctcagtccgataacatggttggttcactaccaattttctcaccttttacagaaagatggaattgaatttcaacgcttgagatgtcatcatcggagactgaaccacatggctatggagatggagccatcggcaaattaaatgctttcttctttatttttcttaattcagaatttcatctcccaaaacaaggttttataaaccatataatcaaagttgaattcaacacacaaattgctcgtactgtttagaaatcaattaaaattcattaaattacatgtgtagtactaccgtagagctttaaaacaacagcattgtcatataaacaaagcttatgttttatgttgatctcaatgataatttccaaagaaagtggtttattcgcaattgtctcgggaataatttatttgatgctatagtcacctagaagaggccagagaaattggcggcttaatgagaatcatttattgatgctatagtcacctagaagaggccagagggcctgtaaggcccaaaatacattaataatgcggttaatgaaattttatatatatcaaaggcccgatactttattgataggcccatatgttttctaagcccaaattgttcgagaacaattattcaccagatatatgcagataacctaaattcaaacaacaacggcttcaccgtcaggtttaaaatagtacagtagtatccaaaaaaattctgtttatttgaattactcactattaatattcttccaattccaatttccacacgtataaattaaacaagttgtttgacaaaataaaataaagtgtataacaaataaacaagaacttaggtgatccgtcactacccacctgtcaatttctcttttatcaacaatcctcaagtctaaaaccctaattctaattttcctaattttctagttaatcccctccaaaagattcgtcctttcaaaagaccaaaacgaaaacatagcataacacgagaatgaggaggcccacaaatttaaaagaccgttagaaaagagcaacgaactttttttagctcaccaaatcaaacccaatttcacattgagagccaaacacgaaacttatgcgtcttaaatccttcttccctcatttcacattcttcacctactaaattaactaacaacttcattatttcttatctctctttctctttctctctgcaaaaaaattatacacactctgtttctttgttccttctttggcactatgaagcttagtttttcttcttataatctcacggctactgccgtgtcctcttcttgtttcggaagcgacgaacttctggtttcaaggaggctgttttccctgagagatgttcagattcttgagctctttattgcctttttcgtgtttgcgacaatacattccttgcgccagaagaaacaccaagggatgcccgtttggccgttggttggcatgcttccttcgttgatatccgcggtacgaagcaacatatacgaatggctgtctgatgttcttatcagccaaaacgggacattccggtttagaggtccttggtttagcaccctcaactgcgttgttacctgcgacccaagaaacgttgagcatcttctcaagacccgtttctctatctacccaaagggttcttacttccgtgagaccatgcaagatctactcggagacgggattttcaacaccgatgacggaacgtggcaacgacaaaggaaagcagcaagtgtcgaattccattcggctaaattcagacaattaaccagtcaatcattgcacgaactcgtgcataatcgacttttgccggttctagaaacttccggaaagattgatcttcaggacattttgttaagactaacgttcgacaatgtatgcatgattgctttcggggtcgatccaggctgtcttagtccaaaactacccgaaattccttttgcaaaagccttcgaggacgcaacagaagcaacagttgtgagatttgtgatgcctaaattcgtgtggaagctcatgaggtctcttaatttaagaacggagaagaagctaaaggaatcaataaatggtgtggatgatttcgctgaagaagtaatcccga

SEQ ID NO: 10164 - DNA, 975 bp, Arabidopsis thaliana landsberg
gttaatagattatcatgatttgtatcacgatatcatttcaatgcaattttgtccggttaggagtatcttctttagttagtaggttaaagtcagagataactcagtaaacaaaaacataccacatactgccattatatgaaacattacttcatgattgttggatggggaccgataattttacatttagggaacagatgtcatacgcatgtacaatgaaaattttctgaacccttcccccgcattatttatttcacatcgccatgccagattctgttaatcctggcaacatccatcccacaactttcagcgcaaaaaaacatgatcctccccttctcttatgtctcctgcagtacaattccaccctttaaatatcaagtaacatatatgtaatcgcgatattataattcttaccgttattggtccattgcaggttaccctgttatggcccaacgacttgcagcgcgaacatcttttccttgaagtcttctacaaaagtaacagaagttattattgtatagttattatatatcagatatcctgattagcgtttaataatttaatgctttcacatcgcttccttggtcttcccggaggccttgaaacatacggtggagccagttccccccccccccccccacatcgtttggtgacggagtaagagtctccgtgtcaggcaccggcattattagggcttggtaagacaactgtagctgtggcgtggtgtgatgaaccccaaccagtgtgtccactcggagtccttcttgtatggccgccgctattgcgtgagagcaaggaatcgttagaagctgaaactctctgcatgtacatgttctctccaataggttaactgcaaaccctccgcctcttttgtctctaacctcatagagaccatccccaatctttatcacaacaaaacccgcccccttctcgaaattctcgataaccatgtcgtgtactttaggcggcaagatattg

SEQ ID NO: 10165 - DNA, 1281 bp, Arabidopsis thaliana landsberg
gtatcacaccgtgccgttcaaaattctactagcttcagttgtttactttggttaactcctagtcttttgtacataatcgtatgattgtaatctttgttgaattaatgagaatgaaatttctttattattattatttttatatattttttaagagatttatttagtaatacctacgggaaaacttggcaacctcttagtttcacttatcaaacacataagtgtggcgattttaatttaatagatgataccttgtagttattttaccaaacggaattaaatcgtatagagaagcaaagatggagaaaatcgtcgaattagaagagattttattctttagaagtggtaatgatacaagtcccggaaaaaacaacaatgcaaattcaaaaaaacaaagaaagttcatcatgtaaccgttttatcgaacggttttatctgtacaaaattaatacaaataaggctccaaacatttcaacgaacaagtaacacttttaagtgtccattgaccgtagctgcctatatggcaataatagctgtaacctggacaatgattaccacatctaacgcaaagcggtcgagtgctgttactattgcgaagaacttccactttactagtgaagccatattcaaatgttaaaccaggcttcatataaacagaatttccgaatatgcaatgaaggtggatagtgatacaacatatgttgcatgtgtagaaccagtccgctggattaacctctttctcacatatttcacaccaatacatatcatctgcttgttctccatagcaaagagagagaggatgcttgtcgtatttgtagcatacttcagttggaacggtagtgcattgataacacatagcaaatttgcacgttgtacactgtaggtaaggctgctggcaaatctccttgcaaccctcgcaacaaatcttgttttcacctttggaggatgtgcagatgaatagaggatgttcatgactttcatgggtgaaataatcaagaactaaaatacatcgaacatctatctgaagaacttgatcttttaataatctacaatcagtttcggaacatctgtacatgaaaccagtggactttctggaacaaactgaacaattgatgagatcatagtggttttgaggagaggtatctaagataagagtgtgtttgtgtaacgcatggttcagctttcgaagaagacaagcacatacctcatggaggaaaaaatcacattccatgcaattgtagaaatcatgagagttgatcggaaggatgcatgcttgacattgct

SEQ ID NO: 10166 - DNA, 1319 bp, Arabidopsis thaliana landsberg
cttcctcgtaacaattcccatcatcgttaatttcaacgcgttaaagtaatagttcacaaaacgtcttcaagggtacacatgattagtgtctttatgatttttttctcccccaagaaaattgtcaaaatctcttactattggagaagacgaattcggacatagaaagtgttacagagtcactagatatgcgttgaaagaaagaaagaaaaactgatcaatttatggaatcaggtgcgagatttgtggatgggaaattatttcactcttacacaactcttctttatatatatgtgacatttcgctttctcattcaattttgtaatttttctcttcttttttttctttctgatttgaatgtttttttgccttgtgcttaagatgtccaaaaggaagaagagaataaagttttttgttttcttgggaaaaaaatgaatattaatatcaaatacattaggatttgaattaaaattattcgaataactgtaatgaaacttactctttttttttatcggagaacggacatggttcgacgtgggagaactcaagagtcaaactttacattgcttttcgggttcttctccatttgtcactttgcttcaaaacattcattggttcacttgccctttttctcttggagtttcaactgttatttaataaaatcatctcttttggttttttgtcagaaaagaaacaatatcatctttctaaagtcataatctaagattttcttaaattgttttctttggtcacatatgagattttctttcatgaatatcatctttaaacctaatttcttttctaaagttgcagattgtacatttgggtgaacaagccaaaaataggataatatcggataccaagctggtaaaagtatatagattttagaattaaaaaataatgtttgtgaaatgcaaataagagatatgatgatggtaatttgttattaaaataggataatttattaaacgagtaaaattcggatttgagtagttttaaagaatttattatttattatttaaatgggtagttcgaacatctcaaactacaatttatcacatttggaagcagtggaataatgttcttcacaatctcacagtctcgtctcaccataccacttttgagctgatggataaagatatcataactgtaatcagtcctcgaagacaaatgaagcattttagaaatttaatgcaactttggattaggtgatttcactttcgtgtcttcgtaaatatttgtagcattgtatttttattgttttttgacttaaaaagttataggtgttacattttgtaatccctaacttttcagttttatga

SEQ ID NO: 10167 - DNA, 1376 bp, Arabidopsis thaliana landsberg
  unsure (1)..(1376): unsure at all n locations
cacttctacagtctactacattttttgctttacatatagagattgtaaatctccatcatcataaaaaaaaactcctataaacctgtcctcttcgttttttaggcttgcctatttttccagcaatctctcaaattctaaagcacagtgttcagtacatgttgttgtttccctgaacctgcaataatacaaagtcaagaaatataagtgctaatctcaaaattcatattttcttgtgaaacaagtaatctttccggactcacatcaacatgtctaccgtagttggtattagtcataacggtacttgtagatccgattcgctctccataagcgaaatattagatctatcgagctttatcgccatccacggatagtactgatgatgatgatgatgttgttgactttccttggctgtgtttgaccctagttgagatgaagatctctgcatccttacagctctcgggacaccgttattcctcggtgcttccatcgaagatcttctcctccnnnnnnnnnnnnnnnnnnnnnnnncaggaggtctctgcttcggcgcactttgagaccgagccttggctttagaagactgagtattagccatgtaattagggaagagagggtaatcataagaagacaaagtatctccattgtaatactctttgaatctgctgaaacattgaggactactttgagctgtgttgaatgagttacaatcctcgaaatggctactatacgcgcgaggactcatctcggttaaagccgaaggagccggagagtacattttcgattgaatgtccatttccacaatcttgatgttttcttcattctcctgccaaaaaacagaggattttaaaagttaggtcaaattgaggagtcattgtcaagtttggattttgagatatgggttttgtagatccattacgtggtaaaagttattgatcctggttttgtgaatcgatgttcttggatttgttgaatctcctccgatcatacgaatcctctgttctcgagctttggcttgaagtgttattaatgcttgcatacatctaagtgtagctgttgcttgtttccttactaaatgacctctcactagtgcttgtaatttcactaacccttttaatgctcttaatgctttcctcgcctaccacaaaatttacaaaattttgatttcttttattagactaattgaaacaaaaaaattgaaaaaatagaaaaaaaatggattcgttacttggaatttttgtaaacatttaccaaatgagaacgatagcacgcttgaatctttattgctgcaaattcttcaatctcttcagctgaaacgttcttgatttgttcatcttcattgtccacgatttcgaccacaaatggttgttgtatcggtg

SEQ ID NO: 10168 - DNA, 1891 bp, Arabidopsis thaliana landsberg
ggttcaagatctccatcatctgtaaaatcagggttgaaagttttgcattaagccaacaaatcatcaaccacctttaatgtctctgttttggttcggcataaagctattgttattgtttggttcagtttttatgccaacccctacttttcaaaggttaaaagtggagaaaatgactaacctgagccttctctagctgtcggaaaatgacgatttcgtctattcggttcaacaactctggacggaaatagttcttgagttcttcgactaccaaagctttcattccggtataagatgctgcctcttcatcatcatcgaggataaaccctattgaaccatgtcttccctttgcaatggccaatgatccgacattagaggtcattatgatcaatgcgttcttaaaagatactctccttccctgtaaacaaagattgaagaagcaagcaaacatatcaattatatgcacagacgagtttcaactctataggtctcttgaagaagcagtaaatgtttttaagtgaatacaggacatcgaacctgtgaatcagttagatggccatcttcgaacagctggagaagaatattgaagatatccggatgtgctttctctatttcatcgaacaaaaccactgtaaaaggacgtctcctgatagcttctgtaagcattccaccttcttcaaagccaacataaccaggaggagagcctatcagcttgctcacagtatgacgctccatgtattcactcatgtccaatctcagcatggattcttcctgcaataaccaatgaaaaacgggggatgaaggaatcggttcaatgaccacaatcatttatcagcactatattgttaatgaagctgtaccgagccaaaataatttgctgccagagcttttgtaagctccgtttttccaacccctgttggtccacagaaaagcatagcagcaattggacggtcgggatcttttaagccaacccgggacctcttcacagctctagatatggcagctaccgcctcatcttgaccaacaactctgcctctaagctgatcttctagactcataagaagcattctttcatctgcagtgatctgctgaactggaattccagaccaaaccgatgcaacggctgcaatatcatcaggtcccaccagtataggcctgaaagcacaatcaaattaaaattatggaggttccttcatgttgttcttagaacttttttgaaagtttccccttaaagacctaaatatgtaaaagaaggaagtcatactcatcgtcgcctgctgcaggtggcaaagaagactcttcaactagttcaccagactcatctgaaatggcatcaccgtcatcctgcttttgcctgcttgagagaacctatgtacagaacaattattgaaactgttaataggtaaaaatgatcaacatgcaagaacactgcaggactaatgtctagtttctttaccacttcgtgcatggcctgaactgttttgatctcttgccagtaatcattaggtggcttcgataggatacagattgcatcctcctttttcttcctaaaagcttcaatacgagctctgcttcctgcctcgtcaatgagatcaatagctttatctggaagaaatctatcagcgatatatcgtgatgaaaggtacactgcagcatctatggcttccatagtatatttgcaattgtgatgggcttcatatttttcacgaaggcccaacaaaatcttcaccgcatcttcctaaaatgtcgttgagatgaatatactagataagaaaacaggtgtcggttggttaataagatagaaaacactggtttgaaaagaaacctcgcttggctcgttaaacaacacaggctaaaatatcctcgcaagggctttgtccttctcaaactgtct

SEQ ID NO: 10169 - DNA, 1199 bp, Arabidopsis thaliana landsberg
gtacacgggtggttctacgaatgttgttgtttagagctcgggtttttgtaagcctgttgcgatgggggagattgataaggggcagaaagagattttggcgttgcagacggagaaggagtttgtgaagagttcttatgagataggtttgtctaagtattgggagtttgaaaaaggtattaaggagaaacaagagaggatctgtggtttgcaggatgagtttggtgagagtgttgcgattgaagacgaggaagctcggagattgatgaccgagactgcgataaagtcttgtcaggagaagctagtggagttgcaggagaagcaagagaagtcttatgaagaagctagagaagagcatgtgaagattaaagagtctaaagagaagctaagatctatggcaagccagtttctaggtgatgaaagtgtctttgcgaaagacgatggtgatgaagttagaagaacagcagagttggatcatgagatcaaagagatgtctaggaagaagaaagagttggaatctgttaaggagaagattagagaacattttgagtctggtgcgaattcatcgctcaatgggacagatatggctgagaaagtcgatgagcttgtgaacaaagtgattagcttggagagtgcggtttcctcgcagactgctttgatacagagactaagaaacgagaccaacggtcttcagacgcagatcagtactcttgaaacagataaggcgttgttagcagacgacaagagtgatctgaggaacaagctgaaggaaatggaagagaaactcaaggcattgcaggatttggacagaaatgttttggacaagagtagcaatctgcagacacattttgatgacgcttgtcataatcttgataacctctctggtgggaacctgcatgaggtgaagccagagagcgagtctgataacttggcgattagtatagaaccgcagaaagatctggaaggtgagaagaggactttatatatcagtgaagagataaaggaacatcaaaaggaaacgggtgaggagaataaagaagcacctgtgaagaatgtaaaattcttgcagaccctctatggcgacattagcgaagattttaccatcccaagttcaaattcagacactgtgttggaatctactgaaaaagaagattctgatttaaagaaaccaggatgcatttgattagacagattctgtcttg

SEQ ID NO: 10170 - DNA, 1032 bp, Arabidopsis thaliana landsberg
  unsure (1)..(1032): unsure at all n locations
tttttacttgatagccatcagttgaggcgtagggacaacaaaggccatttctgagcatgaggggggaaatttgaagttacctggtatgatataagagcataaaagatgataataatatatatcatcatcttagtatatagtatctacaccatgctttctgttctagtagagaaatgaacgcacaaaccttatcatcaaaaggttcacggatgtatggaaggtctctttcaagatactcaaacatcaaacgaccttgagagcctaaaggttcgccatcatcactggaagagtcttcctgatgttgatccctcaatgagatacagtctactctagcagaaacccgctcggaatcactatcgctgctaacatcgctacttgaatcccggaaatcactgtcgctactatcaccaggacgcctgccataggaaccgtacatgacataatgaaaaacagcttgttatactataatgctgctatgatgagttcacaaagaattaagaacctagatttaagagatgaatccaaggcatgagaatgagcatagatttgaatggctgacaaagaagggacatagtattggataacacgatccttgttgttattcaaaacaagaggcacaccggtgccgtaagcactccactctgcaaatgagtcccatatatcaccaagcacaaaataaggcacaagtttattataatcatcatctgctcttctttctcgtagcgatgtctacacagagattatcaccatcaccatcagagaacaacacagacttagattaaaaaaaaaaaccccatagaaatagagattgtaataaaccttggataaaaactgagccggtacggatggtgtgaccgactctaaaaaccgatctagattactggaagataaatcggacggctcgagttgttgtttatgcggagaaggagctgatgatggaacgttagagacgtcgctctgagctctacggagctgatcgatgcgctgattggccctgcgagtttttgcngaagtgtagaaaggatcgtcgcc

SEQ ID NO: 10171 - DNA, 1995 bp, Arabidopsis thaliana landsberg
  unsure (1)..(1995): unsure at all n locations
agaattgtgttgatcaaaagagaaaaccaaaacaagaaaagagcgaaccacctgctttttttaatattgcctgcagaccctgcttcttcttcttcgtcgaaaccggtggacatgaccttttcgacagtgggcatgaccttttcgacagtatgcaataaatgcacaacgagatgttgtcatttttcgacgcagaatcatcttaacaagacctttccttgcccaaactgtggtcaggattcggccatgaccaatatatcatcgacagaggtgatcaatgggaggacattcatcagagtctctatttctccgcaacaagaagaaccatcgagggccaattctcaagcaactagcagcgtcatgatgatgcaaactctactgagagttttttcaagaaaccaatgccgacaacaggagatgcaaactctactcatgaagctcagaggcttttcaagaacccaatgacgacgacaacaacagatgcaaactctactcatgaagctcataggcttttcaagaacccttagatgaatgtaattaatcatataatgtgaaacaattaagctcggttttattggtaaaaatggtttcaaattatcagtttggcttgttcggatcacagataaattacctacacaatccataatcattgccaaaaacgctattaagtagtaccccattctctacactaatcttttttcaacatttcctcagaagcttccttatgttcttccaacaaccaattcttcatgcatgaactggcctagcaccagaagaaagctgcacatccgcggcatattcacgtgcccacaagtcatagtgaacaatctcttcaagagacggtgatgttaccaactcgtttcgatgtttatcgcatgttaattccacaaccttgaagatatccaaatagcttatcctgtaaacaaaagtgagaatataaacaattgtgattcgtatcaagaacttcattgagatgctcaaaagtgaaaacaaattcttacttttcatcaataaacatttcaacagctttctcattggcggcgctgagaactccagtcattgtgcctccagctcgtccagcagcataagcaagatccatggatgggtatttcacattgtctggtttcttgaaaagtcaatgaaccgagtctgccaaaatccacaattgtaaacaacttttggttttaggagctgaatgctgaaagataaggcagtggtcctaacccagtttaactgatccaaaccaaaacagtagcaaaataaccaattgcaaaaccaaaccgaagaccgattcggtttcattttttatcttatctaaacaacctaaaaccaaactgaaaacaagattggggaacttttcttggtgataattaaaattttcaactaagcttagcttcacacttgataaacagagagtttataaatgtggttagcttacttgcaaaggtcaagtctaggccaagttacttcagaacaaggaactctatcgggccatgacatggtgtagagaatcggtaaacgcatatcaggccaacccaattgagcaagcacagatgaatcctgtagaacaaaacagttatatgttaatacaattttttttttaaaccggaaaaataataattcagttagttatttttcagcaagacctgtgtttcaatcatggaatgtatgatactttgaggatgaatgacaatctctatatcgtcatactcagctccaaacaaataatgcnnnnnnnnnnnnnnnnnnnnnnnnnnnnnnaaatcaagaactcatctaccttgatcaaaggtactttcaaaatcagagttaagaaaataatcttaaccttgttgaaaagcgtagcagagtccacagtgattttctttcccatgttccagtttggatgcttcaacgcatccgctactttaacttcctttagcttttcgacaagccaatacctttttcaaaatccagtgaacagtttccattaaccaaatgagaattgagaaaaaaaag

SEQ ID NO: 10172 - DNA, 1648 bp, Arabidopsis thaliana landsberg
tgttttgaatttttctacgagctagaacatgattacgccgatttttacaaaagttgtgtacaaaagagagcgtggcatatcggtccgctatcggtttacaacaggggatttgaggagaaggctgagagaggaaagaaatcgaacattgatgaggctgaatgcctcaaatggcttgactccaagaaaccaaattcagtcatttatgtttcctttgggagcgtggctttcttaaagaatgaacagttattcgagatcgctgcagggttagaagcttccggtacaagtttcatttgggttgttaggaaaaccaaaggtattgaaattgacgtttgaagcctatattatataactgtaatttgggtagctttgattttaatctgacacaagatttggtgtgaacagatgatagagaagaatggttaccagaagggttcgaagagagggtgaaagggaaaggtatgataataagaggatgggcaccacaggtgctgatacttgaccaccaagcaaccggtgggttcgtgacccattgcggctggaactcgcttcttgaaggagtggctgcagggctaccaatggtgacatggcctgtaggagcggagcaattctacaatgagaaattggttacgcaagtgctcagaacaggagtgagcgtgggagcgagcaagcatatgaaaagtatgatgggagatttcattagcagagagaaagtggataaagcggtgagggaggttttggctggggaagcagcagaggagagtcggagacgggcaaataagctagcggcgatggctaaagctgccgtggaagaaggagggtcttccttcaacgatctaaacagcttcatggaagagtttagttcataatcttcatatatatagattctatttagaaatcccatagcagaagtaagatgaaagctaatgtaaaatataagagatatgagttaaattcaaatggcagcaacctctaccatagacatcactctaagtctctattatcttcagcataatcctctgttttgttaggagaaaatcaatggttcaagattcactattttcaaatgctaacaatgaatttgttgaacaataatggtggaccactaacccacacaaggcgagttgcaatttgtattcttctaactggtggaccactaacccacacattattgtctcactttcctctaatatacagacccaattcattagagaaataaataattccgtaaatggcaaaacaaaagtataactgttttaaaatatagtttacttggtattttttcgtacatgtacaacaataaagtactagatgtttacatagacgattagtaaaacactttattgtcatgattaagacatttaccaaaataataagttaaacaacaagcgacgtatgcaaagacgtaccggaaacaagtgacgaatgttcaaaatcgttattacccaaaatagtctccccagaattcaagtttccgtgtggattttatgtgctatatatagatatgtatataagtataagctcttaccacatcattcaacacgacaagaaaacatcacttttctaggagcttcaaaatctctgatttctttttattatttttcaaattttcttttcgatcaaagtcaaacatgagtagtgatcctcatcg

SEQ ID NO: 10173 - DNA, 1146 bp, Arabidopsis thaliana landsberg
ttgcaatctatatgatctttgcttctacttttttggttagcttgtaattcgaattatgaactttgtctgactcaaataagttatatttgttgcataaagcttcttctttgatgactaatagtttgtctgattcttgctgaaaaggactttgcatgtccaagagaaagaaagcataatctattttttgtaacgttctgtttgtatgtcttatggattggaatcttacctttgattattatgtggatgcagtcacattatgttgtcttgttatgttcatttaaagaacaactccaacaccacgtttgtgtccatgcaatggaagccattacggcttgttgggagattgaacaatcactgcaatccctaacgggtaacgtcccaaatcattttttttttttgttattgtcttcttgctttatgtgtgtcttggttttatcggtttttctttgttctggtttgtaggagtttctccaagtgaaagtaatggtaagacaatgtcggatgatgaagatgataatcaagtagagagcgaggtgaacatgtttgatggaagtttggacggttcagattgcttgatggggtttggtcctcttgttccaaccgagagagagagatctttgatggaacgtgtgaagaaagaactgaagcatgagcttaaacaggtaattgcttgatcaagctgcaatggtacatcaaactatacaaaacacattgttaaatcatgttgctcggtttcttttttcccctgtagggtttcaaagagaagattgtggacataagagaagagataatgaggaagagaagggcgggaaagttgccaggagatacgacttctgtactcaaagaatggtggcgaactcactcgaaatggccatacccaactgtaaacaccttggccgagaagttttgttaccacattgtcaaaagcaaggttttaattcgtgatttggttttggaattgcaggaggaagataaggcaaaactggttcaagaaaccggtttgcagttgaaacagatcaacaattggttcatcaaccagaggaaaagaaactggaacagcaactcttccacgtcatctactctcaccaagaacaaacgtaaacggtaaaacaagatccgttctctttttcaaattgcgcaatttca

SEQ ID NO: 10174 - DNA, 1432 bp, Arabidopsis thaliana landsberg
atgacgtcagctcctcctcacgcgtccgtgactacgacccttttgcctttatctccaaacgcaaacgccgcgtccacggcggttatgacaacgaagaagatgcggtggaggcagcggtcaagaaagtttttgagttgttaggagagaatgataagaagacggtggcgacagaatcggccagagagtcgccgctgataatgtccccggcagtgagacagctcagggtgacggattcgccgttcccgttagacgacggtggagatcacgatcatgtggtggacaaagccgcagaggagtttataaagaagttttataagaaccttaagctgcaaaagaagatgactaacgcattagagtcgccgtaccacgatggatgggttagatgatccaagcgtttagagaccatcgcaaatttaatcactagcgttggatcaacagaacaaataaggggacaattgagaatacatgtataaataatggggttacaacttttcttagatatatgttccatttgagtgttgaatacttaaatttggcttgtgtttatttcgtcggtagttttgatgtaaacatggctatgtatatattttcctatcttaatgagaagaatactatatacactaggtgaatttattgatgatgaatttatcaaatcaaaaagtagagaaatgaataagataaaatatcgctctcattctctcaagttgttcatcgaccaaccataacgtttcgtgcaatttaattccgatcatatatatggagaattgcaggcacagataattattacgacattattcaacaatacgtcttcctcaagtatttaaacacgcacaacgtctttactcgtacatccaaagacgtagtcattttttatatatactgtagtagtctaaaattattttggtgatcattcgagtattttgttagtccaatgtttatttgacatactagtcaagtcatgctctcgtagttaacacaaacaccaaaagtttctgggcttcaccttcacaacactcggctttaccttctcaaccacagtctttaccgccaatcgctcatttccaggctgctcttctatttctataattcttcgtgtgagcttctccactgaatcaccaacgaccacttcagtgcaagttgattcttggggttgttccactgctttggatggtatacatataagtatacaacatgcaacaacaacaacaagcattataaaatagagaaaagtatcttaaagcatagatcatgaaaaagatgatagaaaaatattcttacaatgttgaggttgtgttttaggacaattctcgagaacccacaaatatctcaagacaatggagacacagagaacaactacgatgatccatatacgtgatataatccattcccaaaccaaatactggatcaaatcccaaacccgaaccgaatttgg

SEQ ID NO: 10175 - DNA, 529 bp, Arabidopsis thaliana landsberg
acaatcctccgagactgtcctcacctctttctgcggctgcttcgctcgtagttcttttggaataactgctccttttagagatcttcggtgtggctgagtggaattctttgtggtgccacaatgaagtttagcattagagcgttaaaactcagtggtagagcttcactgtttgcttatgctcactgaatgttttggatacttttacttctaagacgactaaaagatggtgaataagatgcaatcataatacatgcaaatgttggatgcgatatgatcaattgcaagcttgaagcttcaatatctaatcttattgagttttattatgcttttgcttttacaaagttaccattttcgtgtttcatcttagtattgaaaagtgttgtttctttactccttgttgttaggttgtacatattgctgtaatctgtaacttactcttgcctttccaccttggtttctccaagttttggatgttgcagttggggtgtaatatatactaaatactttggaaaaaaaatataaaattacg

SEQ ID NO: 10176 - DNA, 1077 bp, Arabidopsis thaliana landsberg
aagatccctgcgtccttctctcttctcaccaactcacttaacaaatctataacacacaactaaacttgtcttaatctgaaaaattcaattataactcacagaagaaaaattaataataatgaccatatctagtgccaactccttgacatctagcagaaaaatcaagagtttcttggacagtcatgactccaacatgaacatcgttttggcttatgtatgctgatgttttctgtggcacaaactcttccaatccatgcccattgtatgttactctccctgtcacctgtccattttcattaataatttaagtctctttttttctagaatgtgtaatcaataatcataatgtgtattatttaacctttaagctttggtctagttttccagctaacgctaataaaagagttgttttccctgatgatggtggacctaataaaagtgtcattctgccaccaaaaccatacattataatcaacatcgaaatgatgtaaaaaaaaaaaaacattttaagtttctaagtaataaccttgaaggtttgataatcccggagacgtctctaagaatagtgactttagtggtttttgtaaagttaaaaccaagcaaacgaagacctctctctgcaatgtttaaagcagcgttgggtaatgtgggaagagctctttttcctatgtgacaattcgcctctatcgttactttctcgaatctcacttccactgtcggtagctttatccgcaccctgccataaatgttacaaacatcacataaaaaataaaaataaaaaaattccaaaaacaagaaatttatatcagaatatattctgtcccaagaagaaaaaaaaaagtagtactagaaaactaggataaaaaacctgtcgattcgattcctaaactttttcaagaacttctcgttatcttcctcggtgactttgaagatagaatcgatgaacttctggcgatcatcaacaccgagcttggtaacgtcgacgagatcttcgtgaggatgaatgatagtggtacgaagacgagcaaaggttggaagtttctcgagagcagcccatttaagagcttcctcatcgtg

SEQ ID NO: 10177 - DNA, 1597 bp, Arabidopsis thaliana landsberg
cgcttttaactatcagtttcacgtatctatcgttatctcttgctaaagaagccaacgacgcggcggcgtctgatttatcttccggcgaaccggtcatcagaaccgcgatttgttcccaaattaagcacaagattggttcgttggctgcgattggcgggagacctaagtaaccaaacccttcgtcgtcatcgttaccggctggagttgagacacggaggagccaagagacgtcgccgacggagttttctagttgagaaatcattttacggaatgctgcggcggggattatgttgaaaagtcgcattatgtagccatcgtcacggcatctttggaccatcgtcaatgctttttcaagaacgttttcagtgtcgtcgaggatacggcgcgtgggacgttcgtagaggtcggagcttgcacgggccgcttgacggagaagagcagcgagcttttccgttttggacttgatatcggcacattcttgtttgttgattgtggcttcatctccggctttcaccacttggtctgcaagttgaatcgggcgagacaatatctgcttggctagatcacccatggataacgaaactggttacgatcaagaaaatcaaaaacgggttgatcttaattttaaagaaaatgaagaaacattttgttggggtttggtttggtttggtctttgaaacacggtttctgtcatttctaatgtatttcttacagaacacgccggtcgtcgccggctttcgttgtcggagtaaattacttattagtacatttaccaagtcgtcttagcccttatcgttctttttttaatattaagcatattccatattttaaactttaaagtatgctagctaggaatataggatttcagaagtttatcaagaaaaatgctcaaaagcgattacaaaaatggttcaaatcttcaatattacgtttattgattcccaactgtgttttgggattctcatggtttaaatcccgaattcattagaagataacaaaaatagtataatataaaacttcatgagttttatgtataaattgagccgtcgaaatagaaaattgttggagatgtgattggataacttaagttgggccccaagacatgttggccaagggtagttgggtttttcttgaagtcgtgtgtggctacatcgaatgttagaactaaccatatttatttctgggccatgttttacagctatattttgagattctaaagaaataagaagataactagagaattattcaaagaatctcttatttttttcttgccttaaaggcacattcagcagctcgcatggacacaccccgaattattcagacaattcaataacaaaagacttaatcacttcactagacttcataatttgaatgggtaaagttcatgtcaattatttcttaacactattttgaagtagtacgacagatattacaacacaagtggatctatatttttttatatttaattatttttatacacacatgcaagcaaaataataggacaaattactctatagatatttgtcccaaacaagaaataaagtaaatacctaactaaatgattaaaaatctttttgtttacgaatttagagtgtta

SEQ ID NO: 10178 - DNA, 1843 bp, Arabidopsis thaliana landsberg
  unsure (1)..(1843): unsure at all n locations
tatctcaagatgatctatgatctctgtgtcaggaggagccactaagtagtctgttcttgttattagcaagaacttcttcattaccgataagcaatcatgcttggcaaatgcagcctcagctcttccgggtttcttgtaaaaaacagaaccgagaaatcgaatcaacgacaacaatgagtaccataatagtaacactaacatcataaatcttgaaagtaaatttgggttttacctgaaactgagtgatgtataaaccatctccaaaaattttgaaaaaatctgaaggtttgagttttggatctcttgggaaatatggaacagagagacttatgaaacctttgactcggtctggtctaaacaagcatagacaccaacctatgattgctccccagtcatgcccagccacaaaagcctaccacagtaaaaatgtaaactttcttctccacaaatctatctatctaaatctaaacgctggattctcaagaagatcatttttcacctgagtagtgccgtagtgatcgagtaaaccgatnacatcagcgactaggtgactcacagtgtaagactcgtggctcggtagagaatcggagtcaccgtagcctctgagatctggagcgaccacgtggtaaccatggctagacaagaaatcgatctggtgacgccaagagtaccatgtctcagggaaaccatggagtaacagaaccaaaggcccttcttcgtctcctttctcagcaacgtttaaccaaatcccgttggtcttgatcttcttctctctaacagagctcgtcatgattcttgttggtgatagttgtgagagagagaagaaaaatcagcgaccaaggtgaagactttatcacaagagttgagaaatggatgcacacatgacgtggcggagaatgaaatcaggcctctagttagattacacgtggcggtaactggtcctgattcagtttcatgggttgccgtaagtaaaagaatgtcagccaaattcatgaaacaagaaacacatgactggatataaagaacacaaacgtcaagtaactctcagttcttcagacaacatagcgagttaactctcaagagaacatgccaaacacaacaaagaagagtaattctctaactcaagacaagaaaagagattgtcatttaggattatttctatgtttgatctcaagaagacattgatttcttcttctcttcttccagctgttgaagctcaatcagtctttcagcccatgctcggtccctagcgacagcagccatcttacgttccacttgcttaattctcttcttcctcttcgcctcttgcaccagcgcttgcctcttcttcttctcagactgcgaaaaaaatatatacacgagaactccatcttattagtaaacgaaaaaagaacattgcagattgttttgtaaatggaaacagaacggagaagctaagagagatacagccttttatcatcccataggttacttatgatttctcagctttcaaacttatttctcatttgtacaatctattgattcaacattccaacatttctcatctaacaatgtagagctatgcaaagatcaaaaagctatcaaagttcttaaaacaagctagaaagaaatcagacaaaccagtataaaagcacgacgctgccctatgcgcttcttcgcatttcttctcttcacacttccctcattaggattgtttgaagaaattggctggccaggtgtatattgaacgtatgcataaggccctgcattatcctcaaatcttttaattcatctaaacaatcccaccgtagattatctctggctatatcaacttctcagtaacaacacccaaaattgagattca

SEQ ID NO: 10179 - DNA, 983 bp, Arabidopsis thaliana landsberg
tccttatacaaacatatccactctcaacaccaccgtcttatcgtcccttatgcatatggagctttatacaaccatccagtggaaggtcttctcttggatacaattggaggcgccttatctttcctagtctctggtatgtctccaagaacttccatcttcttcttctctttcgccacgatcaaaaccgtggacgaccattgcggtctctggctacctggaaacttattccatatggtcttcaagaacaactcggcttaccacgatatccatcatcagctctatggaaccaaatacaatttctctcagcctttctttgtcatgtgggatcggattcttggaacttacatgccttactcgcttgagaaaagagaagatggaggattcgaagctcgcccgactaaagaattcaaagacgattaagattttggagtttggatatatgttatgtatctgccctgaggttggagaaatggatgatactttgtgttattggaggtgtagttttaaaatcagaaacagaactggtttttttgcgttttgcgtttcttctcaagagcgaatttagcttggagtttgagatttgtatataaacattattgagttgttgttctactttcggtttttgttttgcatgtaatattactacaacaaacatgttttttttataatctatccatctacgaggccattcttgaaagattttgtgttgattttgttttataatttcttcacattcacattttagtattggatattcttagaagtactgtagtgcaagatgaaatcttacagatttaataatcctccagatgtttgattaccacatggagcaattctttgctactcgttagtagtgtctagactaaataaaacagtacctgcgaagccttttgcttgtcccacaagaaacacaaccacatcagatctcaaagttgttcaacaactacatgtttacatgatctcttcatcaaactcatcgtttc

SEQ ID NO: 10180 - DNA, 1797 bp, Arabidopsis thaliana landsberg
aaaattaatcatcatggtttttgttaaaagaaacaaaattgagcggagaatgaaccaaatacaaaggtgggattgagtacctctttttcgggagcacattctttcggcattacaataagcatcatcgaaagaagctctaacgacggagaagaaaagtttccgtccgccggactttgaattgaggaatctgccaagaggtttaggcgatgcaaatacgtagccgtttggggatagcaagacattcgacatggttgatcaaataagaggagattcttgggattgttctatcttcttagagaaacagagaagaagaagataaagagaggaagaagatgtgtgtgtgtgttatgtgtggtgggcttttccactagcctacgcgtgtaactgccaaacccacaaattgctcacttcaattataccaaaccaaattgaaacaaattcaaatcaaaccggaataaaaaatcggttttcaatccaattattagaaaattttgtatggattagtgcaccttgatttttttctgctttattctgtttctagagatattccgcatgtcgcttttttttcccgcttcgtccactttctattcctttattcaattcattttcccgtaaaaagacattaacgaattatatcagttttgccatagtttaatcataacaaccccaaaataccttgtgtgctagtgcttagccactatccattgtattgtaccttaagcatgtgtggggttcaaatcacactttcccggtatggaataaaagaattgtatacaaagtaccatcataatggagtgaaccagagtggaacttgtttaggtggttacatgatcgatgtgattgttgtctctctgttctctttcgcatgatcaattttatttatgaaatttcatctgatcttaagcaattggcggagcattctcttttggttttcactttctacattactcgtttgaaactcaaaactatattttttcttttaatcatacttttttttaatcaattttctttctctactagttgataaaattatgaaaattattgtctaccatgccagacaaaccctatacaagctttaaagtggattctttttgaaaactatgaactgaaatatccactagtcgcgctatttctgatgggccaattgatgaacatcgattgtcgataaacaatttaagacaacgactaaaatttgattagatcattgtgctaatattatattcaattttatgtatttctaattacctaatatgttcaattgtatatttctataccgtaaggaaatataatatagtttcattatttgattagcttagatccaaatctctagataattgaagaacaattaaaaacataaattactagatagcacaaatgctacacacctccgccctctaagactggtgaagcaaacgacacaagacaagacaaaaatgaaacacacaaataacacaaacaaacaagtctctgcataaatatgagtaggctcttattgtctcattcatctttctaagagcatcgttcacgtgccaaaccgagtcgtccattggggacgtcgatgaggacacggtggttctgctgctgcatgcttgcgatcacattgacgacagagtttacgttttccggcgctgcagccatggcgaggcacgacgtgcttccggcggtactgtgtaacatcaggttatcagccggcatcgtcatgttcactcccttgaacatgaatgttatcgtcggcaccttgacttgccctgagtagcacgtgtcgaaaccccgagtgacgtcaccacggctgtggtt

SEQ ID NO: 10181 - DNA, 1240 bp, Arabidopsis thaliana landsberg
catggcgtgagttatcgaggattgatcgtatcttgacctctgatagtaaggaaatggcagcagtacctggcgctgttaactttttgtcattcaattcagctacagcgactggatcgaagtccataaaaacttccctgtttcaaataagaagcaaattaggcaatcagagatcagagctactggcttagcatcagaagtttatattgcgaattcaaaattcatattactaaagaacttggtttggttacctgagtatatgtcttctggagagaatgtcggtccatgagagttcggctagagcaccagagaggcataataactcaaaaagcttcctacacaagttaaccaagcggtaagagactcttataactacaaagtgtatctcagatagaaggaaaatagttgaggatgccacatacttgtcgtcatgtacaggaactccccattcttcgtcatggaaagcaacatagcacgggtctttacaacgtagaaaaacgcaacattattagtcaatttacagcagagaaagatatgaagcatgagagaacaacaaagaataatggaaagtgcctcttggcatggaaacatttatgctcattagtatagagaatccagtaaaagcataaacgaagtggatctatcagctaatcaaaacatccttcatctaaatttcatggacactgagaagttaaaatatttataagagaacttcaggacaagctacttcataagttatgcaacatagcaaatgatctacacaatgctcactgaataaaatacatagcaattgaaacattttgttggccattgaattacttaatattcacatacagaagaacataattagatcaaacaaaaaacactagctccttgtctcaattcagtcccattgattcaactagataagaacttcatcatctcacacaatcaggctaaactcaatctcacattcacattttcactcatttcatttatttgaatgcatctaaagtcaaaagctctctcactatgcaatgtgtgataggtgaaagtttgatgcttaccagctttaggtgtgatccaagcacatcttttacgaccatcagcgaagcaatcaccagaaaccttctcttcttctttcccaacactcagcttccttgtagaagagacagacccacttcgcctcacaaccttcttacagctcgaagaagacgccacgaacaaaggcgatgactcacacgaagacgaagcatcagaggaa

SEQ ID NO: 10182 - DNA, 1193 bp, Arabidopsis thaliana landsberg
tctatttgtttttttgctttgtgtaatcatccaaaatgtgatttccggacaagtggcttcataaagggggggggggaaccataattaaaagtatattcaaattaaaatgataagcaactgttacatggctatgactttttgggtcatgctacatgttgaaatagtattttatagataaaaagtgattaagcatacacttaatctagatgtgaaaaaacaacataagcatgaaaaagagaatgggaagagagaatgaagaactaccccggcccactggagatcactagatgaggtttccactaccgcttgcgcttccgccttcacgaccacgaccacctcggcctcggcgaccacgacctctacgaccaccgcttctgcgaccaccaacactactccattgccactctatcatctttggagttggtatgaccggccttttcccagagcttctctgagtagatgtggaccatgtggctgcgttcacatcttgcgaagattctgtaacagtagctgactccatttgctcgcataatgtcgaacctcccacatccattccatctttttccccatgtgtagtagcttctgttgcaactggggcagtctcagtagtttctttgttccccctagccaaaaaaattaaatccaattaataaaaaagttatatatctttgtgctcctaaacaataaaaacaatataaaaatttgcaatcgaaaatcttcatattacttgtctctgtttatgtcatcgtcgacaacatccatattatcagtccttgtgttgttattgtttatgtcatcgttggtagttgagatattatggtagatgatggtattgcatttgttcatggtgactctgtcaagaagtccataatcccattgtttgatcatgaattgtctccagcacctggaattttttttttttcaataaacaaaacaaaattctatatgtgtatgtgtataagttggtgaattgatatagttttgaagagataattacaagtcgagtgacaagttactgcgcaactcttgcaggtgtaatcttgagaatgcttcacatgcccaaggaatatgagcatttgcaacaatcctgaaacagaaaatcataatttgagctatgctaatgtattataagcctaacaaacgtatggaatgtaagacatatataaaaagtctttaatcggatgatgttagcg

SEQ ID NO: 10183 - DNA, 926 bp, Arabidopsis thaliana landsberg
  unsure (1)..(926): unsure at all n locations
ttcagaagatgctgaaaaacataaatggtccaaaagtatttgcattttgccatccgtagtctccgggaaaaggattgtgtgaaattacttgtacgggagagattgtgttttcgccatccgggggctctctacaccctttctacattttcttctacaatatcgagagaaagacttatacaagagtccaaatcaagggatttaaaaagtatgctgattgcgttcacacttttctagactttgtagaggatatgaagttgatttaagtgtgttcaaggctatattaagtttaattttagtttacctagttctttcaagtttcaatttctcggtgtcttctatattataattataatcctattcgttttgttatgacttacttcttaggttaccatattttaattcttgtccgatggtatgaccgatatatttttatctacaaattcgttgatacacaaaacttgatcaagaaatctccaatcttcttgaatgcattcacaataactgaacacaatgcacattcaattcaatgagtaatctctggatatcatatttcgttcatgatcagtctatttaggactaatagggtttaacatctgccatgaacaatttgaaagtctcggaggatcaatatattctctgtgatcgccattgacgtataaattagctaagtgtcgttgtgtatcaaagctctgaagccatcaatgatctatcagaaacatacgagcctatatatcaatgattttgcaaaaatctatctacatgtaaaattccaaattttcagttataaatcttctaggaagtccgctaatactatattttattcacattatattttggaaaatatataaacagctcattcatttaacttatagaggttgtaaaatgatgaagacaagactaggntattcactttcaaagcaccacca

SEQ ID NO: 10184 - DNA, 1185 bp, Arabidopsis thaliana landsberg
aataaggatttattgtttttctcttcacctcaacctcaaaatccatatgataactcttctcttgtagccaccccatataagcgttttccgaaatatttgccaaccagaatctgtacaacgctcggtggattggtcttccttcagaaatggctaagaaaaaaaacgcgggtgatttgtaaccctgtcagtggagattatataaccttacccaaagtgaaagccactggtgttggagaaagctattttggctttgatccgatcaccaaacagttcaaagtgttgtgtatgacgtggtcacgttatggaacacccaatactcaccaggttttgacattggagactggaaaacgtttatggaggacgatccaagatccaatacttccccattatcgtagttttgatagaatatgcataaatggtgctttgtactacggagcttattttgaagaatctcaatcttctaagatagtttgcttcgactttaggtttgagaaattcagctttattaacatagctgatgaaggcatgttccgtgggagttataaatggactttgttcaactacaaaggtaaattaggtgcacatcaatattcaagaaacggcgaacttgtattgtgggttcttgaagatgctgaaaaacataaatggtccaaaagtatatgcatattgccacctatagtccacaacaacaggattgttggagtgacgggtacgggagagattgtgttttcaccttacgcgtgctatctgcccagcccttactatattttcttctacaatatccagacgaagacttgtacaagagtgcatgttaagggatttgaagagtttaagcataattttactctccttcacacttttctagactttgttgaggatacgaagtttatgtaagtgatcgttcaaggctttaattataacttgagactttatactttggatttcagctattaaagatattgttcctattaagattgtttggattttaatcttaattaaaaacaggctaacttaattctacaatattgttgcttactgtatttttttcttgtctttagttaatacaagaactagacatgcatccggattcaaaaaatctaaagtcgtgtagacatagaaataaaaaaaataaacttctaaaatttgctttcaaaaattgctcccacctaccaatgtgaagttcgc

SEQ ID NO: 10185 - DNA, 908 bp, Arabidopsis thaliana landsberg
caccgccaaacaactcctcaccttgatcgatagcattcgaccgacgatcaaggagattcaatacagcggcgtggagcttcctgctcaccgccaagctcaaatcggtatgctcttcgatactttagagaaaggcaagaagctcactgacaaagtccttagctctaagcgatggaatttatatcgacagctaaccctagccagaaaaatggagaagctagagaagaccatctctaatttccttaaaaatgaggtctttacacatatcctcgctgacgttcatcatctccgggccgataccagtgtgcgtttggatcgggttgacatgagcctcgacagggtgattcagcaagtgggttccatgaaaattgggggaggtggcttgatatcagaggccatgaagagagccgaggctatggagattgagaccaacgacgattcggagaaatttggggttggattggaattgggaaaggttaaggttaagaagatgatgttcgaatctcaaggaggggtttttgggatcagtggaatgggcggtgttggtaaaaccactcttgccaaagaacttcaacgggaccatgaagtccaatgtaagtcttactctcatcttcttcttcttctcttctcttgtcccgactctgattctatgttagtgactcgaaacagtagtctcttgtttagtgagtgacatggtgaatttacacttgtttttcttcaggtcactttgagaaccggattttgtttctgactgtatcacaatctccgcttcttgaggagctgagggaacttatatggggtttcttatctggttgtgaagctggaaatcctggtcctgactgtaatttttccgttgatggcgcgcgtaagctcgtgattcttgatgatgtttggaccacacaggccctgga

SEQ ID NO: 10186 - DNA, 415 bp, Arabidopsis thaliana landsberg
ttctatatagtatagtccaattgttttgcatacagcaaaacactaaaatggtctttttcattgtcccacatactattttctttattattacacttatcgagctatatttttaattcatttttcaaatatggctattcttgcaaatcaccctaaattctatcaacttcatgtgaacacataaaaatactttcaaaaattctcgatagagatatttgcaacccttttctttccagtctccattaactctatggtaatattagaatgaccaattggatagtcttcttcttcttttttggagtttctattttaaaatagttttaaaaagtcttgtcgcgtgcttgttgctttacgaagctgatgatgttgccagtgtcactgcgaattgctatgatatttttaagctgggtcctccact

SEQ ID NO: 10187 - DNA, 1087 bp, Arabidopsis thaliana landsberg
gtcaaggcacattcatttgcatcgtgcttaagggaaccacacttggtacagaagtttctcaatctctcaaatctgaatttgatgatagtattctcattcgcctgaaattgaatgtttctttggaaccggagtggatcatctaaatttcaagccaacttaaccctaatgaatcctagttgatttgtgttctcatcaaaatcaacatctacaacatatcctagtctgtttccaactgccctagccattgcattggttaagaaaagaagagggataccttggatttaaacccagaaaagaattatcttcatctcattctctgtgatattcaggtaccatcgattgattgacaacatccagtcattgaatgaccacgtcgcaggaccaagttcattgattcatctgtttggaacttgaattgcacctttccattgccaacgattcgcccaacgcaagaatccgccagtccctaaactctaggcatttgactgattaacgctcgtaggttttttttcggggattcactggtgtgacgattagtgagaagcggttaacagcgaacgcctgtgagacgaattcctgtgacaggaaatttggagcatcgtcgattcccaaattcagatcttggacaaactttcttagaaaatcactcataattgattgttggtttttgtcgagttggtaaaacagtggtgagagaaaaaggaatagatgattgaaagggttaaatagaatgatccatgacggttttggttgacgattacctcccgtaaagaggggagaagaataactaccattgtcatttggcagacaaaaaccggcgttgaagactctagaaggaattctgcgaacatctctggtcggaaaaaaatctccagtggagaacaagcaaatggcgtcgatcgcccaaaaaattgcctttcgagagagacgacatcatcaatttttagacttaaacctcttctattgtcttgttttgcatgtttaagctgttagacttgatatcttttgtgtcttgcaacgtttttttgattcagtcacttatgttttctactattttgtttcaatatttttttgataaagaatataa

SEQ ID NO: 10188 - DNA, 923 bp, Arabidopsis thaliana landsberg
  unsure (1)..(923): unsure at all n locations
ccacacgcttcctctgctccaattcgcccgtctcctcctccgttaccgccgtttcgtctccgtagacgacgaagaaccaaccatttccgtcaccgtcttcaccaccccaaaaaaccaaccattcgtctcaaacttcctctctgacgtcgcatcatctatcaaagtaatctccctccctttccctgaaaacatcgccggaatccctcccggcgtcgagagcaccgacatgctcccttccatgtcactttacgtgcccttcacgcgcgcaaccaaatctctccagcctttcttcgaagcannnnnnnnnnnnnnnnnnnnnnnnnnnnnnnnnnnnnccgatggattcttagggtggacatcggaatccgccgctaaatttgagatcccgagacttgccttctacggcatgaactcctacgcatcggctatgtgctccgccatttcggtacacgagctctttaccaaaccggaaagtgttaaatctgatactgaaccggttactgtaccggattttccatggatatgtgttaagaagtgtgagttcgatccggttttgaccgaaccggatcaatcggatccagcgttcgagctactcattgaccatcttatgtccaccaagaaaagccgtggagttatagtgaacagcttttacgagctcgagtcaacgttcgttgactaccggctccgtgataacgatgaaccaaaaccgtggtgtgttgggcctttgtgtttggtaaatcctccaaaaccggagagtgataaaccggattggattcattggttggaccggaaactagaggaaagatgtccggttatgtatgtggcgtttggaacgcaggctgagatatcgaacgagcagcttaaggaaatagcattagggttggaagattccaaggtacgtttaaaaattggtttatggccac

SEQ ID NO: 10189 - DNA, 898 bp, Arabidopsis thaliana landsberg
agagatcagtcgctccttggggaggcacgcttagttcttgcgccagcgccttgttccgcctgagacagaaccattcatatgttaattagttagatcaagtatcatcatcacatcattagcaaatatatttttgttgtgttcacttactggcataaggctgaagccttatatagctcagcaaagtcaactccaagctttaactcggccgcaagggagctagcttccagcatccaagtggccgggttgtatttttccggaatctttggcactccagggaaggattcaaagtactcaacaaccttgtgagagtttcggcctaagggaccagagtagatcacatgtcctcctctcttcattagtagtagttcgtcaaaggcctcaaagatatcaatgctcggttggtggatggtgcacacaacagttctccctgtgtccactgtgtttctcacagctctcataacaatagcagctgctctagcatccaaccctgaagttggctcgtccatgaagatgattgaagggttagctacaagctcaacagcgattgttaatctctttctctgttccgtggaaagccctgtgacccccggtaaaccaacaattgcatctctcagatccaccaactccactaactccataacttgatccacaaacatcaatttatcctctttgcttacttccttagcaaggcgaaggaaagcagagaagataagtgattctcttactgtaacttgtggagagtgaatgtctgtttgttcacagtaaccagagattctagcaaaagtctcttgtttctttgggaatccagatactcttacgtctccccacctgtatccacctgttttccttccggccaaaacgaccatcaaagccgtcttacccgcaccgctcaccccca

SEQ ID NO: 10190 - DNA, 915 bp, Arabidopsis thaliana landsberg
ctaacgtcctgctttcacttcagtctttgccgtctccacagctttcgcttcggttttctcctccgtttttgtctcttccacagtctatttctcaagaaggccagcagtgtcagcggcatctttgctctcttctttctcttcttcagactcagcaacttccttgaacttttgcataaatgttttgcaatctgacaaggaaaataagatttgattacccacaagcatctctacttttcccggttaatatgatcaacagctcagaaactactgataatatttacccaaaataaaaaaagaaacagtcgaccatgttggcatatcaaattagttgcagcctaaatacatacttgaccacctcaagaacaatattatctctttacaatgcaataccacaacctaaccgccacagtacttattttgatatttcctgaacccaataacgcatgcctatgatggaagctttgagaacctccaattaacaaagtagccatatagcaatgctaaggtcaagatccatcagtaatctaatctaatccgtgaatctatcaaaccaactgagactaaataaggcaaaacacaagccattacaaaattcggtttcatactcactctcaatagaagcaaatcggatacagaaaagctcatccttgagttcaccatcagcaaagtcacgagcgtgccacacacatgacttttcattcccaacgtgttcctgaacactcatgcccgatttaactgcagaaatatcagaagcataagactagataaggaaacagtaacctaaatacagatccagatgcaactcaaaaacaacacatagtagtccaaatagaaattataccgaagtgattagcacagatcttcaaagttttagattgcctcataacgagacgaatctttccagtgttcttatgc

SEQ ID NO: 10191 - DNA, 1719 bp, Arabidopsis thaliana landsberg
aaaccaaccaaacagttaaaaattaaaccacacatatcaacaaataaacacaatctaactaagtgtgataatccaatagtcatcgcttcgtttctcgaattcaaacagctgcacacatcttctcttctacctttacgtgattcatattcacactgctccaattttgaaattataggttttatgtctggaatataatttcccggttgaacaaaagaaacacaaactagacctcttggtcgagggtaattaattccgtgtggatttcaattgaaatcgcggacgtggaaggaattagggttcttgacaacgatgtcgtacatgtaaacggagttgaacttggagaagtctcttggtaaggagatgaggtcgatggaggagcgtttgtggtactggatgagatcggagtctccactgaagtatctttcccacccgaggctccttaggatttgttcgagcgacgagtaagatgagacggcttcaccggtcggcaagtaaaccaagacatttctccggccgtgcgactgtgtggaaactccaccggactggttcgggttctccactagacgtatcactccgttattgaacacccaaactcctgacatggcctcacaaaatgagtcttgttatgtatatagaaagagagagatcaatatttgtaaggggtctcgagcgattgctttggtgtttacttatgaattatgagagagtttgtgtgcgggctctgtatttatagccatgaggaggtgactatctcctttaacattaaataaaaaaacgttttttggatatgagtcatgagatagattttttcacagccgccttttcatgcgtgaagtggaacagttgcctcaatacttcaaaaaaaaattaaaaaattgcacaagacctccaattttaagtagagcacttagttattttcgtaatacaaatttaaatggggagttaaatatcttttcaattagattgcaatgtttcttttagacaaagtgtggattcacaagacagagaaatatcatttgtttggattaaatatgttacatatatagaacaataattatataagatatgataggtgataacgttttgacggggcacatcctccgtgctaaaaacattatagaaatcattgctaaagtatcactagtttatttggtttatattctcgagagtgacctaaaatttttaaaacaatgaatgggggattgggagaacatagaaagccgacacactggaataaatatatataaaaaatctgtctccgtcgtatggagaatctagatattgtgggtcatgcttaccattcctcaattcttctcgatctatttatcttaaaacaaaaaaaaattgatttacgataggttctctttttgttaatggttgatcttgcatctataataaaactttacaaaaagggctttcttttatttttctttcatatatagttttaagccttttcttactataacacctaagaaaatgtattttaacctctctttttttttaactttgttttaacaaaaatgtatttaaactttaaagttgtctattatttttcagaatgaatggtgaaaattctatagatgctcagtagcttacgagtaattgatagtttagggtaatagtattaccgtaatactatatatgcatatgtacgaaagaaaccttatttttaggctaattctaacaagtttagatccatatttctgggctgttttagca

SEQ ID NO: 10192 - DNA, 1399 bp, Arabidopsis thaliana landsberg
tttgggctttcccctaaaacaaaaaaacccggtatatcccggggtttggcaggaaaaaagcgactcaaaaataagcttaaaatagaattaaagaaatggcattgaacccccaaataagggaaaatcttcgggctatcctttgacttccaacttctacatccaataatcatccgccacgtagcttttatgcatatgtaaaaaagaaataggcaagaaaaaaagagagcctttgtgatcgaacaaagaggacaacatttgagatttctttcttcttacgttacctctctcttaaacaaaacaagaaacaagataacaacacaaataagtttgagaaaaaaactttttgatttgaagatagtaacattttgtgtagttttcttaaccaggtatcattttcttcttctccaaacagaaatagatgtgtgtgttttttatcttatcgtttgtttatatattcctctcaaatttgcagaaactcatagctcttggacatctatatgaatctatttctttgttaaatagggttttatctactccacaaacatgtaagttctttttttatttttcttaagattcttatcgcaataggattcacgcaaaaacaatttaattctttggccaatctatgcattaccgaaagttgtatccctaagagaagaagaatctcaaagaaaaaatattaatttatgaaaaaatgtttattttttttccttggtgtgcaagctaggtatgcatctgcaagttgaatatgacctcacctatgaagggtctattaaaaggtttgaggtacattgctcgtatcttcggtgagtttattcgttctcgaaacaaagatcatatatgtctatacaattaccaaaaatcagattcttaaatcttataaaaaaaaattgttgtagaggatgagaaggaaccagagatgcagattggaataccaaccgatgtcaaacatgttgctcatataggatgggaagggccctcagctaccaccccaagctgggtatatccttctctcaatatttttataacatattctacatatcttttgtttgtggattaggtcaaatattttcatgggaatatgcagatgcatgatttcaagcctaccgatcaaacgaagactgagacgaaaggaacatctaacaaaaaacctgggagttccggggagaaacataggaagggaagacgtaaaacatcaacaggaaacaactcacctacagaatctccatcaagggtaggaggatcagtaaggccatcaaaacgcaacacggggaaacaaagagagcagaacacgggttcagggtcagagtcaggttcaggattagagttacctcaacagactgatcagtttgttgtaccaaaacaatcaaagcaaaaaaagtcaaaaggatcagcaaca

SEQ ID NO: 10193 - DNA, 1514 bp, Arabidopsis thaliana landsberg
gaatgggacaccgtgaagaagataatagtagagtaattagagtagtagtacatattttggtcatggacgcttcactcttgggagagggacgaatgcatcaaaagatgtggctcctgtctctatactcgttttttttttttttttttggtctcaagtctcctatattcgtaaaatgactatcatcacaatatcatattcaggcccatgggttaataaagactataaagggcccgtaaaaagtgatctcagaaacaggttttcttattatttgaaaagtgttttttttttttttgttgctaaatttgtaaatatcattaaaaatgaagtggaagtattcaaaagcagtacctaaactagagtaattttgataaaaaaaaaagaagataaaaaacaaggttacaatacttagaattgatgataaaaatctatctcatccaaagtagcattagaggtctccgacgcttctgagagcgtcttcccataatggtgttgcgaaaatttcttgatcaattatttgagaagttacatctatatatttatttcataaataataatgtagattgttttggtactcaagaccagacctgatttctccaaaaactttaaaattttgggttcaactggttgagctataccgtctcaggtaacaccgagaaaaaacaagatactttttttgcacatgtttcaatcatattataaaaatgcaagatcttttttaaattaaaattttgtatgtgaacaaaataaatattaattcctaagtttcgttgacaaaaaaccgttgacgaaaaaaaaatgctaagtttctgtgaattaaaatgaaaaaaatagaaatatctaaatttatttgccaagatagatttaagagagagaaaaactataccacaattttcaaaatattattaaacaataaattataacatctaatattatgaattataacatctaatattatgaattataacgtatggacctgatcctgaaatgatatggacgtaacttgaatctgtttctagcttagctatagtttgtctgctactcgattattacccccatcaagttccacatatttctgtcttttcttcaacataaattcacaagttgttgcgagccaccttccatgatgatcaaacggattccatgacatcaaagacattggtaatgcgtgaaggaaactgaaatctttagcttcaatagaattaacgctctttgatatgtcaaacagataaacttcttgcaaacataaagacatccaagtcgtctcgatcgagctatccaacccaaacccattggagcattatttgcttctttaaaagggccatcgtggttgcattttctccatccattagatggggtggtgccaagttcaagttgtatttgcctgattcgttgtaagggaatgttatagatcgttttggtacttatctcctgggatattcacattcgtgcactcttttacaccgttttgtacctttctcacatccgctaggagatttttatatatcctgaaaaaa

SEQ ID NO: 10194 - DNA, 342 bp, Arabidopsis thaliana landsberg
  unsure (1)..(342): unsure at all n locations
ttcctttcagttctggctggctaggagcagatgcagcttcttctttttcacaggttgagcttttccttttttgccctcgcatgggataacgataatcagggtagaagaacccgactgcatcaaacacccgcgtgagtctcttcttttttcggcctccgaaagctgctgatnnnnnnnnnnnnnnnnncttcgaatatgccccacgtagatcatcacttaatgtttcaatgcttcttaaccagtcgatcgcacgttcgacaaatctgtgcccatatttgaatgcgtattttaatctgactagtccgacttcgccggattctttgatgggttgcttgggcattt

SEQ ID NO: 10195 - DNA, 900 bp, Arabidopsis thaliana landsberg
  unsure (1)..(900): unsure at all n locations
gattaaaagtggagctcatcgagatagatagatacacgaattcaccagcagaagaagaagaaagaaggcgaaaggaacgttaaaaaaaaaaccaaaactttattcgaaaaatactttgcccgttganccagagagagagggatagagagagaaagagaagacttgatcgaaacaaagcgagaaaataaaacataaaaaagggttccctaagttttatctctctctctctcactattataacgaatacttcttctgctgacgtcacaccgttacttgccgttctttttaccttaagtaacctattttctccaaaccgaacagatatttatccataagcacgagttgaatgtaatgcaatctaattcgggttaaagctggttcagtaaaatagaccaatttaacgccgtcgttatcttttggaaagtggaaaagtcgtcaaggttagaaggtacactaacggacgttaacggtagagagttaacctcagaaacagaagtttgaacctcaaacggcactcgtagctgatccgttgaccactgaacacgtatacgatgccaagctttgcaggtgactctggaccgtcggatttggtttgagatgaactttatggttcttcttaaatactatcctgtaaaaccaagctagatgtaagatcatccggaccgacacattttgtttaaaattgaattttctggtatttgattttgggaattttcataaaaagtcatcacttttgtttcagttatatctttatagaaaaataaatttaaaatacatttagctcatcaaataggtgagataagttcagtgattgttagttgttatctgatagaaattagaattatcataaaccaggaaaataaaattatcaaaattaaatacatatagattttattaaat

SEQ ID NO: 10196 - DNA, 877 bp, Arabidopsis thaliana landsberg
acgacaatagaaaaaaacatcaagaacacaaccacaaaacatttccccaaataacctctccctgaatacccagatattaaagagttccaagagactaaatctctctcaggcatttcatcgaacagcttctctgcacaaacatcatgacccaatctcaagtaacaaccaacaagctggtccccaataaatccatggcggtaactcacactcttcactactttacaatgaagcaaacgacacagttcaatggagacacaagactttacagcagctataagtgatgaaacatttgcatctaaactatgaacaaaactagattggctcaaaaatctccgacgatataaaaatctgaactttgaacatgaatacacatttgctttgatcatctctcattgttattatctttctctcctcaaaccaaacttaaaagccttctccaattagtaattaccatttttactattaacgccaattaattactggcttcaaaaaaaaaattactattggataaacaataaatatcacattttaaatttcttatcataatcatgttttacctctgaaatcgtcaaatcactaactaggtgaaattagaaaatggttacatagctaggttctcaccaaaagccattacaagaacagtgaccatctttgaaatggtggaacctgtttctgtctctgacaatgatctctctgttaaaaatcttggagatcatcatagaaacctgatgacaatctccacaaacccgaaggttcttcacgatccgaatcggaacatcttctttcaaactcattataccaaatgcaatcgctgccttttcgctatgcaaacacaatgcatcctctttctcttcttcatctatatcgaacataaccg

SEQ ID NO: 10197 - DNA, 1593 bp, Arabidopsis thaliana landsberg
  unsure (1)..(1593): unsure at all n locations
ccgagtaacaacgaaggattcaatgtaggaaccggtagtaaacctgggaagaagccacaagctccaaagggtaaacaactacatacccaaagccagatttttaagtatgcatatggtcagattgagaaggagaaagctatggaacaaaacaacaagaacttgacattctcgggagttatttcaatggctactgacactgagatgaggactagacctgttatagaagtcgcgtttaaggatctaactcttacattgaagggtaaacataagcatatattgagatctgtcaccggaaagatcatgccaggtcgtgtttctgcggtcatgggtccatcaggagctggaaaaactacatttctttctgccttggcaggaaaagcaactggatgtacgaggacgggtctaatccttataaatggtagaaatgactctataaactcgtataagaagatcactggatttgtgccacaagatgatgttgtgcatggcaatcttaccgtcgaagagaaccttcgatttagcgcaagatgcaggtaaatttattctcatatcatagaggagattgagagtccaattcttaaaaaaatacatttttattacatagtgtttatgcttcaaaaaaatgttgcatatcatttatttatatatgtttctttacatgcagattaagtgcttatatgtcaaaagcagacaaagttttgatcattgaaagagtgattgaaagcttaggattacaacatgtaagagactcgttggttggtacgatagaaaaaagaggaatctctggaggacaaagaaaacgtgtgaacgttggtgttgaaatggtcatggaaccttctctattgatattagatgaacccactacaggtttagatagtgcatcttcacaattacttcttagagcacttcgacgtgaagcacttgaaggtgttaacatttgtatggtcgtccatcaacccaggtatgttatctcctccatgaattatgttacaattttatgttaagaaatactttttgcttaataattggttttttcctcttattagttatacaatgtacaaaatgttcgatgacatgataatactagcaaaaggtggtcttaccgtgtaccatggatcagtcaaaaaaatcgaagaatattttgctgatatcggaatcacggttcccgatcgtgttaatcctcctgatcattatatagatatacttgaaggcattgtgaaaccagatggtaatataactatagaacaacttcctgtgagatggatgttgcacaatggttaccctgtgcctcacgatatgttgaaattttgtgatggacttccttcctcgtcaactggatcagctcaagaggattccactcataattcttttagtaatgatctatggcaagatgtgaaaactaatgtggagattacaaaagatcagttacaacacaattactcgaattctcatgacaattctaatcgagtaactcctaccgtaggtcgacaatatagatattctgttggagggatgattttttagatttgaagatggaattctgtggtaatttcatatgacataaaacttagtctatctatntagggtggaaac

SEQ ID NO: 10198 - DNA, 2016 bp, Arabidopsis thaliana landsberg
ggacacaatatcttttaaaagttttaattaaaaaaaaggtaatcttgaaattgatgaattattcatttcatagtgtttagttcccaggaagaatggcgcttttttctgctgtaatttttggggaattattttttatctgtcggttttacttttccttctttgaaaatttgtaattttctttgctttcacagtaaatttttaatcaaattttagttgataaaaaaaaatggatgagacattcattattatttttcaaagagataaatttatttataaaaatgaggaaaaaaagataaattatttaaagagagagtgcacgtagggaagaagtcatcttctttttattgcttcaagagtcaatcatcttcaaacctaatgatcttcaaaaaaatttctggttatgcatctctttcttgaaaaaataatcatataatcacatcaaaaagagtcaattatcatcttcattatcttaatataatcaatcaataattcaatttaaaaggtaaattaaagtaagcaatgtagacccaaaaaaaaaaaagtctgcttttgtttcaaaacatataaggacagtgaaagggtttgtgcataaatgttgttgcttcatctttctcataacattagctatgagattatgaaagtgaagatataaaacaaacacctaaaagtgaaaagtacaagacaccaaatccttcattttcatctcttacacaaccacactaagttaccaaaaaacagaatctgttctttttttgccttcttgcagatttcttcagagtcaaagacacataaaggttcgatttttatctcttaaaatcttcaaagttttcgtttttcttttcaatttcgttgaatttgattctgggttttgttctctgttagtaactgaatctatgtcagctttagataattctagttagggacttatggttctcaatttcgagtcttttgatgttatcttgttgttttaacggatttgaatctaaaatcttggtctccattgattcagatttataattgagttgtgagttttggaggccatggacgtaggagagagcaatgagagggtaaaagacgattctgcccttcaagcttcaccgaggagtcctctgagttctatagatcttgcaattgatggagctatgaatgcttctattgagcagttgtatcataacgtttgtaaaatggagagttctgatgatcagtctccgtccagggcgagttttatttcgtatggagctgaatctaggattgatttggagctgaggcatttggttggagatgtaggagaagaaggagagagcaagaaagagattatcttggagaagaaggaagaaagtaatggagaaggtagcttgagtcagaagaaacctctttcgaatggtaagaaggttgcgaaaacgagtcctaataatccgaagatgccgggttcgaggatctcttcgaggaaatcgccggatttggggaaggtttctgttgatgaggagagtcctgagcttggtgtggtgttgttgaagcaagctagagagttggtttcttcaggtgagaatctgaacaaggctcttgatttagcgttgagagcggtgaaagtgtttgagaaatgtggggaaggagagaaacaacttgggttgaatttggtgatgtctttgcatatcttggcagcgatatatgcagggttagggagatacaacgacgctgtgcctgttcttgaacgttctatcgagataccgatgattgaagatggtgaggatcacgcgttggcgaaatttgcagggtgtatgcagcttggtgacatgtatggtttgatgggtcaggttgaaaattcgattttgctatacaccgcgggtttggagatccaaagacaagttcttggagaatcggatgcacgagttggcgaaacttgtaggtacttagcagaagctcatgttcaagcaatgcagtttgaagaagcctcaaggctttgtcaaatggcattggacattcacaaagaaaatggggctgctactacggcttcta

SEQ ID NO: 10199 - DNA, 1221 bp, Arabidopsis thaliana landsberg
atgtattaaacgttctggtttcgtctggagcagacgctcaggtgctgattcatctcatgttttgtaataaagaatccaaatccttagaagtcttagtgtgaatcttttggtttttgtatgcagctttgcgtatggaacacggatggatgggagaagcagaaaagcaaggttctgcaaattccacagggaagatccacgtcttctttgtcagacacgcgtgttcagtttcatcaagatcaagtacacttccttgtggtccatgaaactcagctcgctatatacgaaacaaccaagcttgactgcatgaaacaggttttagtctttatatatgttcattctctctccttgcatctgagtaacccttatagaagaaagaaatgtctttattttgattccagtggcctgtgcgtgaatcagcagctccaataacacatgccacattctcatgtgatagccaattgatatacacaagtttcatggacgctacaatatgcgtcttcagctctgcaaaccttcgattgcgttgcagagtcaatccctctgcatatttgccagcttctctcaggtgagttaataaaatgaatataaactagtgcaatgttggatcatgaatcttgagtcttcatgttgatgttttgtgcagcaactcgaatgtccatccactggtgatagcggctcatccgcaagaatccaacatgtttgcagtgggtctgtcagacggaggggtccatatattcgagccgcttgagtcagaaggtaaatggggagtagctccaccgcctgaaaatggctcagccagcgctgtcacggctacaccttccgttggagcttctgcctctgaccagcctcagagatgatctgcttcagtttcttactctgttttttttgtgggggttttagatcttttccgatttattattgttttgtttgtgtggggggaagaaagcattctaacaaggtaaatgaattaatagcttacaagttcttcttaattggttaattcgatgttgcttgcctctgatattttggtcttgagaaatatcagttttgcaaaaggacgaatttgcaattttgcactccgaatctaagcacgaactaaggattgaatgccacgtgcagcttcgagataggtttggataacggttttgagatacgaaggaagaattactaaggcctatgcgggccacggccgacagacttatatatctacaatgataaata

SEQ ID NO: 10200 - DNA, 953 bp, Arabidopsis thaliana landsberg
tatctgcttaaaggcatcatgacactcttgtgtaaactcaaatttaacttctttacaaagtaattcagtttatggtcttgcgattctgatgaagtatttgatgaatctcctgtagaaaccaacatgtccaaggaaactcctcactgctttaacattatcaggcgcttgaagacttgtcatgacctcaatcttagctctatcaacttctataccatgctcagaaatcctgtgtccgagaactattccatcctgtaccatgaagtgacatttctcccaattcaaaactaaatgtttctcctcacatctcgctaacactttgcaaagattctcttagaaatcctcaaacgatgatccataaactgaaaaatcatccatgaaaacctccatgatatcctcaatcatgtctgtgaagatagacatcatacctctctgaaatgttgcaggagcattacaaagaccgaagggcattctccgataagcaaatgtaccataggggcaggtgaaagtcgttttctcctggtcatttggatgattcgggatctgaaagaatcttgtttatccatcaaggaagcaatagtacttatgatttgctaacctctccaacatctgatcgataaatggtaaggggaaatggtctttcctggtagcagcattcagctttctgtaatcgatgcacatccgatgtcctatgattgtccgagtaggaatcagctcgtctttctcattcttgactactgtaacacctcccttcttaggaaccacatgaactggactaacctaactgctatctaacattggatagataatccctgcttccaacagtttcataatctctttcttaaccacttctttcagattcggattcagccttctcttatgttcgactgaagacttagactcatcctcaaggtgaatcctatgcatgatacgtctggagatatacctgcaatgtc

SEQ ID NO: 10201 - DNA, 1334 bp, Arabidopsis thaliana landsberg
gggtctattaaaacatatacaatagcatttgtctgatgctattaattcgtatataacagcattttttatttgcattaatatattctaagattgcgttggctaaatgttatttctctttagctattataaaatttgcaatttgttttgaaatttatcactgttctgattcaaactgaaaacaaatattattagaaaacaatatatctcaaacaaacttcacctcaaagaaaacaacattttaacaatatcttagaacaatatttccacggtcttaaacacatcttaatttcagcaaacaacacatctcaaagctaacaacaatatcacataaatctaagtctatcatttggccaagcgactgtagttcccaaagcatcaccaacaaaatgaacctctgaatttagtctccacacttttgcacttccgatctttaaaacttgtacccataccttgctagcatcaggtcctaaagggacgaaatgtaccttatcttccggattagttgaacatattctgccttctgcaacgatttctccggagccagtgcaatctaacaacaagcgctttctttggtcatttgactttgtgttgttggccatgctgcaacttgcactctgccactcacaacttgcactttaaaaggatgttcaacaaaaacaataacaaaaatatttaaccattacgggaacagaagtgttaccgcaggtgatgattctttaggtgatagggtagatgggttattataccctatcctctgaataggccatgggataagctcatgaagtgcatcacccatcaatatcatttcactagtaggtctccacaaataagcatttttatgaaaaatcttgtcaactttaacgagtgcagcattgggacctagaggaatattgttggcaagcagttcttttggatcagatgaaatcaaatggccctcagcaactattagatcctccacattccaataaaagatgaggattctatcaggtggtgcctatgtcatgaataagttatctctttagaataagatcaagcataaaattcaacttagttaataataagataaaaagaatgattaccgatgacccatcagtgtgattctcagttggagagttcacagcattgtccacaatgattttatcagatggccatggaattttagtgcccatagcatttccaagtgagaaaattgttgctgttggcctccagactggtgcatcttcttttgatacaaagttgacaataacagcggctgcatttttaccaagcggcatgcgaccaatcttgtatgttcgttcagccgagcataactctgccttcccgacaatgatatc

SEQ ID NO: 10202 - DNA, 914 bp, Arabidopsis thaliana landsberg
ctcataacaccttagccaaatagttacttgagactaccaaatgtatgtagaactaaagactaagggacagagagttcgtctaaacaggtgaatctagtcgttgttatctaataaacaattcagccccaaatgcagaacacacatagagctctctattgattcaaattacgatctgatactgataacgtctagatttttagggttaaagcaatcaatcacctgacgattcaaggtggttggatcatgacgattccagaaaacatcaagcaagctctcaaagctacactctttgggatcatactgaactctaacaacctcgttatgtcccgtagtgccagtacagacatcctcgtaactcggattgtgcacgatgccatggctatacccaacctcggtcttggtcacaccaggaactctctggtaagctagctccactccccagaaacaaccggcgccaaattgcgcgaattgctgacctgaagacggaacatcatcgtcgggtccttgggcgattgcggcggaagatgggtcagcttgggcttgaggacgagacccgaatccgagtctgttgaaaaggttgttcattggggatttgtatacggagataggtcgtcgagaggtttgagggaaaggacaaatgggtttggctctggagaaagagagtgcggctttagagagagaattgagaggtttagagagagatgcggcggcgatgagcggaggagagacgacgaggacctgcattatcaaagcagtgacgtggtgaaatttggaacttttaagaggcagatagatttattatttgtatccattttcttcattgttctagaatgtcgcggaacaaattttaaaactaaatcctaaatttttctaattttgttgccaatagtggatatgtgggccgtatagaagga

SEQ ID NO: 10203 - DNA, 1314 bp, Arabidopsis thaliana landsberg
cttaggagtttcttcctgtacaagcaaacacaaaaaagcttaagcaaaagcaattattctcttcttgcaaacaaagcaacatatatacataccattgacaacaagcaaagaagagattccatatggttcctagctacagaatcaccaatgaaattcatcttcttccctcgaaccatactgagaaacgcctttggattaaacctcggaagatcgcatccatcgggtttccatctccagaacaagaaatctctgtcgggtctcccttgttttatgcagttcttcgagtcgggaatcgtaggacagctcgagtttgtgtataaagatcctcttttgtctggaacccaatgtcccttgaacaaatcacactcaggatctaaccaaaaaacgcaacaacaaaagacaaacaaatcaatagaatttcaaacacaaactaaagaacacataataggaattaaacaaaactgatagatttaaaaaaaaacagcaagattgtgggaatagttaaatataataatcaaaagttttataagtttacaaatacaaataatcccacgaaattttcgtaacatgagttcttggagagaaaaaaaaactacaaaatgttctcatattttacaaaatttcaagaacaaaaaacagcaaaaacgtacgtgggaataaataaacataattttgaaaaactttaaagatacaaataatcaaaataaatcctaagaacaagttcgtggagataaaaaaaaagaaagtaacaaaatcaaaagagtttgatgatcatcatttttattttctatggttttaccttaccgatttgaggttggaaagaaagaacattttgatcggcaatggatttaaaaggattctgataaacaaagaaaccggtgaagaaaagagttatacataaggaagacaagaaaaatggagaaaatcttccaatgttcatcatcatccatctctctgattttttctctgaagtttcacgaaaaagcgatgacgatgatttcatcgttgcatgtcgatcatccctagaaacattaccaacgaataaacttatatatgtctataattctatatatacacgcgttgagatttttcttttcattctctttccttaaaaaagtttaaatttgggtagtgaaaatgaaaatttgtgaaggacaaaaagttataacggcgattttttaatgatatttttgtttgtttttttcaatgatgatgtaacggtagccgtcagatgaatacacgtggcgtgctacgaggtggtgtgtgtttgcatgtgaattgtcgattgttttacttttttctagtcttcctttc

SEQ ID NO: 10204 - DNA, 1218 bp, Arabidopsis thaliana landsberg
ggactaattacatcagttcgagatggtggtgcagatggtaatgagagcagaattgtcgtgactaaatctagtgatagcggatttcctgctgctcgactatctgaaatccctgtgaaacagtcagaaactggcaagtttgagcatatgaaagttgttataaagccaagacctactaaaggatctggaatggaaggtgatgaactgaaaggtggtcttctgaaaagtgttgaagagaggaaagaagattacgacagggctcgagcacgcatatttaacggtcttgtgaacattgattgtaacgattcttcatctgaaactaatccttggagggtgaattgtagttctagcagagatgaaaatcaagtgttgaagaatggtaatatcgaagcagacaagaacaatatctccaggaagagcaatcctgcatctcgtattgcaattctcagagacagagagaaagatcgatatgaccctgactatgaccgcagcaattacaggtatgtaaagcattgctaaaccattataattgtttgtggataaaaatgaatagttgaaacttgttctgtatctttaaaaaccttttggctttcaggtacattagtaacctcccagtcgatcaaaatttatgcgtggcacacttcaacattcagacaatggggacaccaatctatgatatgggatttagcgggtatagtccaactgctcctccatctcttaacttgggtcaacattctgtcatgagcccctgcgtcaccacaggtttaaaccagccttcaagagatgctgctatgtacatgcaatggccaaatgcagcagctgtgatgtatactcattcatatgaccacttcagaaactccccttttcaggtaaacaaattttttccctttttcctctcttttctttagcctttttgttaattgtgtaaatgttggttgtcgaccttcctagatcacaatgtcacacttaagagtgaatgtggattttatatcacatctgaattagtgaatatcaagttttaaaagtgattgttgtttctgcaggcgcagttctattcgcagccccttagtttcgattacatgcagaaccggtaattacttttctcatcatggctaaggatttgcgtaatccagattttgagacaagttgatgtcaaaaatagacaaacttaaccttttgattagtgtcattgccttgtctttttgtttactactatttatg

SEQ ID NO: 10205 - DNA, 2673 bp, Arabidopsis thaliana landsberg
ccttctttttgccgtcctttgccatgaggacgttgtggccgacgttggggaagaggagtcccttggtaatggcgatgttggcggcgtcctcgtcgtcggaggagtcgcttgagctttcgtcggagtcccattcccgacaaacatgggcatcgccgccccttttcttgtagtacctcttcttttctctcctcttgcccttcttgtcgtcgcctcggtcactgtcactagatataggacatttagcaataaaatgaccgggcttaccacatttgtagcaaaccttcttggaacgggacttgtaatccttccccttccgttgcttgaggatttggcggaagtctctgatgacgagcgccatttcctcattgtcgagcttggaggcgtcgattggttgtctacttagtgttgaccctccttctgttcttccgtcgccttgaatgcgacgggttgagcttcggatgtggagggatcatcaagctcgttgatcttcctcgagccttcgatcatgcactcaaaacttacaaaattcccgataacttcctcgggggtcattttagtatatctaggattaccacgaattaattgaacttgagtagggttaaggaaaatgagagatcttagaataaccttaaccacctcgtggtcgtcccactttatgctcccgaggttgcgcacttggttcaccaaggtcttgagccggttgtacatgtgttgtggctcttcccctttgcgaagccggaaccgaccgagctccccctcgatcgtttcccgcttggtgatctttgtgagctcatctccctcgtgcgcggttttgagcacatcccaaacctccttggcgctcttcaacccttgcactttgttatactcctctctacttagagaggcgaggagtatcgttgttgcttgagagttgaagtgctcgatttgggccacctcatcctcatcatagttttcatcccctaccgatggtacctgtgcaccaaactcaacaacatcccatatacttttgtggagtgaggttagatgaaatcgcattaaatcactccacctagcataatcttcaccatcgaaagttggtggtttgcctaatgggacggaaagtaaaggtgcatttttagaaatgtgagggtaatgtagggggatcttactaaacttcttacgctcttggcgtttagaagttacggagggcgcatcggagtcggaggtcgaggttgtagaagtgtcggtctcgtagtagaccactttcctcatccttttgtgcttgtcccctctccgatgcggcttgtgagaagatttctccttcttctctttgtggtgagaagaggaagatcttttctccttctgtttggaggagtccttcttcttctccttcctcttagtgcgggactcttccgatgaagtgctcccgtggcttgtagtgggcttttcgccagtttccatctccttcttggcgtgatctcccgacatcacttcgagcggttaagctctaatgaagcaccggctctgataccaattgaaagtcgcctagagggggtgaatagggcaaatctgaaatttacaaacttaatcacaactacaagccgggttagcgttagaaatataattgagtccgagagagagggtgcaaaacaaatcgcaagcgaataaagagtgtgacacgcggatttgttttaccgaggttcggttctcgcaaacctactccccgttgaggtggtcacaaataccgggtctctttcaaccctttccctctctcaaatgggccctcggaccaagtgagctttctcttctcaaatcaaccgggaacaaaacttccccgcaaggaccaccacacaattggtgtctcttgccttggttacaagtgagtattgatcacaagaaagaatgagaaaagaagaaagcaatccaagcgcaagagctcaaaagaacacgacaaatcactctcactagtcactaaagcttttgtggaattgggagaggatttgatcacttgggtgtgtcttgtattgaatgctagagctcttgtaagtagttagaagtaggaaaacttggatgacttgaatgtggggtggttgggggtatttataaccccgaccaccaaactagccgtttggtggaggctgtctgtcgcatggtgcaccggacagtccggtgcacaccggacaatgtccggtgcgccagccacgtcaccaggccgttgggttccaaccgttggagctctgactgcggggcccgcctggatgtccggtggcacaccggacatgcactgtagatataggtgtacatttgggccgggcctgatgggccggcccgaagcacggaaaaaagcacggcccaggcacgacacgacccgaaatattttagtgtcgggccgggtttgggccgaggtcgtggcctatgggcgggcacgagcacggcctcgtttaaggcaggcacaaaatgacccatatagaggcacgaaaaggcccatatatttattaaaaccacacttcattccacactttcatgtactttataaagaacacaaagctagagataatgctagttagatgttttttagctttgaattagagtatgtgatgtaattttacttttcttatgaccattagataatgacttgacttatgaactttgtatagagttgattatacatctttgtctaacaaaatgatttgt

SEQ ID NO: 10206 - DNA, 1400 bp, Arabidopsis thaliana landsberg
cataaaaagcgggtcattttgtaatttcatataattagatctatgtttttaaattgcaaaaaaaaagtgtacaaagagcgtgaaatccgcggtggcttggacccctcccgagtcctcaacactatataagacactttcttctctaatctccatcacctcttattttcatctgcttttgaatttcaaaccttcacataaaaaaaatacttttgaatccgtgtttcattcatcgaatctttttccgatagctatggctgaggaaatcaagaatgttcctgaacaggaggtgccaaaggtagcaacagaggaatcatcggcagaggttacagatcgtggattgttcgatttcttgggaaagaagaaagacgaaacaaaaccagaggagactccgatcgcttcagagtttgagcagaaggttcatatttcagagccggagccagaggttaaacacgaaagtcttcttgaaaagcttcaccgaagcgacagttcttctagctccgtaagtttagatctgatctgttgatgataaactataacatgatcgaatgctttccttatctaactatatgggtctgaatttatacagtcaagtgaggaagaaggttcagatggtgagaagaggaagaagaagaaggagaagaagaagccaactactgaagttgaggtaaaggaggaagagaagaaagggtttatggagaagttgaaagagaagcttcctggacacaagaaacctgaagacggttcagccgtcgctgcggcaccggtggttgttcctcctcctgtggaagaagcgcatccagtggagaagaaagggattcttgagaagattaaggagaagcttccaggataccaccctaagaccaccgtagaggaggagaagaaagataaagaataagaagattatcattaaagatattaagaataatgatggttgatttgctttgtttttttttttttttattgtgatgattgatcatcttttgcttttgtgatgtgtaagtttgttggcttttttgttgattacaatttcttattttctcttgtatatggtttttaaaaacaaaagatctcaaggtattttaatggtatgaatattttcatttgattaagtgatatggatgatataattttatgtattgataatcttcaactattgctcaaagccgtaaacatgaccccagtttgattagcattcaagttcgtatgtaggaaattaaatgcgttggtatagaagaaacatgatcgtgtatactcttctttttagtgattgatttggcattgcggtcgacacaactactcaaaacgtgtaagaaaatggaccaacttagatatttttgtagaccaattgacgtaacgtttccctaatatgctagttatgataagatcacatattcacatgc

SEQ ID NO: 10207 - DNA, 1510 bp, Arabidopsis thaliana landsberg
aatttgccaatttcatagcgaaaggttccttttgtcttgaccaaagctcagacagagaattcagttacctgttaaaaaacatggcttctttcaagtgcacacctgaggctagattcttggtgacccaagccagcacaggtctcacagtttttgccaggacaatcgattctgtttccgcaatacaagtacttctccgacaacgaatgctgtctcttaccacgaggagaccacacgaaatagtcgattagggtttgttgataaggcaatcccaatttgccggtggagatcaccgaagagaagaggaggaggaatgagaacaccactatacagaacagaacaagacgctgagatccagaagtgggtttggtcctttgagctttgctcattgtcgccattagagtgtttcaagactgaacaatgtgagcgaggaagaagaagaagaagaagagtcctcctcgacggttaaacacagaagatccgatctgaagaacggtcacgtgaggttcatctccggcggctgtcagaagtgacgtggcggatcccaagctgatccagagatagctcagattcagataatgcttctcggcttgagaactttggctgccatcgaaagacacactcgagctcgacacgtaaagtttgccgcacaacgcctaagccaaaccggtttaattaaaccgaaccgaagtgaaatcggaacaattcggttcatctggtaaagtttattttgttcaataaataagattcttagtttgtaaaataacttgttcaaatctttttcaaaacaattatgttcacaaattttgctctcttttgtttcttttttcaaatctttaatctaattctcttctacgctttctgcaatgtacgagaggagacgccgtgtaagagtctgacaaaacccaagaaacttagcttcccatcagaatgtcttatccaatcttgaagaacaacatgaacaggcaccgatggacctagtccgagttcctgtcacaacaaaacaacacatatgcacaaacgcatcaagcaccaaccaaagacatcggtgatatcacatctcgaagagaagttttataccgtggcaagttcttcgatcatgatgactctgttcccatccttctcatacaactcatatgcacggcgtgcatgttgctcccaagtctccattgcttctagctgatatacacttaaagctgaagcgcaaaactcttcaaagtctagtttcttatactgaagacaactaatctgcaacccaaaataaatttttattactatcttcacccaccaatgaccaaacatagtgaatatatcacttatgtcctcattgccttaccatgtgtacaaaatccaagactcgtgaatcctttgtagcttctgtggagctcttcaagattgcctgcaatttttaatcacaccgtatgaaaccagaaagatacaagtttgaagaaaagaaaagcgaataaaatcgtacctcactgttttataattctgcatcgcgatatatccgttt

SEQ ID NO: 10208 - DNA, 805 bp, Arabidopsis thaliana landsberg
gatcgatcagtatacccttcttgttatgtattggattgatgcacatccgagatggcattacaaaagtcctgcaacaagaaaattgcaatgtacagtgaccatctttaccaagagagctgcatcatttattcaactaaccatctcattgaaccagataggctaattgccatttcaagaacttcatcagaaatctcaaaagtttgacatattggtggattttgcaaaagttacctgttcagaaacatggcttcttcaagggcacatctaaggctagattcttggtgacccaaaccggcacaggtctcacagttcttaccaggacaatcgattctgtttccccagtacaagtacttgtccgacaaactatgctgtgtcatgtttcgagttgacctcacaaaataaccaattagggttgtccgatacggtaaagccaatccgccggtggagatcaccgaagtgaaaaggaggagaaatgcaactgcgactatacataacagaacaagtctttgagatcctggagtggcttttaacttatggggtttgctcattgtcgccattaatgaaactgttgtagtgtctagatcagagtaagaagagagaaagaaagaatctttgcgacggttaggtacagattaagatgagatcagagatcttaaggtcaaagtcacgtggttgtctctgacaatgtgagacacaatcacgtgtcgtatcattgctctgatccaacgatggcacaaagacaaattgttatttccggctgccattaaaagagtgcttcacacgtaaacatcactgggttaaaaac

SEQ ID NO: 10209 - DNA, 1318 bp, Arabidopsis thaliana landsberg
actagtgatctatgatgtatacgagtcaatgtaaaagtaaaattatgattttatctttataaggatatatagtgtttcttttgtataaaaaatgtcaaaacatattgtaatagaaaaaagaaaagaaagctcggataaagaacatagatttgactggttggtataggcttttgagagtgggaaaggataggctaatgctatcagactaacagaaacagcatgcctcttttattcaattttaaccaattccacacatttttttgttgaactatacaacatttatctaattcattgtgtgtttaggtcttttagtttttctatatatatatattacaagaaacaaaagccacgggctatgaaaagacactcaaggagggctaacatattgtcacttcaatcagaaaggaaattcacaaacaaaatctacaattctattaagattcctcttgttacccaactagttagcaattagtaccaatttctgtctttttttgtctaggtcttaccacgaaatttaatttgctaaattaaaaagttcttgattcggacatgccgaattaaccaaacaaggaataccacaattaaatcgccacatgctgactattagtggtgtaacaacatctacaaggccgtgagcttttcaagaaacacaataatactaaatacatataggatataaacacatatttgtaacatcatcatgtaaaactttaaatatccataaaataaaaatatttcatcatcaatgaaccttcattaagacgctgtattttcaattatacctaaacgccaaatccaatcatctaaaataaatcagttgatttataacttcatgattatagatcacaataattatttctagaatttcgatgtggattaacatgtatcatgtatgatcttatttatttgattaaatatgcatcagtccaattataagagcacctccaatgggaggttctctcgtctaaaaacataggttctctcgtttattgatgataaaaataaatgaatatattaatatgcagagagtcgggcctctagagagagtttttgtaccttgagagaggcgattacgtggcaagccacgattggctattgaattttaagaaaagaaaaaaaacttgtgttctctctctctttttctcgccaaattcttctaggctttctctcttcatcggttccgccggttgcgattcaccaaaaatttccttgaatccgttgattgctcttcaacatggctcttatcctgatttaccaactgtctaaacaataatcatggatcttctcctcacacgattgatttgactctgtgtaaggg

SEQ ID NO: 10210 - DNA, 1070 bp, Arabidopsis thaliana landsberg
aaaacaatctttacagagttataaacacacacaaaaaaaaacttttctcttttcctttacacgatttggacatatatataacagcatgtaatcttattcttagacatagatataacatacaaaattttcaacctgaaaagtgtatacaaaagaattaccatctttactaaattaaaagcaacaagactaaaattaagaatttctcttattagtaatttcaacatatctttttttttcttcacaaaaaaatgatcagtaaatgattcaaaaatcgattttgattttagaaaaagaaaaaaaaacgaaaaggtaggaataaaaattcaaaaaagaatcagaaaagacaaacgatcccgcttcaaagcctcctcatctgtttttaggaaactctcctctttctcctccaaaatcttctcaatccccaaatctctcagttcttcgaccaaaaacatttttctggattcgaagaatcaaaccctaaaagttattaacaatggggaaggagaagaaaacagagtcgtataataacgatagcggtagttacaattacagaatgttcaaattttataaccgtaaattcaagatcaacgaagtcacacccaccgacgacgtccgtgacgctttttgtcaattcgccgtcggtggcggtggtggaggaaccgatggagattcaagtgatggtgacggatcaaccggtgtaatgggtgcagagcagctttgttctttcctcgatgatcacggtgagtcaacaaccgtcgcggaggctcaacggttgatcgatgaggttatacgacggagacaccacgtcacgcgcttcacgcgccacggacttgacctcgacgatttcttcaatttcttattttacgacgatctcaatcctcccattacccctcacgtaaaacaatcacatgttgattctaaattatcgaaaaatcgaaactttggtttattaaaatgtgttttttttaaacaggtgcatcaagatatgacagctccattgtcacattactttatatacacaggacacaattcgtatcttacggggaatcaactaagcagcgattgtagcg

SEQ ID NO: 10211 - DNA, 966 bp, Arabidopsis thaliana landsberg
cgtgaaacttgaggtttccattatattgtgaattttcactttgtcgtgatcgttcttttgttgttgagggatggatagtgctctaacgctctctcgaccattttggaagtctcggtatatcacgtgaccgagtcgaatctgcatgtgcattttttatttataattatttcttcttttacaaaaaaaaatatctttagtactattccatattagatagctcaccttcaaaaatgcatgaagcatcctccttgatatttccgataagcgccggtgaatatccacccaatactttgaaatctttcatctacattgaatttcattattttgactttatgataatgatttattagttaatgttatactatagaccaaaaaattattgaaaattaaattaaatacccagctgggtggattatgattgacagagcctccatcccaaccaatgtgagcaacatgttttacatctgttggagttccaatttgcatctctgcctctttctcgttttctgcgttatgcaaattgatcataaaatgtaatattaaaacgagaaatttacaaaattattaggctacattcagagaagatagtatatagtatatatatataaaactcaccaaatatttgagaaaaatacctaagacccttcacgaggctcttcattttgtaggttgacataatgaaatagccaaacaaatcaatatagtttctaagagaaaaaaaaataatctattctgtgtttactaattttgtttttctcctggaagctataagaatgaaatgaattcagaactgaaaagaaatcacgtaagtttcatttcggctcgatcgattaagagccattgtcagtgatttctttgaaagcattttgatttaacattctacgacctaaaattttctttctccaggaaaaagaaaaaaggttgaatcaaaatactcagttatgaacaaaaagaaataggaaaagg

SEQ ID NO: 10212 - DNA, 1492 bp, Arabidopsis thaliana landsberg
gctaacatgcaactatggggccgttttgctatgtggtagcataaaatttacaaaataatttgaatgaatgaagcaaacagaccattttaatccactgaaagtcaaaccaagtagcaagtaaccgcagagcaacatggtgacgcgcatcatagcctttcctacgccgtgtacatatctcattctcctcatgtttatctgccaagcaagcagatagtagctcgtaaagaacatttatctttctctcatggctaagcaatgctacttccccaacaggtttctcatgttcaacaatcccaagattgtggcctccatctctaatttcaccctccccgtggctctccgtttccttaacctcagcaccagactgtgcctcgggaacagaatacttgtcgcggcattcgttttcgaattccacatgtttctccatcttagattccacagatagagagctgcttcgaatgttttgatccatagcatcagcagctttagctaaggcggtctctttctccaccatttcactagaatcatcatcaccatcactcacatcctctgagagtaacttgataaactacaataaaccaaaagtaacatccaataaagaagagctcctcaacattcacaacgaaatttcaaaatacggagagaaattaatcataccgcaccgatgtgatccttagcctgagtagaagcagctatctcttcaaggccatgccaagctgatgaatcaatctgaagacatctgaaagcaaattacagagacagctcaaaatgtatacattacacacacagagacgcatatgaacatgactattccagatgatttcaagatcacctgagaacaggacggaggaggccggaaacttcgtggacccagagatccgcctcatcggagataggatcactgtcgctgctgattggctctccggtacttccggtggccgggattcccaatggctttgactggctgatctgcgcttggttaagcgcgattgcaaacaaagcgcttgccgcgtatctctgcgacggcgtcaaatttgacgtagcttccaccatcaactcagatcaacaaaaacgaaatcgaagaaacaacaaaaagtttccaaatccagaaacgatcaatagagttcgtctcattttccaaaaacaagtagaataaactggagcctacacttgtcatgatataaatagatttgaaacattcaaaacagaaagaatgaaacgttacactatcattatcatatatatagaataataagatgatatgatccctacaaatgttttgattacatccatggacaacaatttcttcccatttttatacttgttcctaagtacaaacaatgtaaaaaaaaaaagatacagaagttgggtatgtctgtgcaaatcttaacacaagacaacgttacaaaacctaaatactgaagaaaacaatgggtgcagtcaaaaataccgcgaaaaaacatcttctacatatgcaccactcgtttttttt

SEQ ID NO: 10213 - DNA, 631 bp, Arabidopsis thaliana landsberg
cgcgtctacaacattagatattccagcgtcccacacaagccctttggcattcatcgtccacaccaatgtggcactttagtgagaatttcttgatggaagaatcacattgcaaagccagtgttcgatccacacaacttttgaagctctctggaaacacttgttcaccaccctcttccgcatgcagcgagtcggaatcatcaaagtcgagactatccgccaatatatacataaaagtccactttttcgacagaacagatgttgatatagcctgttttgtcggcagaaaggacaagattttgcccaaaacctcgtctgggagacagctgattgaatttcccgagcaggtctttacaaagtgtgtcgcatccatagagattaaccgcgagtgcctgaaacatgaaatgaatcaaacaaatgcacccaccaaaaaagattggatatttctataacttagcagaaatctcaaaattttcgtcaatgaagattacaagtacatgactttcagcaaccaactacaagattaaccggaattgaaattgtttcaggaaacaaaagatggtcagagacggccgataaactaaaggttcaagctttctcaaaattttggattggttaaaaggtttgtgcttta

SEQ ID NO: 10214 - DNA, 1135 bp, Arabidopsis thaliana landsberg
gcattttaattagttagtacatcgcatgacataaactctcaaatcaaattatcaagttccaaataaaacaaaaaccaaaagacatattattctatctcataatacaagcttaaattcctctctttatattactattttctaatgaaacaaattcattatatctttcataatggtgattattttgaagtcatgtgattaaagcaaaagtcgaaagcaaaagttgtttttttgggttaaaatgtcccaagccaaagttgctaatataaacgagctagatgtaagaataatatttatatctgtcgaattatctgaaaataaaataaacactttttcaagttaagtatatcattttcaagatttaaattatagttttgtgaagcaaaaagaaattattcttttgtaagacccaccaatctcagaccatgcaagctttcttccagtgcaccaatccaccttcttcctaaacaattaattataattttggtttctggccattaggaattcagttttcctctctctatttttaatttctattaggatttttctctttggatatatatttatttctttgtgaaaaataaatattctgctgtctgtctctgacaaaagccacatgcatatgtaaaggggcaccaaagacttgagagacccacccacattattttgtccacatggatgtgtaaggtaaggtaaacctctttttttcatttattatttcctttctctcttcattaattattcattactaattaacattgttagtaattgttgtaccatctaatttgtttgtaagacattaataaaagtaaagatggattcaccattgctgaccataaaaataagcaaacattcaccagtaagattattaacaaaatacattagattcttggattgaaagcaaaataaaggtacttatccaatgaaaacaaaagaaattaatttggtctgaactttcatgtgcatcactttcatcagagatgcataaaaaatagatacctcattattattcccaagcagattttttcagagctttgtcataaattttatttgtaacaataataaaaaattcaattacattctcttacaatgtataaatctacggatacacacgaatacatgtgtacacgcatgtgta

SEQ ID NO: 10215 - DNA, 738 bp, Arabidopsis thaliana landsberg
tataagcagaaacttgaatccatattttgctttaactgtttaacttgcatttgcatatgcatgcattattatgcatcagtctctcgctaaactattgaagtctatgaatcaaagtacccaaaattaattattttcaataactaaataatattgacaaatttaaaataataatatcctagtttgaaagacccaccaatctcagaccatgcaagctttcttccagttcaccaatccactttcccccctaataatttattttgattttatgttgccattagaatacaaattttatttattatctcttattatcctttaagataaatatatgtattatcaaatgctgtgtgttcctgacaaactccacatgcacatgtaaaagaggcaccaagacttataaagacccaccaacattattttgttcacatggatgtgtaaggctaacttagctaattatcaaaactcatagataaatatatatttttttttgctaaaatagataaaacttctaagagaaaaaaagagagagtcatatttggagagaaaaaaaatatgtattataaaatgtatcaatttctcattcattgacaatttgagataaatcaatgaatagataaacatgcctaacatttcttataatagatccaaaatataaccaattttttccgaatttcaaaaagcatttaattttgttttctctaaataagttgccttgtgctgtcatgtgcgtaactatcatct

SEQ ID NO: 10216 - DNA, 396 bp, Arabidopsis thaliana landsberg
cattggcggtatctgtggggaatataaaaatacccgaattcgtattcgaaaaaacaggtatttatactattcatatctggtacctgaccggtatacccgacccgttttcactcctagctcggctggtagtggtattgggccgtggataagtgaccacctcaaagatggttacgctgtgtattcgatgtgagaaaatagtctatttaacctctcctaaatttcatcaaagtccagcttatctttccgtgccccagctgaaaaaacaattgtttaaccattctaatttgctccctaaatcttttaaaagtgattcttagcatgaaaccacgtcaactaaggataaacacggtaatcgtacaggggcatcccatatcctatcctaatgtatttctctca

SEQ ID NO: 10217 - DNA, 1211 bp, Arabidopsis thaliana landsberg
tttatcaacgtacaagcttcattatggctgtgcgataagctagccttgtctacaagacaaatcaacttcattatataaattaagctcatatgaagaagaaactagaaagagaagggacacaaaccttaaacaaaagatcaatgacaatcttcatttgagctccaacagcactgtttcttatgttgttaatgtgctgaagttgctttgtgttttctgaaaacttgccacgaaatacattaggcttctgactggttgttgctgcaggcacgtatgatctcgaaggggccgttcttgaagaagaaatgctcgaaagcgtagattggcatttctcttgctgtttattgaacttatcaagctgctcccgcaaagccatctcaactgtactgagaagatgtagtcctaaccttcaatattctgaatgcatatagacaagaaaaatctcatctgaatccaaaccccaatgaagtgatatgatttgtataaacgaaatcggaatcaaatcttttgatcaatagaaaaaaaacgatcccacttcaaagctcatacacgacatcatcaattttcagaagattgatcatgggacacaaaatagagtaatagaaaaggccgattcctcaaaattagggtttccagacggatctagggtttcgcaacctaaacactgcagtagatttctgcgatcttagaacgaagactgcaactagggtttatcaatcgacaaagatcgaagaacacactttatttcttacagacgagaggatatgggtgtggtttagggtttcgacgtccggaactgatgaattcttctttgcccagaccttcggattaaagatgaaaataaataaaactgaacgtaaaagaaaacttgtcctacaagaagaaagaaatattctagtgggccgtggaagtcggttggattgaggttgactaaaaaccacgtggcttgaaacatacaatttcattcacggttaactttgtctttttccgtagtggttattacataacctacattaaaccgatgcgtttcgtatcaattcaccgaagaaatcaaaactgttagagcaactccaatgtcgaacacgtgtacgttcacccacacgtgtcagatacttaggttgccagcttatcttgctgttggatctatatgctgcaacgtattaatataaaccgacctcgaaaataaaagagagaagagaaaaggatctcaattt

SEQ ID NO: 10218 - DNA, 407 bp, Arabidopsis thaliana landsberg
tcaggcagctccaaaggcagggttaaagcagggattaacttcaagaccggtattgaccatttctgcattcacactggaggtaaagcggttatcgacgcgatcggtacagcctcgacttaaacgagtacgatcttgaaccggcgaggatgacgttacaccggtttggaaacacgtcagcgagtagcttgtggtatgttttggggtatatggaggcaaagaagaggctgaagagaggagatagagtgttcatgatcagctttggggcaggtttcaagtgcaatagttgcgtttgggaagttgtgagagatcttaacgttggagaagctgtagggaatgtgtggaatcattgcattaatcaatacccaccaaaatcgattttgaatccgtttttcgagaagtatggttgg

SEQ ID NO: 10219 - DNA, 493 bp, Arabidopsis thaliana landsberg
  unsure (1)..(493): unsure at all n locations
tctgtgcgggtaatatttgagacgaagatcatcctgagagaaggtaatagggatatgggaccatttggtcctgatgtagtgtccttggacacctacatgctgcacccttctctaggtctctttttttgctttttattgtcgggttcaaagctcgagcccctaatgatggggagaataagcnnnnnnnnnnnnnnnnnnnnagcttgatggcttgccatattcttcgtcgcgatgaagctcgtcatggtcgtaggatcaccggaggtgggcgccattgttggtcagttgttttcaattgctgcatggcataaaaaacaaggcaacacaccattgatcaatgagaaccttcattcttcagataatacaccttcggtgtgatcatttgaggacgaaggtttaaacgtgcaataaaagatgaaacaattatatacgtgatttcaaacttctgaaggtaatgaaaatctattcaagcgttatgaaaaccttcgtctta

SEQ ID NO: 10220 - DNA, 986 bp, Arabidopsis thaliana landsberg
tcaaattcgaattacataaaaatttagacctcgagctgagatcacgtcaaactagattgttactacatatatcctctctcattgtttgtaaccttgcaagtcttcccaagaaatactcaaacgtgtatggatatgacgaatttcacgtaagctcgtatatcttccttacaaaggcctagtatgtcgtcctcttgcccggccgcacaaacgcgaattcttcgggatagggtactcatctctcaaagacgtagatgacgtgaagacacgtaagtaaagttgttgtcccaagtactgtcttgcccaaaattctgatcttaagttccacattccaacgttgtctaatgcaatgtatatggctgtccatgattttgggtaacctgaattcccgtatatggataatgtttataattagaacaagaaaacacaatgtgttaatttgacaatgaaagggggaaaaaaaagggctcacttggactgtggaacgtgaaactgcatcgcgtaaattataaccatttctgcttcctgtcttccactgtccaccatccatcctgcagttgatccaaccacaacacactttgtttaactcgtaagaaaacaaagaaaataataaatgaagagcgtgaaaatagacagacatacccgaccacccaaaaggagtaaccattgagatgataactttggacgatatcttcttggttctcgaatacaatctcgataaaggttcgatagtcgacttgcaaaactgaggtgtcaaggtataaacctccatatgtgggtttgtctgagatgctgttgatcttatagacaccgctaatcttgaagaagtcagccagttttagaggggtatcagctggcacaaatgacacactattgacaccatatctttgtttcccgtttatctgtccggctgaactaccgaacacaattgtcctaatgagcggtataagaccataatggtatgagccttgcgggtttggtcttggtcc

SEQ ID NO: 10221 - DNA, 1640 bp, Arabidopsis thaliana landsberg
gacgtttcaatttataaacacatgcttgccgtctgaggattttgctagtgcacatcactccgttttaagtcatgcagatttgaaaagagtaaaagcccattttaggcccaataagaagtctctcacgtgccattgccaggttggaaccgcttttttatctctcataaagcacgtgcgagtgcgacgatgttttagtaactgctctccttaatggaatccagctgtcattcagacgaacagattttttacgaaattcaaaaaaactttttatcacgagccattaatttttgaattttgccacccgttgccacctcgatttacgtggcattatctaaaccgtcgattcgatttcgaattaccaaatattagccgttaaaacctccttttctttataaatggaccctcctcttcttctctctctcataaaacaaaagatcctctctgcttctcctttccctttttcaaaatctctctctctctctctctttttagatccagttttagggttttcttctctgtgagcgaagatgcgtgagattcttcatattcaaggaggtcaatgcggaaaccaaatcggttccaagttttgggaagtggttaatctcgagcacgggattgatcagacgggacggtatgtaggagattccgagttacagcttgagagggttaatgtatactacaacgaggcgagttgtggaaggtacgttcctcgcgctgttctcatggatttggagcctggaaccatggacagtgtcagatctggtccgtacggtcagatctttcgaccggataactttgtctttggtcagtccggtgctgggaatatctgggctaaaggtcactacactgaaggtgctgagcttattgattcggtccttgatgttgttcgcaaagaggctgagatctgtgactgccttcaaggtatttgaaatccgtcttccttagttaggtttttgtctatttaggtttttggatctgtaaatttaggttgggtattggtagtgtatgattgtttttaggtttagatttctgattttgaactgtggaatacggattagggttttgtattcgttgtttgcttatggttttggttgtttggatttacaggatttcaggtgtgccattccttgggaggaggaactggttctggaatgggaactttgttgatatctaagatcagggaggagtacccagaccgtatgatgatgactttctctgtgttcccatcgcctaaggtgtctgacactgttgtggagccttacaacgcaacactatctgtgcaccagcttgttgagaacgctgatgagtgtatggttcttgacaacgaagctttgtatgacatttgcttccgtacactcaagcttagcactccaagttgtaagtattccaatgttcttcgattatgagtcaatgttgttactgtatctgtctctgtggtttattgtttcaggcttagttattgattagtattgaaacttcactcacatatttttttgtttgttttctgaattgtgcagttggtgatctgaaccacttgatctctgcaaccatgtctggtgtaacctgctgtcttaggttccctggtcaactgaactctgatctgcgaaagctagctgtgaatctgatcccattcccttgtc

SEQ ID NO: 10222 - DNA, 506 bp, Arabidopsis thaliana landsberg
atagagaaacattacaagaagcaaaaaagtggagtcgtaactcctacaaagcaaggaaattatggaaattaagtggagaagatggtttcctcaacaagaggaggaagagccagtcatctcttactttgaaacagaaaaacttaaaagtatgagactgtattttccggtttggtactctgcttctgtttgatgttctgcgccgtggtgcttcggttccatcaaaacatcgatgaagtttattatccagtaccagtgatcttctccaaaacgtgaagtctcgcctctttgataattttgctatatttagccacagtttcaccaacctccgtgattttcgttgttaatgtcttcacatcatcctcgaggctttccatgtctagtttcacgtccacctcatctccttcactcccaatagcatcatccacagtttgcaacagagacgagataagatctattagctcgtcgacttgttcaggtacggacttcataccttgtttgtgggcttc

SEQ ID NO: 10223 - DNA, 775 bp, Arabidopsis thaliana landsberg
aaacttcttaaacaaatatcttcgagccaatacatgcttctcaaatacatggaaattttgatttattgttagtaattcttatatactttctttgttttttcatttgttaaattttgatatcattataaacgaccttcaaatcaatgttattaaactcatccagaaatgtgataatagtcgattagtattatataggcaaaaactaattaaaacgaaagacagtataacatatatgctcaataatttttccattaaatagatagtacacatcagtacatccaccgattagttaagctggaaatacaaagctagctcatcaatttcttagacataagctaaacaagatataagcactagctataaataagaacctgatacacatttacgtgttatctaattccatcattattctcactgtccaattaatagtatatactaattatctttcttaagcatcgatattgtttttctagttatgaaatgactgatacggcttgatcaagggaacgagggagccacttaggtgaagcgacatgacatcgttggtcgaacccacgagcttgccacttacaaagacagcaggaaccgcgttggcgcagccaagacgaactaaggccttctcgatctcacggcagtcaggatcgttgtcgatctcgtggattgttggttgaaccctaagatcacggaaaaggatttgcacggcgtagcagagacaacatgaacttttggtgaagatcacgaatcctttctccgatgacaattctcaataccttgt

SEQ ID NO: 10224 - DNA, 634 bp, Arabidopsis thaliana landsberg
atacatcaacatacaccagttgattaactaaactgaaacacgagagaagctaaacaatagaacatactaacgataaacattaattcagacgaagtcctcactgaatatctagctagctcacactctagctgtaactgtgtttattctcactagctaataattagatattatatattgagttggtttaattttgctagtaaaggatggactgatagggtttgatcaatgggacaagagagccactaaggtgaagggacatgacttcattggtggagccaacaagcttgcctccgacaaagacagctggaaccgccgtggaacagccgagccggagaagagccttctcgatctcacggcagtccgggtcgttgtcgatctcgtggatggttggttgaaccctaaggtcacggaacaggatttgaacggcgtagcagagacaacatgagctcttcgtgaagatcaccactcctttctctgaagacattctcatcactttgtccatgatcctcagaagtctgaagatctgatgatggctaggggtttaaactttagcgttttgatgaatgaaatgttttgttttgagtatgtaaaaagcttgacatttgctcgcctatttataggaagggagtgctca

SEQ ID NO: 10225 - DNA, 1679 bp, Arabidopsis thaliana landsberg
aattttaattttttagtttcaattttcgattcacattgttccctgttgaattcatacgaaagttcaatttttttcaggttaactcagtaaaattctttgaaccgctaaaaaacggcaaagatgtctgaacgtcgtgctaagcgtcttaaatctccagaggagaagatgactttttgcctgggaatataatcgaaatcgagcttcacaacttcatgacattcaatcacttggtatgcaaacctggatcacgtttgaaccttgttattggacctaacggatcaggtaagagttctcttgtctgtgccattgcactctgtcttggtggtgagcctcagcttcttgggagagctactagtgttggagcatatgttaagcgtggggaagattctggctatgtcaagatctctttgagagggaacaccagggaagaaaatcttacgatttttcgtaagatcgatacacgtaacaagtctgagtggatgtttaatggaagcacagttagtaagaaagatattgtggagataatacagaaattcaacattcaagttaacaatctcacgcagttcctgccacaagatagggtttgcgagtttgccaagttaactcctgtgcaactcctggaggagacggaaaaagctgttggggatcctcaactgccagtccatcatcgcgcgctagttgagaaaagccgtgatctgaagcagcttgagagagctgtggcgaaaaatggagagacgctgaatcagcttaaagctcttgttgatgagcaagagaaggacgtggagcgtgttaggcagagagagttgtttttgactaaggttgattccatgaagaagaaattgccatggctaaagtatgatatgaaaaaagctgagtacatggatgctaagaagagaatgaaggaagccgagaaaaaattggatgaagctgcaaagaatttgaacagcatgaaggaacctatagaaaagcaaaagaaggagaaagcagagacagattcaaaatgcaaaaaagttaagaatctcatggatgcaaatggaagaaaccgttgtcacttgctcgagaaagaagatgaggcagaagcacgtgtagtggcaacgtacaaagaactggaggaattgaagaaacaagaagagcatcgtcaagaaaggattctgaaagctactgaggatctcgttgctgcggaacgggaactccaaaacctgcctgtatacgaacgtcctgtagccaaacttgaagaattgagctctcaggttacagagctgcatcatagcattaacggaaagaagaatcagaaggaggacaacgagaagcttttgtctcagaagagatacaccctgcggcaatgcgtagataagttaaaggacatggagaatgcaaataacaaactcttgaaagcgttagctaactctggagctgataggatatttgacgcatatcaatgggtgcaacagaatcgtcatgagtttaaaagggaagtatatggtcctgttttggtggaggtttacgttccaaatcgagagaacgcttgctttttggagggtcatgtttctttttatatctggaagtcttttatcactcaggatccggaggaccgtgatctgctggttaaaaatttaaaacgatttgatgttcctgttctaaactatgtgggcaatagcggcaatcaaaaggctcccttt

SEQ ID NO: 10226 - DNA, 1624 bp, Arabidopsis thaliana landsberg
tcacccaacccagatatgagttcagtaaactgacttctaacaccacgtagaagctccataacagcattgttgtgaatgcaatcaattttctgtatgaaattaagaactttcattagaaacaaaacacagagcagacaggaatatgggtgtaatgatgggaattacaaaccagtttctccttgataacattcccaagctttgaatcagccacagccaaggtttcaccttgacaattagctttcaaaaacttgcgcagacctttgcttggagctccctccagcaatttagccacagcttcgagagcttcagatgtattgtcaaacttctcaaaagcttttagcttaaccatctggtacaccaataaaaacatatgagaaactcaacactaaatctaattttagatgttctgaaaccacacttgatgaagaagcaaaaaaattacctttcgtgctgagtctggagtgtcgaactctttacacaaatcctgcaaaaaaaataaaaaaataatccatgaatacttttagagccttaaggataagcaaagagagtacaaaagaatgaagagaactcacctcgacgttagccatctttccttcatctttaactttaaagagggcaaaccccgccgctgtctcgtatagcactaagaccatcttcacaaaactcttaagctggacctgaagagaaaattaagacaacacttaactcagaacagtaaagatacgtgtcagagtcacactaattaaactaaaagttcgttttgagattaaaaactagcgagaaacagcattccatataaaccctaatcctacttttagatcacataagaaatacaggagaagaaaaaacagagagataaactacaatagccttaaaactctgtccgagtatgagtattcgaaactccacaatctccagcaagaatggaaaagtgaaacaccgtgaagagagaagatgagagatattaaatacctgaagagttaatcaaagcagctgcgtgagagagaggaagaagatgaagacggagacggacaatcacttagggttttaagagtgtgttgttatagcagttaaagacgagccgagccttcttaaaacgccgcgtattgtaagggatatttctataacttccatagttagggtttaggttttaagattaatgggcctgactgaatggatattttaatctggcccgtttataatattaatacgtgggcgttttattgttctcttcccccttaatagtttttcttttttaatccctttgtttctctgtggtattcaacaaatttgtctcgaatttatagagctcgaagcttcaaggtacggtttcaaattttctcgttgattttctgggtagatagcgttttccatacttctcttcaactttatttcatagcatagctctgattttgctaaaacttcatctgattagttccgtggatcctgaaaatcacgattttgcgtgttgtttagggttatactctgtagttgtgtgattagtgtttgaagaagctgggctagtgttcgatgtttacgtcgataacctaattttgcaggaagttataatggctagtgaagatgaatcgattgaacaaaaagctgctgctcgtaaagaggcact

SEQ ID NO: 10227 - DNA, 1448 bp, Arabidopsis thaliana landsberg
acaaagtcaaatgcaacctaacattgtggtgggcatccatgaagaacaacaatatgcacgtacacaaacgaaaatccaaattcaagattcatcacatcttcaaaccaatcaagaaagagaagaccataaccacattctacaaaaagcatgcgactttgagacgtagccctagaacccaaaagcagctcaatacttttagattctgtgtcaaaattcaaaactcaatccaagtactagacttcaatgactccatttcaacccaaatacagaaaaatcatgagagagatacaaaagatctaaccttttttagggcatgagcgagtcttttgttatcagccttccctggagtagcattcaaaatctcacgcgacaaactaaaggctctgttctgatgaggcaaaggcatatctgaagccctaacacgaacattgaactcatctttctgatcttgctgttctttagccctcttcttctgtatcaaactgttcaagaacttgcttcttctttctaattctagctcaactccttccatctctatcacatcactcgtctaagcccctcgttttcactttttcctccggctaatcggagaaaaaaaccaagcttagtgtctgtctccttgttagttcttaagctgtttcagaaacgagcaccatctgtttgacaaaatgtctgagagtgagaagaggtaattgcgtggaggagacaaaatagcgttcttttgtgttaagcgtaaagcagccgaccaaagtccaaaagacaaattcctgatttttgattagtttggtcatcaaaatattaattactcttgtctccccctttctctcattattactctttgtttttcctaactcccatatgtttaaaattgattattgtaactactcgattaattaatactattattcgttcgtagaatttagagaatctagtgaatctactaatcggtaacaatcaactaaaaatatttcacaacaaaaatagactttcatgcttcgttcgagttcgaggtgtgaaatcaataatgggccgagaaataaccaagtaggcccaaaagaggtgcgttgatataagtagtgggctcagtcagctgaaagtaaggtctcgaatcaggaaaatcgtcggtgatattaggcccaccaacgacggcgccaattagcaaattaggattaggattattgctgaagaaataacgagatccgtctttgcaccctatacgatcaggatggtccacaactgaaggaaccgagctgccacgatgatgaatcttctgtggaaacctcgaaccatacccaaccatgtacgacattttcattggattatctcctagtatgtagtccacctatgttaacgtacgccaccaaacacttacgttaatgaatctctctatgctaaaacagaggaatgttggttagtttagttacctgacgcttggcgacttgacggag

SEQ ID NO: 10228 - DNA, 1521 bp, Arabidopsis thaliana landsberg
agcatgagttttccaaaaattagatttctccatcttaatctctttctcattagctttaactccatcaccgttgacttcaacatcagcaccaactttaattctcctataccatttagttttccaaaaaacaatcttgaatctcacatgagtcttgagatccagcctgaaaaccgccgatccattaggcaaaacagctcgtaaaaccgtctggttgtttagcggccaaacttgaccccacttcttggccttcttcttgtgtccttgatagaacttaggcactgtgtagttagcgactaagacaagatcagatgaattggtcgtggtcgtgttgatggtggagaaagtaaggtggacatcgtcgtagtagattcctttgtctttattcggattgtcacaacgaaccatgaaatttagagtggtattgtctcgtgagcttaggtttttgctgagggcaggaatgtaaaagttttggattgagcatttgggtttcttggcacggagactaagccataagataagagcgccgagaccagttgtgaagatgaacttgaagaagcaggtacaacattttcgaccaagttcttcttctggatctatttttgtcatggttttggtatttttgcctgaaagctgaagaagatcgttatagtttttatgacccaaagaaaatgatatttaatagaccaactgactggcaaagtcataccaaaatatttagcacagttagcgatacaattggttaaatattgaacttgaaagttaagatatcaaccccaaaatattgtacatcgaacctttttctatggagcatgcatgtcatttttgttgacttcttcgtcaattttataaaaatatatcaatggtttacgatttcagttttctgatagtaaattttaaactttcaaattttaaagttaatagaaagtttaataacacgagatatatttatatcgaaatgagttatatggcggatttttttaaaatagataatttaaaatttaaaatatcattgatcagatactttaatatgggtttaatcttcattattttactttgttaacattaccaatattatacatatcaaaacagattgatataatcaaaattatgtgaaatcaaaattatctccctatataccgcaagttaaatcttagtttttgatatcatgaacaaaattatccgtcatatgtatgtaaaagttgtttggccaattcaatctagaagtttccaggtaaattgaacaacttgtcttataaaatattttaaaaactgttaccacataaactgttaataaaataaaaatcagtaagaaaatttatgtaagaaaaacaaaaaaaaaaactgaaaatttactaaattgataatactacatccatattcgctttattcaagacagctcaaaaactctgaactgaaaacaaagaactagtatccaaattattctggaacccaccgagtaaatttatgaccagagtttgtttcatatcgaaaataatcgaagcggtggttattttattagga

SEQ ID NO: 10229 - DNA, 1111 bp, Arabidopsis thaliana landsberg
ctggagattcctgaagatgaatacccttcctaaattggctcctactccattgggacgcatttccattgagcaaatttcctctcaggtttggtgacatattgtcttgttgaactcaatctgcgtcacagcaacctagaaacactctggagtggagtactggtaacctcctttcttactattttgaccatcagttcatgttttcgctatagcaatgtgcaatatccaactattctttggtgtccactcctcagaagtttggtcatttgaggaaactagatgtgacgggatctaagaatctcaaacaacttccagatctttcatgtgccgaggagcttgacgagttgcttctagaacaatgcaagagactaaaaggaattccagagtccattgcagagaggtctaccctaggcaggcttaatctatcatactacggtggggctaagaatcccatgggtgttgttatacagaaagtttctcagacgcaacgtattacattgttgttcccaacttcaagcgtggaaatgcaacttatgaatatatcaatcacgggagacattagatttcgtgtttttgcagattttgaaggatatgctgaatacttctcctttagtactgagcaaaagatccatgctacaaggacagtaagtgtccaccaagctcctcggctcatctcggagcttaacaaatctactacactcaatatcaggaggttcagctacaaagagaacggtcgacctgtcactttacacagctttccagatattcctggcctgaaagagctagaactagtcaacttaaacatccaaaaactgtcagatgggattggtcactttgagttcctagaaaatctggatctcagcggaaatgattttgagaatttaccagaagatatgaatagactttcccgattgaaaactctctgtctccgaaactgcagcaaactcaaggaattgccagagctaactcaggtgcagtcactcactctttctaactgtaagaacctcagatctttggtgaaaatctctgatgcaagtcaagatccaagcttatacagtttgcttgagctttgccttgacaactgcaagaatgtgaagtcattgtcagaccaggt

SEQ ID NO: 10230 - DNA, 1456 bp, Arabidopsis thaliana landsberg
aagaatggtgagttttgcaacacatgcaaaggatctcgaggaaaaccaaaaccaaaaccaaaacgatgaggaagaaaaggattctgtcacggagaaagcacaatcttcagctgaaaagcctgatactcttggagatgtgtccgacatatctgattctgtggatggttcggctgacattcttcagcctgatttagaagatagggatagtagttctgttctttgggatactgatgccttggaaattcatcctccatcatcagaagggagcagtagaggaagaggcatttcgatatctacacccaatggaattacagaaggaaagagtcattccactatggatgatagttcttcaacttgttctaatgattctatccgatcgggggtaaccaatgggtcctaccaagggaattccttgaatttccgaaaccagaagtcgccgaacaagtaagtttgtttcggctgtcctttgtttcttgtcagtcctgaatccttagtgatacgctttgtgacttgcagaggaaagaaccaacaagtgaaagcaatgactgatgcccacagtttagcgagtgaaacagatgatcaaccctcaacacttggaacagaccccaagggtcagaattattcttccgaggcaagcaacgttggtgaatctgattgggttgttgtctcccacatccaggagccagagggttctcgaaatcgtattcctgttgggagggttcgtcattcatgcttttaatgttttgaaattagaagatcgctgattgaattattggtttcgtgcaaaaaggtccagaatttcacaatttagttgtccctttttcaaattcattttgcaggaacgcaaaacggttcaatccattgtgaactcggtcgacatggatcgacctaaagagaaaagcactgctgtactttcttctcccagaaatgttgccaagaatccttcaccattaactcagacaaaaccggagaaaaagagcatttcaaccgcagacggtattccaaacaggaaagtactggcaactggaccaccttcatcaagccaagtagtgcttccttcagatattcagtcgcaaactgttggtctcagagctgatatgcaaaaactctctgctccaaaacaaccaccagcaacaactatatcaaggccttccagtgctccaataatccctgcgatgcgaccctccccaatcaccgtctcttcctcagttcaaacaacaacatcccttcctcgttcggttagctcagctggtcgtctaggtccagatccatccctacacaaccaacaaacatacactcctcaatcctataaaaacgctatagtcggtaactctcttggttcatcatcatctagtttcaaccaccacccaagctctcatggagttgtcccgacccacattgccatcatcatcttactgccaaagcacccaacatcattttttatcagtacaagctt

SEQ ID NO: 10231 - DNA, 560 bp, Arabidopsis thaliana landsberg
tgtttgtgttgcctctctagtgtttgatataaagtctcatcttttgttttcagaaacaatatccattccttatgagttttgtcatcaattactgacagaaaatattgttttcccgagagtgagggtgtgacatttgaagaaccccaaaggtcttcatgaatgtatcctaaaacatcttcagtatcatatctccccacattgaaacttagcttctttgactttcccataatatagtgctcatagaagctcagttccttaacatctttcttatccagaagacctttcccagacaatattttcatgttgtttaggcttaaatgtccaagcctgctatgccaaagtgctgtgtttcctgtttctttctctgcaacacagctctcttcaatcactgtttcacctttcagaacgtacaatccattctttaaactttcacatagagcagtgacatcattcttgaagtatctcactctgcctttcccacctttatgactaacaccaagtttatctaacgctcctggtgagattagatttctctaagttctggtacatacttgacacta

SEQ ID NO: 10232 - DNA, 1899 bp, Arabidopsis thaliana landsberg
gaaagagtagcgtttatgcgatcaagcacatagcttccacctaatgttccaattattccgcatatgattgtagtccctccaaaaatcatgtccgcgtttttcattttgtagataccaaaaccggcttttggtccccaatatgagtaagctccaatcacaaagttgtaggtgatgtaaccaagaacatttacaataaatactttctcgctgaaaagagcctttaagtcttttccaaataggacaaccaggttcttggatctgccccaaaaagaagtatattagtatatatagttgtcttttacatagacagtaacaaagaagagaggatagcgaaactcacttgggggttttggttttaatttgtgaagcttctgcatctgtaggagcagccgtttcaatagatgtagagggtttcttagaatccttatcagcaaaacctatacgcaaagaagagggacattttagtcaaaaattggcaaaacatccagaagggattatgcaatgttgattaaaaagcatctagtatcaccttttagctgctgcggtggtttgatacagaaggacaaaatgacgaagacagccattgcgattgcctctatgtaaaacgcccaacgccatcctaaatggtttccaatctgaacaggtaaagcaaatagattataaaaacattttcctcagaagcaaaaaacttgcacccatagaaagagttaagcaaacttacgtatccaccaaacacatagcctagagcaactcctgctggtatacacatgtagaacagtccaagccagaaatttttctggaaagaaagacaaaaaaaacaatcagaagtaagtaaactagcaaaaaattaagactaataacaacagaattgaaaactaacccttgcaacaggagcactatcatcgatataaggtgctgcaagactaataaaggaagcctcaccaaccccaacaaacctataggcaaagttacaaaagaaaagattgttagttaatatacagaaaccagagtgaaaaaagcgaaaacatggaattgtaaataaagcactcacattcggaaaacagcaatcatccagaagttgtaggaaaacccgcaaccgataacagcaatagtccaaacagttaatccaacaccgattagtttaaaagggttgaatctgcatgaaagtatagaaagacagagataatcaaaacattgattcttaagtacacaccaaaaaacaagaacacaaatatatgaaactgttgataaaaattaaacctttttgacaatccagcgaatattggagaagccacaagaagtccaaccataaacgcagatgacaaaagaccatcttcaaagttagttaagttaaactctcccctgtatcaacagacacacacaaagtctaagtctttctcataaaactataaacataattattcttaaaatcaaaattcagaacaaaaaaacttactgaattccagttcctgcagagcaaacccctttggcatcacatacttttgagcttccattaacaccattactcgcgatcactcctggatcaacgtaatttatcaagttaatgatacacaagattgtcacgaatctacaacataaaaagccctcaagagttagaatcgcttagtcaaaaaaaaaccacaaagctaggcaaatcacttatctaaacatgacacaaccctaaaacactaaatctttgccttactttttggaaatcgggagtcacccaattcatagattttgttttgtcatacaatcacgcttaaatcgttttcacaaaccagagagagagagaaagagatcacaatcgtcatcaacttccaaaaaccaccaaagaaataaacaaaagttctgattttttaccttcccggagtcaaaaaacgttttttagtcgccggc

SEQ ID NO: 10233 - DNA, 1197 bp, Arabidopsis thaliana landsberg
tttgggcattaggtccaaaaccggtatttttcttaaccaacctttaccccttattctttggtttgggtaaccaaattttttttaaaaggctttcttttttgaccattagttaagaaaattggatttaaggaacctggacctctgcaggggcttccaatatggataaatatgggggtttcatcttagcattttttcattcaaggataaaatgagtttaaattcattataaaggaatcttagatcaacccaaacggagcagacttttaaaaaggaatcaaatcattcaaacatgtttctctctcagtggtcaggattgaatttgacagactccttgtagataagctcctttatgtgttcttctgtgcaagaaggatgttcgaaatcaaagctgaaaggagtcgaacagaccggttctttggccacatcatggtgcggtgataggtaagcatggccaagggcttcatcgactacacacacaacacatgcaggtctaattgataagccaaaagcaaactgcaaaaaaccacatgaatgttttaaggatctttgtgttgtttgttacctgagatgcgccggttaggatcaaagacgagcattctctcaagcaaatcgatagccgtagtgggcattttcgggaatctagcagcaaactgttgtttcgggtatcgcggaagttgcctgacgtatcttcttgcgttgtcactgcgaaggaagccgaggctggaattgtctggagagcctacaagctaatatcaagaaatggatattaagtgaaatcagaattgggcattgcagtttaagaaaagtgtaaaactgatgctttttttactttactggtatacctctgttataagcctaagctgatgaacataatctttgcctggaaacaacggttgtcccgtcatgatttcgccgagtatgcagccaacagaccaaatatcaatagctgcggtgtactctgagcagttaagaagcaactcaggagccctgtaccaacgggtaacgacatattcagtcatgaagtctgtgtcggaagttgttcttgcaagcccaaaatcaccaatctttagctcgtttttcgagttaagtagcacgttgcttggccttagatcacgatgtaatatgttggccgagtgcacgtatttgagccctcttagagctggtatctaggacatgtacaggaagcaagtaatagat

SEQ ID NO: 10234 - DNA, 1505 bp, Arabidopsis thaliana landsberg
taaggtgctgcagagaatttatcttaatctagagaggttaaagacgatagtttggctagcaagattcaggacaagttgaaaatcattgtgagttatcttctttaatacgtacgtagaaaaggtgttaatgatttagtcattaagcatgagttatgtttaatttaggttgcagggggagatggaacagctggttggctccttggagttgtttctgatcttaatttatccaatccacctccaattgctacggttcctttaggtaccggtaacaaccttccatttgcatttggatgggtatgtatatatacactgatgatcactcaaatcatattatatctcatagaatatgtttcttcttactaaatctcatcatcttcagggtaagaaaaatcctggaacagataggtcttcggtggagtcttttttgggtaaagtgatcaatgcaaaagagatgaagatagacaagtatatattcaattacacatatatcattctctttcaattttcatatgttatactttgtttttggattgatatatgtatgcattttatatcttaatcaagttggaagatacttatgaggatgaagcatccaaaggaaggctcttgtgatattactcttaagctaccacattctcttcctcgtattttcccatcagatcaagaaaatatggtaagatatttttcttcttttgcgcatcatctctttcttttattcttatatgatcagcattattcttttcaaattttcaggaaggttaccatacatatcgtgggggattctggaattacttcagcttgggtaacattttttgctctttacgttccacgttgtgttaggtgtgagataaatgatatctaaacatcatgtcaatgatatttgaaacttggattataaattaattgtatgaattgtcatgttcagtacttccactggttggttgtatttgtggaagatacaagctaatccctaatcaaattttactgcaggaatggatgctcaagtatcttatgcatttcattcccagagaaaactgcacccggaaaggtttaaaaatcagctagttaatcaggtttgcattacctttgctcttaaagttttttttttatgttgtcttcaattgatgtggctctaatgtttacattagtgggacagttgtacaatatatttcacgtgactaaattacactaatatgtaatgtttccattgatttcatgaccttccagagcacatatctaaagcttagttgcacacaaggatggttttttgcctctctttttcacccttcttcacagtgagtatatttttattttcttatccattctttccaatttcgcttgccactcattaaaattagacgtcatcttatagtttcgatgtaacttgatttcatgtgtatataattttgctctcaattgaatctatgccgtttgctgcagaaacatagctaaacttgcaaaaattcaaaattgggatagaaatggccaatggaatgatcttcata

SEQ ID NO: 10235 - DNA, 1602 bp, Arabidopsis thaliana landsberg
  unsure (1)..(1602): unsure at all n locations
gatcaacttctatcttcccattcatgtttatgcttcagtggaagctatgattctcatttgtctgcttttcttcctctgtttctttttccctttcagtatcaatgtttttcccggacccttccccattgtcgttgactaagtggacatcatcatcgctcaaattctcattataggaaaccttctgcttgctacggactgacatccgaggctgctctcctccattggaccctgaatcttgtgctgccgtagtatcattatttacatcatcttctgactcactgctactttcactgtcagagctttcgctacattcagccacattcttcctcttcctcttcccattgtgttttgcagtagaacccggcatagggaaactcgccttgctagaggaaacagtgggaggattttctgtacgcttgtgtggttcactgcaagccctttggtctgggaatttgctctgctgtgggaagcaataagtagtctgagatgggcctttcgcctgtggtgcactctgcaaaggttcttcaaaagcagtgaaacgttttttacaagtctcacaagtgacttccttgttgacatgtgcccgatcatattcatacctcacccggcagaagacacaagaggtcccaaaggttttaaggtgagtgaaagcagctggttgggcttgagctttctggaaaggatgcctgatttcgggtctcaactcagtgaagatgtttctcgtattgacgcttgcccgaaaatgaggttgtgtgtgataattcggcatctgttggttatatggcggtgctgcaggctttctccaagttttgcgtttattgtcatgaagcgtccttttctctctgtccaaaagaatcctctgggcttcaccaatcaatttaaaagcagattcagcaccggggagcttatttttgtcagggtggagaagaagcgcaagcctcttgtactgtttcttgatgataacatcattagcgatctgctcaacctgaagaataccataccaatccatctcagttccaaacaacttctccgttgcagcacagtgaacatcacaaaccattatcatacgagatatgttctccaggctggaatccattttttgagccttcattgcaagcttacgagcagcagtaaaatcggtctttttcatcaaaccctccgcaagatctttggctctaagagcctcatctctgttgatactcattatcaatccagtacaagtatcatagaacccccaacccagagaaagtagtaaaaatgaccttgtccaattccacttttgctctgatcctgctacagaaagaaataaaacttgtgtcagtgtggtacaactttaacttgaaggatcattgctaaggcaaaacgtggatgcaatatcaataaatatgattctacactcgcaatatagaaagaaaaaaaacatgttaaaaaggtataacctttggagattaattagaacaaatgttccttttatggcataccaggactgaggaaacaaaattgaaaatttggaaaagccaaaaccctaaaaatgtggttacggtctccgccaataccccttttggtcggaaggaatttaagccaattaaaaaanaaccggaa

SEQ ID NO: 10236 - DNA, 1321 bp, Arabidopsis thaliana landsberg
tagttaaacgacgtgttctgtatctacgttttttcatgataatatagcactaaattctgggagttgatataagttttgaactctgggaagtggtgttctgtatctacgttttttcatgataatatagcactaaattctgggagttgatataagttttaaactctttgaagtggtgtgcaattaatttggacgtcatgttctttttttgtcatgtgtaacaatccaacttcacattcattgatagaaaattttctctgtataaactagtaggtttctgtgaaccaataaatttcgcctgttaggagtaattcagttgatgtacacatgtaattgataccttatgtaactaacattataggtttctttcgtttcaaggtctttctagagaaataacctaattcttattttttctaacagctgaagtctcatttatgcatttgtaggtgaaaccactaaaagagcttactttcaattcgcacaatataatagctacaatgacatctcgacaattccaagttatgctggatgtgttgaccaaccttctctttgcaaggcttccaaagtaagtattaaaacctgaataaagttaaaagggtaacccacacttttcatgccaattttgtccattttcttttgcgtcttgctgtaatcagcttgaaataaacataagtaattttttgaatccatgtcactgatgtttagaatccatgtcagtgcagttcgctgatgattagggttaagcttcaaatacatttttctctctgtctatttttgaacattttctagcattgaggagatccttttatgatccaggcctcggaaaagtagtctccaatgtcccacggaagatgaagatgttgaagaggggctgatgaggtagttccgtatggagttgaagaagtggaacttgcaaaaatcaaccttgaagagaaagagcgggagcgaaagttgcttcttgatgatattaggaaattgtctccttgttcggacaacatggatgacacacatatcgaaagggaaggtgaattgtggatgattagtaccagaagatccatactggtaagactctacagaaagaagtatgtttagatgctaaattatgatgatagtgtgaagtaaaagtagctaacctctaaattagccattaatctttcacatcgccacccactcacacccaattgaatcaaaaggaagagacggcattcaaactttagttctttgatggtataacgtactctttatgactctttcgttattataaaacataaattcattaactaatgggcgctgggcatgcagctattcagttgggatttgtgtt

SEQ ID NO: 10237 - DNA, 999 bp, Arabidopsis thaliana landsberg
catgaagccggaggatatggataacttgagcatgggaataagatcaagaaaagcagcagtgctacagccggtccaagtatgcgggcaccaccctccaaacacatatacaaactcggctatggccaccgaccatgagcttatattaagccctagaagcgcaccatggatccccatccccatcacgcttacgcaccaccacgtggccgcaatgtccaagaccaaggctagggtcgaaagaatgcctatgatggcgtttttcatctgcgcttggaggtacatttgcattgtcatggtgaacacgatgctgtagagataaggaatgacccatgggtaaatctcgtctactgtctcggagatcacaacgttttggcctaataaccggagaatgggacccgctaagacgatgaaagggacgaagagagttgcaataaaggtatctactatccaagaacgttgtaagtatatccccatcatgtggtattgttctgctccgtatgcttgtccacataacgtctctgtcgcacttgacatacctgcctgtaataataatattaccatgcaattcatattctctaccatataattggttatgagttgaaaatacaataaacactcattcattacattatatcagaaagaaaaaaaaatcattcattactttttcatatagctttctgcttaaatgttaaaaacagtgtgaaaccacaacatattactattagtaccaaaaagtctttagcgagaacaaaatatctatttttgtaatgaattttttgttggacgaaaattatagtactattgttttaacatataatatatgatggatcgtaccataataccgtagatgaagcgaatgaaagtgctttgaaggagagcataagcagcgagacccgtttcactggagtggccaatgaaggcttgagccaccactacgcatccaaacgacataactctgaacaaagttgatggtaaagctattcttcacatctttcttacttc

SEQ ID NO: 10238 - DNA, 1338 bp, Arabidopsis thaliana landsberg
gatcatccagctcatcctcattaattgttttggccagagcctccaaaaacacagcaactcaggttaagataaatcctgaaaaacttaatcgtatgaaatacagactatctcttttcctattaccctaagtgcaatctgcttcagacggctgaatttcacaagctgacgcatattgttaagaacagatatgtctattggaacctattaggcctcacctccttctttcacccatgaatgtgctacaaaccaaatccataagttgagtaacttataagttaaccaaaaataatggaaatatatggcatttgcttgtgcataacatacatagcgcttgagctgctgttaaccgtgcccgaggctccttaactaacaacttcgtcacgaaatctttggcaccgttgctaatggttggccatgggacttctctgaaatcaggttttttcctcatgacctgttttttcatgtcaatagtatccatgaacaaacagattatatagattggattgttttctcaagaagatgagtactagacctcattgaatattccgtcttgagtcttatcccagaagggtcttctcccgcagagcagaatgtaagtgatgacaccaatactccaaacgtctgattcaggtcctgacctacgtttcaacacttcaggtgcaacgtagtatgcgcttcctactatatcctgaaattttactcctgccgttttcacaaaatcacctccattatctaccattctgctctcagagacaagacttgacaagtgaaacttttacctggctttatgaagtccgacagaccaaaatctgtagcctttagagatgaaccttcttcggttgatttgaacagaaaattctgagagggtaagggatcataactcttcttaaagtgatgaagatgctttcacatatggatttgcaatttccaagcattgaatcaaactgaatcgtacctacctctggcttcatgtcgcggtgaactagacctcgtaaatgacattcagctgcaactttcagcatttgtctcaccacaaccgctgcatctttctcggtgtaacggctatctttcctggaaaatatatacacataagttgacttgatgtaacttcccatcttttcttacagaattttagcattacttctatgttaatacaaagttttgttaatcttacttagctagtattcgatctagcaattcaccaccgtcacataacctgggaaaagaaaaactcatcaaaaccagaagtaattcatttttcttgtgatacaagaaaaagaatgatagtaaaaacagagacaaacttgagacttactcccatgacatgtaaatataggt

SEQ ID NO: 10239 - DNA, 1361 bp, Arabidopsis thaliana landsberg
acaacggtctttgaagtagctaaatcttctaaccgttgccatgtcctttcccgtggcgctttaacctttgttgtattcactgcttctacttggaatttggctaaacactcgtcgaaaagaacttggtcaatctcgcataatactttcctcacgtttatagtcagactttgaactgcttggttccaatgtccacgcgtgtttctctcaagagctgggaagactataggcattatcactttatggttctgagtgatcaggtttcttatgtgatcgttgttccatagaaacaatgctgtttcagcaacctgacaaacaaaaagtacaacttcatatataggtacaagactttatcaagagagatagatatgaagttgtgatgatagtcaaagactcgaacctgaaaatgtgaactgttgaggcatcgagcaatttgtcgggataatggaaccatacaacgttgaaactcagcggcttgagttgcttccaagacttcttctaactctccaagaaacataacttcctttgagctgttagtcacaggccaatattttaaaagacctctaataacggtatcagcgagcttgaagtccttttctacaaactgaacaatgcaatacgaaagctgttggtgatagactgatgaacatttaggcttgtggagaggaatcaaggctcgcaaaaggaagagcttgtgctcttcttttaaaggcaaagcaaaaccattaattatacttccaagaatctctagcaactccgcaatgccattatgcttttcagtctcggatatgaatctgtagaagatattgtttatcgcctttctgatgtaaggtcgatgcaccatgaacttcccgtacacccgatgcagaatagtttttagatattccctctctctttgatcttcagaatcaaacaagtctaagagcttcaagacaaaagaatggtcaatatatctcttggcaagctttgcatcagtcatgggagaagccacgaatctgagaagaatctcatacacaacttgaacatgaggccaagctggctccaaagaaggttcttcatcatccatatcatgtatttcaagaattttactctcgtgattcgcagaaggaaaagttctaaacagattaaccgctaccatcttcgttaactcttgcatcgaaacatcgttaaacttaaaaccaactgatgcaacataatcaacaagctcaagcaatgtctgcctcttaatctctttctccttaaggttcttagacggatcactaaagtcaaaaacaacacagcacatactcaacttcccgataaagagattcggtttctccgatataggaacatctctaaagctaggcaaagcctcataaacccca

SEQ ID NO: 10240 - DNA, 601 bp, Arabidopsis thaliana landsberg
  unsure (1)..(601): unsure at all n locations
tctgcattattgcgagactatctgaacaacttatcgagagtcgcacctgaaaatgtgaactgttgaggcatctagcgatttgacgaaataaaggaaccatacatcgctgaaactcagctgcttgagttgcttccaaaacttcttccaactctccaagaaacataacttcctttgaactattagtcacaggccaatactttagaagtcctctaatgaccgtatcagcaagcttgaagtctttctctacaaactgaacaatgcaataagaaagctgttgatgataagcagatgcacatttaggtctgtggagtggaatcaatgcccggattaggaagagcttatgctcttcttttaacggtaaagcgaaaccgttgattatacttcctagtatctcaagcaactctgcaataccgttatgcttttcggtttcaaaaatgaatctgtagaagatattgttcgatcgcctttctgataaagggtcggtgcaccatgaatntcccgtatatccgatgaagaaatggtcttagatattccctctctctctggtcttcagagtcaaacaaatccaagagcttcaagacanatgaatggtcaatatatc

SEQ ID NO: 10241 - DNA, 1160 bp, Arabidopsis thaliana landsberg
tctaaggaacaccattgagttggagaaacaccttttacctattctccaagtaacaaaaccattccattcatataataaagtttatgcaccaatagaaaaaatctatctaattaaatctgctttttttgctctcgatttactaggcaaatgaagtggatctctacgtaaacggacatgatcattgcttacagcacataagcagcgtggacaggtagaataaaattactgattagttcgttaattattttcttattaatcaattattgtaacgtaagggtccacgtacgggaggatataaaatgtcaccatttttggttgcatatagtaccatacaatttatgacaagtggaggtggatccaaggcctgaaaaggaggtgacgtgaactacgttgaaccagaagagatgaggttttactacgacggacaaggtttcatgtcggttcacgtttcagaagctgaactgcgtgtagtcttttatgatgtttttggacacgttctgcatcattggaagaagacttacaaggaggcgctttatttcgcttcttgattccaatttaatcggacgtaattgtttatgatcgatgtactatgaaattatcaatatcgtacttcgtcgaattttcgaatcacattatgatatgacaagaacatatcagcagcatcagaaaaaaaagtcaatgaaatctttattgcgtaaaagtacagtttcaaacaagatattattgaaaatttgtaagatgtgagattaactagaaatactgcatgcatatactgtatatacatatcgaatctaagcatattaaaatgtaaatatcatcctctcttacgcttccatattaattaagttaattaattttcgttattcttatccaatttgattaacaagttttcccgaagcatgcgtgcatacagtactcttgtgtagtttgtagggacacaaaatgggtccgattctcatctataaagatagataatgattttgttacatgtcttttgtcctgtgctcagattctcttcaatcatgtaatatatatagataagttatagtgaattatggattatatgataagataaatgatatacaactctatgttgtggatgagattctgtcacataatttcacaagccccggatctctcatatttgatcgcaagatcac

SEQ ID NO: 10242 - DNA, 973 bp, Arabidopsis thaliana landsberg
atttgattaatcatagttctaattaattcttgaatatgtttatttttgtatcatcaataggtcggaggtccaagatatgatgtgaaggttggtcgaagagattccaccaacgcgtttagggctatcgcagacagggatctccccaacttcagggctagcctcaacgatctctctgaactcttccttcgaaaaggactcaacacaagagacctcgtcgctctctcaggtcagtcaccccgtaaaacacacttttggtcactaatttcttgccatttaaaacctttcttgtgacacaagttaaccctatttacaggagctcacacattagggcaagctcaatgcctcacgttcaaaggtaggctttacgataactcgagtgacattgacgcgggattctccagtacccgtaagcgtcgttgtccggtcaacggtggagatacgactctagcacctttagatcaagtgacaccaaactcgttcgacaataactattacagaaacttgatgcagaagaaaggacttttagaaagcgatcaagttttgttcggaaccggagcttctacagatagtatagtgacggagtacagcagaaatccatcacgatttgcgtctgatttctcagctgcattgatcaaaatgggagatattcagacactcactggttcagatggacaaatccgaagaatctgcagtgccgttaattaaaagagttattacctacttgtcttcaacgagaaaagttcgaaccttgaaaatccatgttattatatttacgtgtataccccatttgattcatttttcgaattgagtgtaactaaaatccctgcagcgataattcgtttgttatttgaatatatggaataataaatattttggaatatattaaggcaccaaaggaagtgttaataattaaatccatagcattttttattagtgtcgtcattgcaaaattagtcacaacctttctatagtt

SEQ ID NO: 10243 - DNA, 1441 bp, Arabidopsis thaliana landsberg
aggtatgatcttgcttacttacacaaacttttatatgatagaactgtgattattctgcgacttaaatgctgacagacaaagagctatcgatatacctaaggatgatgttagaaaagacctcttcaaagctcggcctcttaacaataaggtatagtgtttactttctcatgttgcatatgcttacctaagtttttcacactaatagatacactcatagagggttcatttctattaaacagatactttcaagtggacgagagattggcatgttcacaaaaagcaagcgagaaactacagctcccttggtatgtcagtctatgaattatttctttactctatatatgtctctgtagatgtttcctacaatagactcaaactgttcttacactcaaacacaggggtttagttttcactcggaaaggaaggctcaaccagatttgccaaccgaccttttcagtaaggttcgttttgcgcttccctaacattctattttcctcaatggttttaacttgtgattgtttctctttgtaccctagttatctgatgaacccttttacagctctctttatcatccgaactccggccaaacaatggttctcgcttaagatttcctcagcctgagcaagtaaaggtgcaacttgtgatttcatttcatttgactatacgtaccagctttataatcttatcgagttttaaatcgttttcttggcataagggctcaaaggaaaatagattgaactcctttcaagcagggaatgaagtaagttattgattcaagcttgcttctgctactagacagtcacagtttcttttatcattgattgatagtaaatacattacagagaacaagcaagtttatgggaaaaccgatggtacaacccggtgtagttcctgaaactagccggcaatggacttctcggagtggtaagctcgaagcagcggtgcaactaaattaacaggtaatatacaaaagaagactagtattttccttcctatattagtgcttcttttatagccttggggatcatttttgttttcgatttcgcaggagcttaggtgttctagctgatcgtagaaaagaaaaaccttagttatatgagtcatctccattttttgtacatttaagacttggttctcgtaggtgacaactattcaagaaaaaaggttaacattatgaagaactaaaaatatctagtctcacaagtggtgtggtgtgacattgtggtcaatgggttacttttggcaaaggaaaatgtatattgtggatactcatttcttgacatgaatgatatacaaaaaatttcttgatatgaatgatatacaaaacaaacatctcatgggtttttgacttatcatgtaaatgttaggctctgtgatttatgcaatgaatgaataaacggaggatataagaataaaggtactatgcccggagttgattgag

SEQ ID NO: 10244 - DNA, 1160 bp, Arabidopsis thaliana landsberg
cccccaactcgtacaatgtttcctctaacttgatgtccttttcttaattagcattttattaatcttccattaaattattaatcaagttttaagactgtttgttaattatagtcttttattgtgcttccttcactaattttgaggtttatttattactaatctaccagtagctgattcaacgcctgtggtattcgtttaatcgagttttcataactacttgtttggttttattatattgactagttgtatgtatattctagttgcattgagaatatcaagtagtatcttcttctatgtaaattatatgtaaatattcgtttgatgttgacttcttagattaaagaaaattaaagacgcgtgaactttattttcagattgagtgtatatatatccgttagttacattcttcaataatgtgtttacacactattttatgatacgataaatatcaggacttgaatagttttcaacatgataacgtctcccaatagcttaactaagatttcaaaatcatacatgcaccaaccaaacaaagatgattgttacttgacatattgaccatagtttcaaagaaatagaagctgacaagtacgtgaacagataggcgatgatgacaactttttaagcatcttagatttcttgttatgatcggtgggtttagatgagaaagttgcttcttcgaaaaatttgcgtttcttaagatgaatgcagctacttgtttctcttcttttgttccataatattgtatccattcgagagtttcaagactcgataaaattgaacttggttcattccagcgcggttgtggttcaccatcccgaatatggtactggtaaagttttagagccgaggtaagtctgattttttttctttttttgtagttttagcttcgtttgtgaaaaatttccaataaattttgactcgtctttaaataatggtggtttctacacatgacttcacatcttcactgtttagacagaagaggattgctctaaacaaaaggctaatgaagatgtatgagctagaaatttgtgtgatcaattctcggttttttcatgcgctcattaacttatgtgccctactaccacataaactgaatctgagagaattgaaactaattcgatcccctacattacactaatagttagcacttaccaaga

SEQ ID NO: 10245 - DNA, 915 bp, Arabidopsis thaliana landsberg
ctctagggtttaaaatcttttggccattgctttaatatcttccgatgtaacaacaatagtttctcttttccaacaactgatagaaccacgttttcctctttcgtttaagagttttaatcgtgaagatattgcagctctatcagttgttgggaaagaaaaactcttagttttacatcaggattttcatgatttttatttttcttctggttttattgatgttcctttgttcgagcttagtcaattattcaagttgtttctatttattgatgtaatggttttttaatatatataatgaatttcatggtaaagccatttagacattatgattgccaaagtacttgaaagatcctaaagggtttctaacctacctcggtctacaggtttgtgcattctgcttagtctgtctcatcactttagccattggtgttcatgggtcttagatctttgtttttcttagctactcatttacatggttgttgtttcaggtcaagggagacttcgtgtgtctgaactgcaatgaattgcgtcatccattcagcagtttggaagctgtccgaaagcatatatactttttagtagactatactaaacggttttggtgataataatgtattagcttttaaccaaaaaaaaataaaaataaaaatattgtacgtattactaacaaatacggctaattcacaacacttctacctttaaaatcctgaggataagctctgcgaaaatccgaagctagcaaatacaaattgagttttgcaatgccatcgtttctatgaagaagccaaaaagggtttggtactaagtgaagaagacctaagggctgtcttagtctgtcttgtgttcctgtgtaaatggctagtattttgtatctgaagttagcttgaatcttaactggaatgaatctcacataaacca

SEQ ID NO: 10246 - DNA, 524 bp, Arabidopsis thaliana landsberg
  unsure (1)..(524): unsure at all n locations
tgtcatgggatttgtcatgggtggatcttttttgccaccacttgatttgttttcacaaaacaaattcattttcctatctctatgtcacaaacacttcgttttggcaaatcaaaatatctttcaaaactagttttgatcaaaacccagaaactcccccttttcccataatcaaatttctcccccacaagagagtagtttttgcaataagagggttctaatcaaaaaccaagtatacttacactaaaattttgaaaaattcataagtggtagctggtcgatttnnnnnnnnnnnnnnnnnnnnnnnnnnnnnnnnnngcaccaaaacagaagaactagtggccttttaaccccattgtctcacaaaaattgtaacgaagagccaaagacaaagagagatcacaatagtgacttggaacaaaggtcattgataccggaatgcaatggaagccttttctttgttcacatccacctttttccctttcatccatatgtgagactgtattataagcactcaagtaaaaaca

SEQ ID NO: 10247 - DNA, 1206 bp, Arabidopsis thaliana landsberg
  unsure (1)..(1206): unsure at all n locations
ggatagagactagttaagatttagagcgaatttggtttggggttggattgattgggaaagcaaagaaccgaagggattgagacggtttatatcaaatgagccggttaagactttggttttcggatagacttgagatgacgtcgttgcattatgttgttgttatgtttcttttcttcgttctgttgattgttttgtactcttgtttctctcctctgtacccaagaatatttttgatactgatttgccaagaggtatcttcgatcggtttgaatcttaggaactcgtaaagtgatgtgtgttataagaactcagaactgagatttaacttcaacattaaataccagtgatccaacaatgggtaacatgagatatcacaaaatccatacctaaaaatatgataggaatttatgtttttatttctctaaagcgggattttactgcctagcagtcttcatggagagccataaccggaaaaaatggttgagtatcatcacacgattctcccttgagatcttttaccgcactttgtttatagtataaaaatgcattgcctgactgatcgccgaacaaaactgcgttctcagtcaaaccaaaaccccgaggaaattccttagccgagcaagagagatttccaagtaacaatacacagtctcccaaatcaccgacctcaacccatttaccagccttctcatctaccctcctcactctacgagctaaccgactaaagtctattacaacatcatttgggatgattacctcaaccaggaaaagttcatctttgccatatggaaccagagaccgtaattctcgcgggtcctgaggtgaggacaacagaagagtcacctccagcgaataaggatcgataacgacgatttgtcctgaaagaaaaagtgcataaaatctgcctctaaaagtgactatatcaacgcatatagtatatgggacgttctcaagctgcttccacctcatttcagcacttgttaacaccagcaaagtgtcagagacttcgagaagcacaacaaattctcctcttcttccctccttgtctagccgaagaaaagtcgcgcgattatattcccaaccgatcattctgtacttatggcccaaagggatgatcttttttggaatagatgctgggatcttcacgttcactaaacattgaagagcatcgganagctgatcatccaccatatcaggagatgggac

SEQ ID NO: 10248 - DNA, 998 bp, Arabidopsis thaliana landsberg
tgatcaaacttgatttgagaataaagttcaaggacgtcgtcacttggtgattggggcaacagtgaccccaatctgatagagctcgggactagcttttccatggaaccctaccactttgtgaccttccttcccgagtatgaagctaacgccagcatccattccataaggtggggaggttcgtttattggtcttgaacttaagcgtgactattactgaagattcactaccaaacactttatcataataaccctctaccgctgtgatgtattcactcggatagtccaactcgaactgtgaaagcggttcatcagaataacaataacacaactttatagttatagtttaagaaaatagcaacgaagtatagtataattaatcacctcttcgtatccaagcaaagtatgctttccatgctcttctcctagtaccaactggttgttcttgtcatacacaaacttgacagatgcgataccattctcaccttgtcccacgtatatctttctcacaccgtcgaaagctccatcgtcccatgattctcctccgtcaccacctgatccttgtagtttctccgtgggaggaggtggaggaataggaggcgcaccaaaatgtgcacctagagcatcaatagcccaacaacaccttccatggagcccaacaagagccctacctttgctctcaaacacgaaagttcgctcgctcttacgtccatatgtaggagatgttctgtcttttgatgtcttgaaactcaacgacctaactcggtttgtattgccagagactttgtcacaggtcacttctattgatgtaatatattcatatggatagtccactacaaactgcaaaaaacaaataaagggatccttcaatttatatattttaaaaaattgaagggttaacgaatggtttatgattcttcccatatatgatttactcttgacatattcctttctattaaagatttagcatttttaccaaaaaaaactaaaattataagaagt

SEQ ID NO: 10249 - DNA, 512 bp, Arabidopsis thaliana landsberg
  unsure (1)..(512): unsure at all n locations
caacagttcgctgcctaagttgtcatgctatgtttaacttttctgcctcccattacttttttaattcgaatgactaatcttaggcaaagtgtgacataattagacacagaccaaacagaccctcggccagtaaggatttagaggacaggaatggagacaatcctttcacttatagtgatgatgaggctgatgccaaaattcaagacggggagcagctggtgaccagtcatagtgataaggcagaggtgctccggtccttttattcagatctgattggtacagggcagcaaagatccagaactgtcaaccttgacaccttagaactgcagcacactgaccttcaggggctcgagcagccaatctcagaggaggaggcgtggaataccatcaagcagctttctccggacaaggcctccgggcctgatgggttcacaggctcgttctataaggtctgctggtcaatcatcaaaaaagacannnnnnnnnnnnnnnnnnnnnnnnnnnnnnnggac

SEQ ID NO: 10250 - DNA, 1435 bp, Arabidopsis thaliana landsberg
tattgcccaaaaagagtcgtaatcaggttttggaaccgtcctcaacgtcactttgtcacacaaccgtgactaatctttcacttcccgaagtactcgtgaatgtgcccacgcctaaccatgaatttgcttgtgccaagaagctatatattgccttcaagtgtttgtagagaaaaagtcgaattatctttacaatctttatgttcatttgtgagtgtctttccttttcatttacaaaactttagatctttgaatctcacctttgtactatgtttttcgtttgtctctgaatgaatgaaaatcaagtcttcgcacgcacaaaaaaaaggcgtagtaagatatatagaaattatacaaaatgaaataggtttatttagtgtaagaagaaaacaaagaaatgaagcttaattgaagaacaccaaacttagttaatcttagattgatatcatgaaatgatgaacaaggacagttgcataaagttgcaactcccaaaattagctacattggattattggttcttaacttcttataacaacatagtttttatgaatctaaacttgctataaaaactcaaattaggtgggtttatgaatttttaatgagataatagttggacttcttatgtggaattctctcataattaacactaacattatttttaactctactaattttttcaagatcctccactgctctcaaataatatcaaacacacaaaaaaagagagaactaatttaacttgtttcagtcttaattcggagtagacatgagactcacaagttgttggttataagaaaaaaaaaaactcacgttgacaaaatcaattcagctggttaagtttggtttagttcggtttgttcttgggttagaatttttgttttgggacacgtctactccaatttgacttttcataaaacgacaccgtaaaatcaccattaagcgttgtggttcttctcaaagcagaatcgcagatcgtctccggagagacgacaacgagaatcacaaagccatggagttggaattccggcgtcgcgactatggagctacacataaatctcaatttcttcctcggtcacaaactcaaaagcatcctctttcctctacacttgcttctcgtgaccaacaggtctgcgatacgatcccttagaggagcgttcactagctatatcaattcccacatttttgttcccttatccaattcattagtcttctctgaattcctagtgattagagtaaaaaacttcaatatattgtttgattattactgctgaatttgatggcttttgatttttagttcttgaagaggattgatgcataataagacttgaaaaaattgatttataaaatatatatgtaggctaaaactgtcagaggtcgcgatcttcacttctttgatccattgaggggcttggatgtgaatgcttctgctgaagagaat

SEQ ID NO: 10251 - DNA, 513 bp, Arabidopsis thaliana landsberg
taatcaatataaaaatagtggccaggcttgggagttcaaacagctaaacatccattcatgggaagcatttgccaagggacaggacatgcatatgcaagcggctccttcccaagctgaattgctctataagagctttcaggttgcaaaggagaaactgaaatctcagacaaaggacacaatcatggacaagtacgggaatgcagctacagaagatgaaattccaatggagcttttacttgggcaaagcgaaaggcaagttgagtatgaccgagcagggaggattataaaaggacaggtatggtttctgatggtttccttcttgagtcagttgcctgtagcattcttattgtgatatgaacagctatgatacgtttattttgtgtggatctgtttcattcttaacgtgtttgttgtgtacaggaggtgatattgccaaagagtaaatatgaagaagatgttcatgctaacaatcacactagtgtgtggggatcatattggaaagatcatcaatgg

SEQ ID NO: 10252 - DNA, 460 bp, Arabidopsis thaliana landsberg
  unsure (1)..(460): unsure at all n locations
tacccgtacccgtcaaaaaaatgcgacacagggggttacccgtataagttcgagggtctataattttacccatacccatacccgcacgagtaattttacccgtcgggttacccatacccgctagaaaagtctaaaataataatgtacaaatcactcaaaatgtcaaacaaacacataaaaaatacgttcaacttaaaatacaataaaccatatggtttacataacttgataggtaaacaaataataactggagaagtattttcttttagttaagttgactttaattatatagtaaatagtgatatgatacgagtatatttacccacgggtacacggatatacccatacatgtacctgtctacccgacggatagaggttctcgcccattagcataccaacgggtaaagaaatcatgccatacccgcctttatattgggtaaacccatcangtattcgagtt

SEQ ID NO: 10253 - DNA, 596 bp, Arabidopsis thaliana landsberg
  unsure (1)..(596): unsure at all n locations
tgacaccatgttacattggtttnnnnnnnnnnnnnnnnnnnnnnnnnnnnnnnnnnngaggggaagataatggggtgatggggaactgatattcctgaagatttggagttgaacgaggaggcacttgctaatgctcttaaaaaggtaaagagtctcattcattctcttgcacagacgtttctttgtcctgcagttttatcttaagcacttgtgtttttttgttttgcacaggaggatctcagtaggagggaagagaaagatgagaggaaacgcaaatacaatgtcaaatacaacaacgatgtaatgatcatctaaaccaatcttaacactctaataacattttgtctcatattcttgatttagtgttgattaatcaaaatctctcatttcatcgcaggtgactccggaagagatggaagcttacagaatgaagagagttcaccatgaggatccaatgaaagatttcctctgaaagaagttggctttcattcccttttaccatgtaacctgaagaacaagcttataatgttacttgtagtagtagcggtaggattttgacattaaagctctgtggaagtttgctactactggtacta

SEQ ID NO: 10254 - DNA, 1525 bp, Arabidopsis thaliana landsberg
  unsure (1)..(1525): unsure at all n locations
taaaaaactctctaacaataatttaaaaactttcatttatttactttttagaatttgaatgaagtcattaaaatttcttgtaaattaagaatcaaagacaccccctaaattggtcactaaaaatcatgcaagccgtttgcgaaaagtaagccgctcaaaaactagaacaatgtacaatttacattttttcgtatattaagaacacataaaacattcaaagatgcattaattcagatatacagaacgtaaaaatgctattgtcgattaccttagagattccaacaatgatgatacatacaaagcgtgtgttggaaacgatacacaataatcaaattgcggcatcccggtacaaatcaatcttggtacgcctaaccaaccctaatcaaaccacggtttaatcacttaactgctatgcaatttaagggaagcaaatgtggaaattaaagacaacacaaacatatatgttagcatttagcagctttcggtgaaagaatcaacttttcatcttctttttagcttggtaaaggaggagcctctcttgttggtgagcttgtgctaggagattcgaaactcgggtttccagggcaagacttagcaaattggcaataccgacatttccaacgttcttcttcaggagtgtacccagcttctcgttcatttctccagaactcaatgacttctctatatttgctcatcacccattcatgatcatggttgaatctaatttcagctattatagattggtccttctgaaactcgtacctgaggcaaaattttccactcaactacaatcagatgatcagagatatattaatgtattctataacatcaagaacaagccatctctacttactttagtaatagttgattatttgctatcggaagcatctgaaaagtgttttcatagtacctaactatctcttcaagtgtctgcaccaagttaaaactagtaagaaaatatcaatacaaccccatttcgaagtgagtaattctctcttcataaacacataaactttggtttagtgaaagatatattgtacacagtcaaagataagtatacctgagctttgatacctgcattagcaatgtgatctctgacatcttgggataagacataattgcgattcaaagaaaagtagtcgaaaaaaggtcccgttggaaacccttctttcacaatagtgtcccatagaagcttgtaaagcattagctgaagcctgtcaaatatagttaattcaaggacattaacacaaaactcccacgtattaaaccaaaaccaaaaatgaccaacgtttttcttaactctatcaaacacttaccttccattccttctctgtggctcagctggaagtgtatcacggagtcgagtctttgtatctatcaatattggtccgctatcagaagactcttctgcatacgcctttctaagctcgtcaataattcccacaatccattgacctccaacaaatcctaagctntacaaggtaaaatgccacatatttaaagtctcatttgatgtatgctacaa

SEQ ID NO: 10255 - DNA, 1695 bp, Arabidopsis thaliana landsberg
ccaacattctgatccgaaactacatcgtcaagaacacctatatgtgccatgttgcttgtactagcgttaaagacttacaaaggtccatcattaactggagacctgctaacatattgcattgcttaaaaagcaaaattatgattgcacatgactattccccttggatgaataacgattgatgcgtaccattgttgatccgttgccgtagccacccggggatatggtacataacacacttgatcagcctatgcagccaaaataaaaggatcatatattccataagcctttgcagagttaacatcaacaatcccttatttgtttactcttttaccctttccgatggttgaatcataccaatcacatttgaaaagcacagtttaaagaccatatggtcctggaaaatgaagctctaaaatctctctcaaaactccatagaaatcatgttcagttgagccataagatgattcactttttacagaaactctatagttagcatttttcttgtccttcccatagtcatatatgtgaaataaatatccacgacagaagtacatagaccaactagtaacttttgtcatcggaccatggacgagtgattgtaaccattttggatataaactatcacccaagtattctccagcttatttaataaataaaaaaaattacattagcaaaataatcataaattataaccttctttaaaataacagtaatttcttacatatttttgtaaccaacttacaaattctttttctctcgacaaggttagatcgtcttcacttaagtctgggctagcaaccaccatgctttcatcaaacgacatatattaaaacattaataatttagaaccataacatttactctctaattaaaatataaagtatctctttcacgaacctttcaaaagactttaacaattttttctccacagttcaaaagaatatatgtatgtgcaatgttgtagtctttatcttgaaaccaaaactccttcgctttaccactacatcttccatgttgagaaaatatttctggaatttcaccaaacgagtatggagattgctcttctccatcataatgtcgcattttttttgaccttttgtcttgatgtatggctcaaaataataactaccaaatgtagaaatttcttcattgatgtattgttctacaatggaactttctacttttgccttatttttcacctttctctttaagtgacccatatatcgttcgaacggatacatccatctaaattgtactggtcctcctactcgagcttcgtatggaagatgaattggtaaatgctccatgacatcaaaaaaagatggaggaaaaatcttctccaaattacaaagaactatacaaatgttcttttccaactttgcaatgttgtctttgtgtaacgttcttgcacataaatcacgaaaaataagctaattcctgaagaacaacaaattaatgcagtagcaaatgttaagcacaggctgtataaattaatgcactagcaacaattagtccaaaaaattaatgcactaacgttaaacagagactataaattaatgcacatattatatgatcataaagtacaggacatcaattcgtaatactatcatacataaactagcaaaatataaaaatgaaaaacaaaaggattaaaaacagagcacattccacaaaacagagcaccaattacgaatc

SEQ ID NO: 10256 - DNA, 1161 bp, Arabidopsis thaliana landsberg
gtctgactctatatcctcgtctgatgatcaaatcttaatttaatcaggaggattaaaacaagagaggaaaagaaaagataataattaagtcaagattcgtataccaaggccgtatctaaaattggcatcacgcacgaatgaatattacaccaaacgtgacgcaattgaattcctcgttacgtatagtaatcgtatatttccttaattatacgaatacgatgtcgtatcggggcagaactggtcctgcaagaaccaaaaactctcctcgtcagtccacatgttgtccccaccaacacagccccaatcgttgaactctccgaaacccgtttgacccgacggatcataacctgacccgttcaccaccccacctcgaacgtccgaaaacgtctcagccggagaattcgaagacgttgctgacaattccgtagccggtacgaattgctgatgatgattctggctgaattgaacgaaacccggctcgaccggactcggttcgttaactggttgacttgggtcggtgatcattgactccacttgttcacacgtggtgggtaatgattgggcgttgattcgttccactaatctcggcatccaaacatttctcatagtctccttgaaaagattactgttaacatcgcatcttaggtgtttggcttgcttttggactcgagttctccaataattctttatttcattatctgttcttcccggtagatattgcgcaatcttcgaccaccttatatattcaattgaaaaaaaagacatatattaataacatacttaactagtaacatatagaatagcaaaatattaacatttgagatatatagtgtgtacctattgccccaaagagaatggagtttgaggatcataaattgttcttcgagagtgatgttgcctcttctaacatctggacgtaagtaattaagccatcttaatctacaactcttaccagttcgctttagccctgcacatatatgagtaaaatatatataagtttatctatatataaagcctttgtgtatatgtatatttagagattgatgttttgatgataccagaggaacgagcgatgtggttccaacgagcatcgccatggatagagacgaagttgactaggattgcatcttcttcctcggtccatggaccttaccgtgcatc

SEQ ID NO: 10257 - DNA, 1280 bp, Arabidopsis thaliana landsberg
cgtgagattcaattgtaagcgaagaacttaaagagtaggaggaggaaataaaatctgtcattttcattcttcacaatgttgacatccaataatctgtacgttgattggccaacatttcaagtaagtttttaacgtgtggaagaatatacaatttctccttgtggttttagatgtagttgacatgcatgaaatgaaattaaagatggacgcgttaattaaaaaaaaatcagcaagttaactcacgacattggtaacaaactctgaggtttcctataaattccatctcactcagtctcataacacatatattttatttaaagaaaataaacttagcgcataagaaaaatatcattagagaagagaaaaaatggagggaattacaagtttcgaaaatcttcctgaagaactaaaaagggagattctgttacggatgtctcccaattcccttgtgacatgtagccgcgtctcgaagaaattggcatctatgatccgtacgaaaagcttcaaagaactctacctgagccgatcgatgagatgcccccgagtgttgttcgccgccaatggtacaataacacctcatgtgttgtttacctcgtttcaagaaaaggagaaaccactcttgtcttctggagaacaacggatcatcacctctcttcaaggagaatttctgttttctccacccgtccgtgggttgatctgccttgtagaacgagaatcagctcgaattgtgatatgcaatcccggtacgacaaaatttctggctttaccaatcgtcgaagcagatgaaacaacgaggatcataactcatttaggatacgatgaacagaaggatgtattcaaggtgttatgtacaaggacaaagcccgaaactccacatcttgttttgacggtgggatcgggtaaagaaccttggcgagagatagagtatgcaaatttccgcacacagtaattggtgctggagtattttacagaggaactttatactatcttggtgcttttcactcaaaaagtatcataatgaccttcgacgtcaggtctgaaacttttatgcccattgcatcacctcatggagtcgatttgaataaaggttcctgaagacttgtcaataacagtcaacaggggggatttgcgttagtgaatgaatcaagaggtttcgtttacccatcgaatggcggcaatgcttatcttgaaaggtgggtttggaatgtcgatacaagaaaatggtcgatgaactccatcctgattcgtaaatggaaagattatgctcaagacaatgaaga

SEQ ID NO: 10258 - DNA, 589 bp, Arabidopsis thaliana landsberg
attcagtgggattgttctttcgtattcgcttctattgtccttgttaatctttatttatgatgttgctaaataataataatgttgcctctcaagtactggtcttattgggattgctagttttcatttctatataatttagttaaactttatttatgctatataataatgttttcattctggtattagtgggattggtggtaaatgattgttcagctctttgtagcttgtgcgaaatgatcgttcgtctttcactcagatggaactttcattagagagccttttgatgaaacaaaagttttattaagttttataggtcagcctcagtactcaacccaaaaagttgtaaaatctattaagataacagaggaggaactaggtcaaatcttttggcacaaaagagtactatttacacacttgtatagacatattactcttctgttttacaactagcaggaatttgaccaaaagactgaacaaatgtttcaaatccaataaaggacttatctacgactaataccatgcaacatacatattttcttattcacatccattcataataggtgtcttggccaatgtttcccctttcatg

SEQ ID NO: 10259 - DNA, 628 bp, Arabidopsis thaliana landsberg
acagagaaacataattattgaaagttgtttttttgttttgaaaagtaataattatagaaagttacctcaactgggttaagtcttctaaggaagaacatatcagcagtttcagggacaccattaaaatttcttccaatctttctacaagcaccagaatctctaagacaagaactaattttaccccaatagctatcatcagagactcgatctttcaaccaaccagagtaatcttcaagataatagtcaagataaccccggttaagcacggttcgaccggatcctttatcggtaaccgcgtaagcgaagatgatgaaacctatgagagcagcgatgatgagaagcatgactactaggtatagccacataaggaacttgttacggtaacaagctccagcgaatccagctaaagatacgaccatgattgagattccgatgacgatgagaggccactggaggaatcttaaacagtcggtggagttagctcggctgcttaaccatattccaccgccgaggattggtattgagaggagaaaagtgaggaagttgactaaacctatgagatggttacttgttctcatagcttagggttttgaggttttcctgagctttgtttcttgtgcaaaaagac

SEQ ID NO: 10260 - DNA, 1052 bp, Arabidopsis thaliana landsberg
tagatctaagcattcaaggttgtgtggtgcctgatggcttttgttgaaggggaggttttctactttgtatcagacttttgcttgctagtgaaagagagaataatgggcacaacatttttgttactccatgggaaagataatgtagagtggtctcaaggaaaaaatggtgtggagagtggtcaagggacttggattgccaaacattgtgtttcagtttggtggtgtacaatgttggatcacccctatggtcgtaaagtgcagatttcgcagagctttccaagggaatcatagaatcgtcaacggagttgtgtttcgaaccaaaggatgtatatttcgttccactttcttcttgcactctgctacagtaacacatggatttgtatgctctcatgggagtgtacaaactcctagtgattggtgtttttatttgtcctttggaatgcttaaagaatgatatacaacagcaggaagaaatcatagcacattcattacaaaaccaatggaaaatacatactttttgttgaggtcgtatcagaaacatgacaatcaaaaggcagagccggtgttgttggattttcgaagcatcatatctttggcttcattaatcttagaagccagatagtgactgcctccagcgtccgggtgattgatgtaagtcttaggtctaagacatgagtaatagaggaaagagttgtataagtatatgtgaaagaatgtgtaataagatttaacaatgtacaagttaagcaaagcgtttcccttgttgtctctgtagaacaaagaaactaaatctgtgtgagagatagagatgaagagaactaacctgagaggttagaagtgggaaaagaaaaccaacacaatgatcaatgtgattttaatcttttattcagattttaattattaaactttttataaatacatctaaatctaataaactgttttttttgtctcatcaacaaacaagtcaatttatttaaatcaataaataacaaagttaatcaatttattgcgtaaaatgtatttctaaatttctttaaaaagaagaaaaaagt

SEQ ID NO: 10261 - DNA, 1338 bp, Arabidopsis thaliana landsberg
agaggatacagatgtgagatttagtcacattataatggttttcgacttttcgttctgaaggagagcttttggcttttatataaatttcattggtttttaaggcacattatgggaaccgattcaccggattaaataccgaggaacattagaagactcttggtacacatcctcagaatcaactgaactaactctatctgtcttactaaataatacaaatctcatccatctaagaaactatcttctgatagcaaaagatgatgccaaaaacctacctaattctaaactctctaaaaccaaacaaaattaataacaagtactaggaattgaaatttacatccgggggctgctgctccgacgcatcgtctgctggttggctaacaagcttcgagtgttcatcggccgagttgatggaaaactcagctagtgaactaactgcaacagacattccatggcagagaaccttcacagcaacctctgcaagtttctcagcagtcatcacaacatcttcttctcccttatcagccactacaagctccatgctttctgacccggagtatctccttgacccgcttccactccagtttggatcttccctaacttgccttgcatatattgaacccatccctgaggcaaagaactcaagtttgtccaaaactggtttttcattcaagctgttaagcaaccttgaccattgaatgcagactcggtatatcgggtgaagacatgaggataatctaactttttcggggtcaggatcacatctgaaacatcttagaagccaaccagataatgctttcatgtaggatctctgagaggtgatccagaattcaaaacaggttctccagtttcgaagctgagcttcaagattcaaagcagattgagctaatctttgagagttaatagcctctggcattattggaggttgtctcttcttgtgacgctttgaaaccggtgtgcctgcaagtaacagtttggcttcgtctagtgttcgtttctgtatctggtgacttatccgccattactttccacatccttgttaatctgttatgatcatgattaccatttgtcagtctgaggcttaaaagcgaaaccgaagagaaggaaaaagaagttgttggtgttgttacccttcaacgagctcaagaagctgaggctacagctcttggtcatgaagagtctcgatttcttttggagatggatatcattggagtgttttgacaccttgatctgagtatctggatctctgattgtagcccttagcttatcaaccggaggcggatcatatcctttcccgtcctgagtcctcagttgcttacaatttgtttcattatgctttta

SEQ ID NO: 10262 - DNA, 1021 bp, Arabidopsis thaliana landsberg
tatttgatcagttttaaagaaatcaaactcttgttcaactttatatcaacccttcacatgagtgaccagtccttgttcggttctaaaacagagtcctccttactctgtttgtaactttcacttataccatttgagcagagaaagcgaaaatgggggagaaggagtggtacttcttcacactaagagaccgtaaatacccaacgggactgagaacgaacagagcaacagaagctggttactggaaagccactggtaaagacagagagatcaaaagctcaaagacaaaatcacttctcgggatgaagaaaactcttgtcttttacaaaggcagagctcctaaaggagagaagagttgttgggtcatgcatgagtatcgccttgacggcaaattctcttaccattacatttcctcctccgctaaggtaaagtattaaatctctatatatcaatccacttttctcatacatattataatcaaaatatgttttcttttacactaggatgaatgggttctctgtaaagtttgtctgaaaagcggcgtagttagtagagagacgaacttgatctcttcttcttcttcttctgccgtcaccggagagttctcctctgccggttctgcaattgctccgatcatcaatacctttgcgacggagcacgtgtcctgtttctccaataactctgctgctcataccgatgcgagctttcatacattccttcccgctccaccgccgtcactgcccccacgtcagccacgtcacgtcggtgatggcgtggcgtttggtcagtttctggatttgggatcatcgggacagattgatttcgatgcagcagcagcagcgttctttccgaatctaccttctctgccttccacggttcttcctcctcctccgtcatttgcaatgtacggtggaggctcccccgccgtgagtgtgtggccgtttactctctgatcgccatgcggtcattaaactatctttactatcttttaatctaagagaaaaactaccttgggttgcttaat

SEQ ID NO: 10263 - DNA, 447 bp, Arabidopsis thaliana landsberg
  unsure (1)..(447): unsure at all n locations
ccaaaatcgaaatcttcccgtaaaaagaagataaatgtgcaatgttgtgcaatatatgttaaaattctcgcctttgataatgtattcatcaagaatacaaaagagataaaaatttcaccccgtttttacacaatctttaaataacgagcatttgtaggatctaggacaccggctagatggagggtgaattgacaattttaactaaaatgaaagacactagagaaatttaatcaataagacaatagatataaattctctagctatgacaagtaagcaatctatgagaaacacttatggcaatgctagagatgagagacaatacacacattactaactacttgctaagtaataagtaaagagtgaaaagaatgacaccgaattttatcccatggnatcgntgatttgcccatccccctatccacgttaggtggactttaagctcccact

SEQ ID NO: 10264 - DNA, 1529 bp, Arabidopsis thaliana landsberg
catcatggacaacctacagagaaggccaccatatactctattagtttcttaaaatgttttattacaatttaaaatgattaagatgttgaacttgcctggtcataagcacgctgcatgaaagacgaatagattgcacagaagggtttaaggccttcacaggctaaacccgcagcaaaagtaactgcgtgttgttccgctattcctacatcgaaacatcttgttgggaagcgacgttgaaagagatttaacccggttccacctcccatggctgcatgaatcgcaaccacatctttgtctacctctgcttctgcgactaatgcctccgcaaagtaagttgtgtaagattgagtcttattagtagttttgaactgtctacccgttgctggatcaaatttcacaacacctgaaagaaaaataatcaatatatatatcccactgcttaggaactagagaaaacgttatctatctaacttgttttaccatggtatttgtcatcagctctctccgcgtaaggataaccacgacctttctccgtcaccacatgaataagtacaggtcctgtggttctggtactcttaacttctttaagaatggctaccaaatcatctatgttgtgcccatcaactggaccaatatagtaaagaccgagttcttcaaacagtgacgatccagtcccgcttatcattcgtcgagcatactcatctaccttagccgccaactgatgcattggtccgcctatttgctttgtcataccctatacgcaagaaaagccaaaattctcatcaagtccataaagaccagtattctttaccattctagaaaagaaatgcaataaacttgcctttgcgacttctctcaactctctgagagccgggttagactgtaaccgactaagagcactgctcaatgcaccaacaggtggacttggtccatccaaagtagctgtaggtaatgagacttgcttgttgtcattaagaatcacaatcatatcagagtctagatatccggcgttgttcatggcttcataagcctgtcctgccgtcatcgcaccatcaccaatcacagcaaccacattgttgttcttccccttcaaatcccttcctaccgccattcctgtaaaactcatatatctgattcagttctgttttcttattacagtttactgtctaaacacaacaacacaaggcaaacacaccaaaggaatgattgattgtattacctaaaccagcagatattgtggttgagctgtgtccagtaccaaagcaatcatgttcactctctcctcgtttggtgaaaccagagagaccattggtttgcctcattgtaggcatctttcctcttctcccagtaagaatcttatgaggataagactgatgaccaacatcccaaagaatcttgtcttgtggagtattgaaaatgtaatgaagagccacagtaagctccacaacaccaagacttgaccccaaatgtccaccggttttcgacacattaaagatcacgtctgatctcagctcatcagaaagttgtta

SEQ ID NO: 10265 - DNA, 918 bp, Arabidopsis thaliana landsberg
catcaccatcctctactgggctttacctctcgctcctcaagcccaccttttcgctaagtccctcgttgcttcacagcctcgaatccgtctccttgcgttgcctgatgttcaaaaccctcgcacattggaactcttctttaaagctcccgaagcttatattcttgagtccaccaagaaaacagttcctttagtcaaggaagctctctccactctagtttcttcacgtaaagaatccggtccggttcgtgtagtcggtttggttatcgatttcttctgtgttccaatgatcgaagtggcaaacgagcttaaccttccttcttatatattcctaacgtgtaacgctggttttttaagtatgatgaagtatctccctgagagacatcgcataaccacttctgagctagatttaagctccggcaacgtagaacatccaattcctggctacgtctgctccgtgccgacgaaggttttgcctccaggtctattcgtgagagagtcctacgaggcttgggtcgagattgcagagaagttccctggagccaagggcattttggtaaactcagtcacatgtcttgagcagaatgcatttgattacttcgctcgtcttgatgagaactatcctccggtttacccggtcggaccggttcttagtttgaaggatcgtccgtctccaaatctggacgcatcggaccgggatcggatcatgagatggctcgaggaccagccggagtcgtcaattgtgtatatctgcttcggaagcctcggaatcattggcaagccgcagattgaagagatagctgaagccttggaactcaccggccacaggtttctttggtcaatacgtacaaataaaacggagaaagcgagcccgtacgttctgttgccggagggatttctgatgggacggccagaaaggat

SEQ ID NO: 10266 - DNA, 1051 bp, Arabidopsis thaliana landsberg
ttcgctacaaaacatgtgaacaaggcatgtcatactaaaatgtagcttttaaattgttgacaacactgtcgtcgagtttgaactcaagttatgatacatgacaaccgttttacagtataaatcactaggttgcatgtttccgtcgtatgctgaaatgtatttttagttttgaaaaaaaaatgtatagatcttttacatgaatttgaaatcggaacatattgagaaaaatgttaaaaagttagtcaatggtgtcagggaaagtggtgataacttctttaatttcgcaagcatgttgtactcggatgggcatagtctcatctttttgtaaggatgatatgagatttgcattaagaaacaatatacactagctaataatattctgcaatacaattttctacgacatatttttatgtaattttattgtttctaaactcaaatctcatagcatcttacaaaacgatgtcatgcatgttaagaaaaaagaaaaaaaagaacttgagaattaatgtggttgcgatatgtcaactattttaagtttttaactaattgtacacttcaaagaataaataggagatattttttcattcgagtttaatcaaattatgctgtgtagcaaactagcaatcttagatgtaaagattcaattggggtaaactcagtgttttgttctttaatagaaatatatctagaatgaagattttttggtaggaaataattgaataattgttagaggaacaaactgaattagatatagattttgtagaataaattataaaacgttgtaaagttagttttaatttgttttgtcagttattactttttcaaaacactaaaccgtaaaagctgaatgaatcgcaatcacgtttttcaaaaatgaaaacatgaatgagatatatactctctctatttcttattattttattatttagaaaaaaattgttttaagaaaattaattttttaaattttgtatgcaatattaattggttattaatgatgaatatcaaccttcaaataaataatttaatttattgggttagaattataaaaaat

SEQ ID NO: 10267 - DNA, 1315 bp, Arabidopsis thaliana landsberg
gacgtctctcggggctagtactaacacaagccattgcaattttcaacacggcgatgacctcttcttcaatctctgttaacattatgcaccaaataacgatccaaaatgtctgacatctctttcttctcatcgatacacatttgtatccacttgactatctccatttccgatttacccacgaaaacaatcggtaatcttcccgttatcatctctagcaagatcactccgaatgagtatacatcccatttctgtgatggcttcactgttgctttagtggcttcaggagccagataaaatgagctcaagtttgcagatgatccaatcgatgaggcggtcttgttggatggtcggtcaactgtagttgattccaatgttccagcaatgctagagaggtgcataagtccgaaatccgagatatgaggctccatatcctgtcccaacagtatattgctgagtttcagagatccatgaacatactttttaggactaaactcgtgaagatacaccagccctcttgagattcccctcattatctttaaccgaactccccaagacagaggcttgaatgacaccattccaggatttcctaagcatacacaaaaaccaaaattgagttttcaagacagagaaacgatatgagaagtattatcataaaggttttatagtttaccgtggagtgcattggtaaggcttccattaggaatgtagtcgtagatgagaagtttctcttcaactgaccaataataagctttaagactaacgatattcggatgccttagcttcccaattgcttcaacttctgtctgaaactccttgcatctttgggaacctccttctcccagtctcctaacagcgaccgttagaccatcttcgaggacaactttatacacaatcccgttcccgccttttccaagaacgaaagctgaagccttaagcagctcatctaaatccaaagccatatgtttatccaacagaacaagatcttgttgcggctcaagattttccgaagaaggggactctgatccatctcttctgaaacagaaggaacctttcttttctttcccttctttattcaacacatagccttccttatccacactattacgacgtgcacaaaatcttcaagtaacaacaagagaagagaaaatccacaatgcaaattccaatgaaaatcacaaaccacaattgctacaatagcaggtttacttaaaacctttccttctttgaccctactccaccttgctcgttgttatccggtacaaaagggtgaaaagctgaagaactatccgtattggcaaacaaggaatccttaaag

SEQ ID NO: 10268 - DNA, 520 bp, Arabidopsis thaliana landsberg
tcatgcttttgagtgctcaattaaaaggaattaagctagccaaataacaaaataaatagatatagaattatgcacctcatgatagagttcttgcatttttacctttgtactcaaaattttgagacaagtttaagtttgaaaggtataatttgtagcacccaaaatcctattttaaaaactacgaaaagttctccaaagatttctttttgaattaaatatcatacttaccttattcttgaagttaacatcccttgaaacaaatattgtttctaataaaagatttaataaaagtacccctatatgattttagttatccctctactgaaatagacatttataattattcttaaaaggatttttataaactagagattttaattcttaaaatacctattctctattttagcatgtatgaatttcatatttaaaatcatttgtttaaatagtataataaataaaataaattaagacaaatcatattaatgctggaatacttttgtttgtgcatttgtttttgaag

SEQ ID NO: 10269 - DNA, 1290 bp, Arabidopsis thaliana landsberg
  unsure (1)..(1290): unsure at all n locations
ataagataaggcggcaattaaaaaatatcaaaagaatacaaataacttacatgaagcagagtctgattgcgttgagaggcaaatcctcactctatcgtcaggtccccgaaaaaagccaattatatattattagggtgactttaaaaaaaacagagcagaaaatgacgattttaacctcggtggttcttacccggccatgccgttaaaaacgccggcgagactaatctccgtcgtctccaagcaactcaccaccgtcatccacagaaatataccaaatccaattaaatgcctaacgattatcaaaatctccacaaaatcaatttcgaaacttctataaaattacgaaaaaccccctttcgaaagaaatttaacgtacgtccaaatgttgagagtctcgttgtgccaagagaaagcactgagaaaagtatctttgagagaccattgacatcgataatggttgtgtataaactcgttgtccttcaaatactcaggcaagtcttcgaacttcatcaatctccttacgattctcgtctcttcgccgcaatctaaccctttccaatcggtaaccgtcaccatcgccggagatttcttcgccgctcttcgtctcttcatgctccggttagtttcgttttctctctagctgcggcgaatctgtgtccgtcgctatctctctgtgtttatatatggagacgaaacctctttgaatgtaattgagggatcgtgaccgtccacgtgtaagatagctctgacgtggatttttattagtggatgaagagattttgcttggtgtgaggttgagtacacgtgattaattgttttttcccgatgtgccaggttttttgaatcatagcgacaagtgggaagatgagaaaatgcataaagtgtgnnnnnnnnnnnnnnnnnnnntctaattacatatgcataacttaatctcaactatagtcaccaaccaaactacaacacctggacaaaactcataaaatttagattaatctagattaagtccctaagtcattcatttcatgtgtctttgtgtgattggttgcatggccaaattacatccaagaatttcttacaaccggaaaataagtcaaaaaacgtttcagttcctgagatagtcacagtcattctttttgcttgaatccttgataacacaaagaaaaaattactgttttatacaaattaaagcggaataaaactgatacataatacaaaaagctcatttacacatacatagctatcacatgttgaaatttaggaattaaaagagtatttaatgcattttcgaac

SEQ ID NO: 10270 - DNA, 605 bp, Arabidopsis thaliana landsberg
aaaaatgtatatttcaattaaaaatccaaaaacaggatagttttgattatctccctaaaaaaaagaatcaaatttagggctgtgttttaaaagcaaaatactacaacttataaggttgtgacgctaccaaagtttactatcacataattaattattaccaaacactagatatggcttttagtttcgacctagccgtcatcctccagcgggagagaagaagaacgaagaggagacgaaatttccggagctcctccgacaacagccacctcaaaactgtactactatcattgtcttctcgtcctgactcggacattacaatgtcttccagtgtaattgatcaagatttgaccatgccgggtatgaaaggctaccagatctctcacgtttttcgcggcttgatgtgcttggtaaaaaaaccaagtgcccaaatatacaataccacgactagacaacttgttgtcttacctgacataaaagaatccaccatcttagctgaagaacacaagagtaagaagatcatgtaccatatcggacacgatcccgtttatgatcaatataaagtggtttgcatagtttctagagctagtgacgaagttgaagagtac

SEQ ID NO: 10271 - DNA, 1326 bp, Arabidopsis thaliana landsberg
gctctccagagcccacgtaacacatacattttaccaaacacatgactcgtgataattctttctgcctacttatgctttgggtagggtttctaacccgaatccgatataacccgacccgaaacacgtgggctataaaaacccgacccaacagatctcatcatctccattctccacattttccaaggcttcagtttcacttcatcacactctctgcaaaaaaacaaaaatgagctctcaaatctgcagatctgcttccaaagcagccaaatctcttctctcttcagctaaaaatgctcgcttcttctctggtacgttcattatctcatctccgttagtgaatctctatagatgcttcgtgaaatcaattgattgattagtttttgaaatcgtttatcgaatttttagaaattgatataaatttgatgagattcgtgattcagtgattatttgatctgatggattcatttttgtaaggttagagaattatgcttttgtgtgttgttcttgaaagaaaaagaatatgaatttgggattctaatagttaagtatctaatcaaattagttttttaagatctgatgtttcttatttcttgatttggggatgattgattgttcagaaggacgagccattggtgctgcggcagcggctttcggcatcaggaaaaattcctttgtatgcatctaactttgcaagatcatcaggttctggtgttgcttctaagagttggatcactggactcttagctcttcctgctgcaggtttttttcagcctcattctttgaatatgtttgataatgtagccaaatcttaagttcagtcacatgttaatttgagtagaataggataaagttcgaatcttttagacttcattagtttaaaatgcggtgaaggattgaccgatgttttgttctattgtttctgttatagcttatatgattcaagatcaagaggttcttgctgctgaggtaacaatcgttattagtattcttgattttggtttatcggctctatgttcttcgtcgctgaacgtgtctgattcaatcagatggaacgaacttttattgctatcaagcctgatggtgtgcaaagaggactggtaataaaaaagaaaagctttgtttctgtttagtcttaattggtctcagttgttatagtttcttactcatatgtgcaaagactatctcagatatcagagatcatttctcgattcgaacgcaagggattcaagctagttggtatcaaccccattgttccctctaaagatttcgcacaaaagcaaaaccatgataaaaaggaaagacctatcttcaatggtatgtgtgact

SEQ ID NO: 10272 - DNA, 1326 bp, Arabidopsis thaliana landsberg
gtgtctttttcacactgtgcaaaaggatttcacagcacagactggtgatccaacttttacggtagctggtggagattcaatctacaagtaagttgctgttattttaccttttgatatgtggtctttgtatattttgattactcttttaccgtttgagtcatttaatgtgttgctttcccacctccttgttcgtgttttctctggtcaatgtttgaactttccttaaccaccttgtgcttgttatgttggatttccagatttctgtacggtgagcaggctcgttttttcaaagatgagattcatcttgatttaaaacattcaaagaccggcactgttgcaatggccagtggtggagagaatctcaatgcttcccaggtaagcttaatcatttttgcctgaattactaagtttatgaaatctcttgggaaaagaaatgttctggtgatcgatatgtcctcatgtgaacttttctattctcttttcagttctatttcacacttcgtgatgatttggactatcttgatgggaaacacactgtaagtgcaagataattaatgatctgcctaatctttctttggtatatatcggtcacctttgatatgccattttatgccatttttaggtgtttggacagattgctgaggggtttgacactttgactaggataaatgaagcttatgttgatccgaagaacagaccctataagaacattagaatcaagcacacacatatacttgatgatccatttgatgatcccccacagctggctgaaatgataccagatgcttcccctgaaggaaaaccgaaagaagaggtcaaagatgacgtgcggcttgaagatgattgggttccaatggatgaagaacttggtgctcaggaactggaggaggttatccgcgaaaaggcagcccattcaagtgctgttgtacttgaaagtgtaagtatcaccgattcaattgtcttgtagctttcttgatgttatatcaaatcatttttaatggaccttgtattgctgtgcagataggagatatccccgaggctgaggtaaaacctcctgacaatgtgctgttcgtctgcaaactgaatccagtgactgaggtaggtgtttgatatttgaaattcgaagcaaagccttcctctgtttgtgacatttttgttcttattttcttgtctcatgcaggatgaagacctccataccattttttcacgctttggaaccgttgtatcgtgagtgatagttccttgattccttattcgtttgagaaacttaattgatgcagttgtattgatcatcatgtattaatgtggcagggctgatgtaatccg

SEQ ID NO: 10273 - DNA, 651 bp, Arabidopsis thaliana landsberg
taaccgtttatacaaaaacactctcgatgtttttcttttagaaaatgttgctctacaattcatctaaatctttagcacgaaaattcatgtaaatcttcaacaaaaaaaaagaaccatggtccatctataggagataaacagtcaatgaataaaaaagtatttatctaattcaacatcttcaatgtagtcctcgcataaagaatgatatccaccataagcttaaaccaaaagatctttagatactactaaaataggcagtttactgtctcaataaaatggaaattttcatcacgacaaaaacacatattatataatccatcggctattgatacaagtagaagatgcaacatatagcatcagagaaaaacctgacacaacaagccccacatcctttttttagcaattcaaaaatttcaagaacacccccaaaaaggaataatcaaacgaaacaaaaaacaaaaacaactccgatgtttttatgttttaagttttaaaaactgataaacaaagaaaaagaaaacgctgcgcatccctctcagaaaataggaaaacaacacttagttttcggaccactcactgtccaagacctagcttcacctattccttcaccaccatcatcaaacacagaccaagaccaagaccctttcttac

SEQ ID NO: 10274 - DNA, 1255 bp, Arabidopsis thaliana landsberg
ctcttcatttttcactatttcctttaagctcaagactataagtacttctcctgatctctgaatcgctattttcctcccccaaacggattccgaaggctccccaacgaagttattctcctgaatcgctattctcctgacctctcgtcatggcattctaggcttggtcatccatctttaccaattcttaattctgttgtctctcaattttcgttaccactttcaaattcccagcaaaaacaatggtcgtgttccgattgtcttatcaataaaagtcacaaattacctccactcaacctcttgaatatctttataccgatgtgtggtcttctcccattatgtcaatggattcctacaagtattatctggtaattgtcgatcactttactagatatacatggttatatccactgaagcaaaaatcggaagtcaaagaagtgtttgttgctttcaaggcattagtggaaaaccggtttcagtgtagaatccgcaccctatattctgataatggtggtgaatttgtggccatgcgatcgtttttgacaacacacggcatctctcatcttacaacaccaccacacactcccgaacacaacgggatatcggagagaaagcatcgccatattgttgagactggccttactcttctcattcatgcctctgttccgaaatcatattggccttgatagagatcgccccacacatgtctgccgcttgaacaaagctctctatggtctaaaacaggcgcctcgggcatggtatcaagaactccgaaattatctccttgctgctggctttacgaactccttggctgacacatcgttattcatttacaagcgggcaaattcatatctttatgtcttggtgtatgtcgatgacataatcattaccggagatgcttcgcttgtcaaaaactttaatgtttctcttgcagatcgattctccttaaaggatcttggtgcattgcgctatttcttgggtattgaggcaacacgcactaagaaaggtctacacttgatgcaaaggaaatatataacagatcttttggctaagacgcacatgctagatgcaaaaccaatctctacgccaatggctacaacaccgaagctttcactacactctggtacgattctcgacgatgccaaagaataccgcatgatcattgggagtcttcaatatttgtctttcactcgcccagacattgctttcgtggtgaatcgtctctcccagttcatgcataaaccaaccgatgaacatt

SEQ ID NO: 10275 - DNA, 994 bp, Arabidopsis thaliana landsberg
atgtagaatagtgtccatagaatctcccgtgtctggatctttgtcttttctcagaccaggtgtagtaatacttcatggcatcttcaacctcaggggtgtagctgtgccttttcactctatggaaccgggaattttcttgaagtttaagtgctctgtcgtactgagtccttgtagcttcattagatagtaccttttgaaaaacaatacaggtaaagtgagtaagatttcatctattgatgttacattgaattccaagaacaacaacactctcatagaaggaaaaaaagacacttgagaaggaatactgacttcgtaggaacaacggacactcttgaatagctctccggctttagagtccttattaacatcaggatgaaactgcaatagtaacacaaggatacagtcacaaacataacccaaacaaagctaagggatacagagaacaggttattcattcagtatccaagtgagcaagagctaaattgaaatataagaatacagagaacaggttccaccaaactccagacacatgttgctaacttatacaaacacaagatttaaacttttctattacccaaatcatgttgctagaagaaattggtcgtgttctcaactacttctgatactggttgcaaatttcacatctttaacgcaacaatcaatcaaaccaaacgatgcaaaactagagaaatttactaaacgagcatttccttagttctttacctttcgagctagcaaacgataagctctcttgatgtcaccttgtgtggcgtttcgagcgatgcccaaaacagcgtaatgattctgcccgccggtattagaacttgaagaaaacgcagcactagtaatcgtcgttttcgagcgattacggtaactccgagatttgccgtcgcggtgccttcgacggtgagggaataggtctcgaccgatagggttagacgacggagggaggagatcgccggagaaggaggaggaagagaatcgacggtagccc

SEQ ID NO: 10276 - DNA, 1046 bp, Arabidopsis thaliana landsberg
caaataaaaacactatacatttattattcaagtgtgatgtgtgtatatactatatagtaagaatgcatatgtctctttaaaacaaaatttacacattaatttataattcacggctttcatgagtcctatcatgaacttcaacagttaaaaatatatcgacaaaaaataagagttacgatgatcaatttatgtggagatacaaaaggtaaattattgttgattatgaatgtggttcgtcattgtatcgtactctttctagaaaattaggtgattcatttgttaacaatatttaaaatagtccgtcgtgaataatgaatggtcatttacattttacggtagactataatatgtaattttgtatatatgatagaatcttgtaagaaatggtgatatataatatgactacggaataacacagttacacaagtcgtatggtggtcaatggtcatactagctcatatagtcaaattatcgaatttacaaaaatcgtgggctgataataaataaactaatatatagaggaactttttgtgaatttttataaaaggggcccttcctcttattgggccataaacaaatgggccttaaataagcgaaatgggtgactttgagaggttgagccatatctcatagatatgggtaacatggaatattatggtttaggagaacaatagatattagattgggagagaacattcgtcaaacgaactcaaatctcggcgaaatttaaattgaatagtgaatacgattaaactcgtttacctctattgatctgttacttaattatattatatattatatcgattaaacaatagatatttccggtttaattaattgacatatcgcaatagcatcagaatgatgcacattaaaataagaaaaaaacagttcactaagagattattatgggcttaatagtagagactattttagttgggcctgcgacagctgcgacggatctgcccattggacccggtgagtgggctgatgtcgcccatttttatcatcgccgctacaaaatctctgtagaatgcttggacactccg

SEQ ID NO: 10277 - DNA, 996 bp, Arabidopsis thaliana landsberg
agtgagaagagattctttgtagatttgacgatgagttcaagaattagaacctgtatgctcctgatcttgtttttcttccaaaaatgttatgtttctgcactcactaatgttttcgacggtacgtatatagatgatggttagggtttttctgatataagaatttctaaatcattgaattatttataacctagtgcagcttctgctttaagaggtatgaagaatgaatggaccaggtctccgaaaggttgggaaggctctgacccttgcggaaccaattgggttggaattacatgtaccaatgaccgcgtcgtgtcaatgtaacaacttttattttttatttttccagcttcttccatttaattctttgcagagttctaacgatatgatgttggttgcagatcactagttaaccacaatttggaaggaacgctttctgagtatattttagccttgtcagaattggaaatcttgtaagtctttttcttcatcttcccatacaagaaatggatgttgttctcatcatatgatccaatgttttagagatttatcattcaatattggattgactggaccacttccatccaacattggtgaccttaagaagttaaagaatttgtaagcaaacattatcatgcatgacccatttgtaacatcctttttctattgcatatcttaaactaactatctttcactctccaggatccttgtgggatgtggtcttagtggtcaaatccctgattctataggatctctagaacaaattataaatctgtaagattttgttgcttcaagttattataaatagtctatttttcaattgtagtctaaataaccattaaatcatcttcaatgtatttttctatttttatttattttaaaatagagtaaagtttctctctaatatattactttctttcttactctaaaatagttggccaagttgaaattcgagagtgtctctgccaatggagttactctaaatataaagcaatccta

SEQ ID NO: 10278 - DNA, 719 bp, Arabidopsis thaliana landsberg
ggttggttccgtttcgcataaccgtcggtgctgcacctgaccataaaccaagtatgctttcttctctcacgatggttctagcacaatgtattggtcctttgtacttgaaaagctcaggactcaatcctttctgctgctgaagtctaattttcaccacctggagataaaacagagaactcaacagtgttttacttgagtaaatgtaagcaaaatctgtgtcagactcaaaatgcttatgattatgatgaacacgattctccgaatcaagagttgccatgaacaatagggaccaaagagattcgttggccaaaagcatcaaaacagatctcaacaaatcattttttatctctttgactaaaatatactaaataattgatgaacagagatgattttctggtgcaagaataatctaacaatttcaattacaccaaatctttgactcaactaacactctgatgattaaactatagttttaaatcgattcataatctaataaaacattagagaagccatgtgatttcattgtctcgaaaaggcaacaagacttacctcaaagggtgtaacaatggcgagagcttcaagaacaccggcgccgaatccggaaagaaaacggccacgattgctgacctttccggtctcggaatccttaaaggcggtttgaaacatggcgttggatcccatccgaagcgtgtacttaagcgtgagatgagtagcgaacg

SEQ ID NO: 10279 - DNA, 1177 bp, Arabidopsis thaliana landsberg
aaaactaaaaaaaaaaaaaagtccattttaaaaaaaccaaaattcatggtaaaaaagaaaattgtttaccatgtaaaaatcaggggaaaaacattttcttatatatgtcagaaaatgttttccctgatttttacatgtaagtttgatttttacataaaaaggaaaacaaaatcctctcctttgaaacaaaaataatgtaagtttttgtaataacttgtttttccaggcatagattcatggcctggaaagcaaattcacagccacaattatagaattccagatcaatttaaagatcaggtaaacacaaaaaacaaaaatcagatctcatgatcattatatgaatctgtaatgaagtttgaatttattaggtggaagctcagtgagcggagtcgatataagcagagacatagtaaatgttacaaaagaagtccatatatcttcaagatcaactaaaccggaaacatacgaaaaactttccggttacgacaacttatggcttcactctaatgtaagaatcaaaatcatcatcaaccttatttatttggtcaaatcaaatccagaagattacttcttatcgacatgcattgcagattgaaactgtccgagaagatgattcggtggtatttaagaacggaaagacggtttacgctgatactattatgcactgcaccgggtgattgttcaatgctgcatataacttactaaacattggaacaaaatattacgcatatgaatgtctatttgaaacattttaatgagactttttgtatgagtaggtacaaatattacttcccatttctcgacacgaaaggcgaagtgaccgttgaggataaccgtgttggaccattatataagcatgttttcccaccagctctttctcccggactttcattcatcggattaccatggcaggttaatgatttttacaattgtgattagaatatgaagtaacaaactcttgatgtcaatcaacttattggtcaatgtttcggatatttataggtcattccttttccaatgtttgaactccaaaggaaatgggtagctgcggtttttgaccggtaggggtttcactcccctcactagaagagatgatggaagatactagaatgttttattcgaagctcgaagcctcatgtattcccaaaagatacacacatcttatggcagaattaga

SEQ ID NO: 10280 - DNA, 480 bp, Arabidopsis thaliana landsberg
ttgcagttttttgttgtttatgtttatggctcaatggtaattaacatgagcaacgagtctccggtttgatctccatttttctagtttttaaaagaacattgaattcaaaatagcaaaacaacgtcggtttagttgaaaatatgccacgttaatactcatgtgtcatcagacttagtaatcattagcattgactaatatttgttaacgttgactcataattatgcactatgtcaaaagttcaggtaggttttttgaaaattttaggtgtttagattaaatcagcactcgtaatttatttaggttgaaaaacacacttttttaatagttcagattgaaaaaggtctttctcccctgcaacatcagcctacacacctcaagcttctactcaacagtatggcggccagatactcttatgcaaacaaaggaaaaggtatcgctacagaacattcttcttcatcaagagacaacagacatcactcc

SEQ ID NO: 10281 - DNA, 910 bp, Arabidopsis thaliana landsberg
gatttctgactgaaaaagaaatttaagtcaatttgaggatatatattcattaatatttaatgcttttcatgtataaattatgagcttgtcatcttcctataaattaaggatcctaaatcttgtgtgtgttgaattactcattctctaccaaataagaggaatcaagtttactaaatatgttaaagaacctgaaagaaaaatagtgaactagtaaagaaaccaaattcttgatgaccacaatgagatcataaaagagttaaaaaaatctcctaaaatagcatgaaagtgggagggttctgttacattaacaatgttagaaggagctgagagatctagtatcaatccttaaatgtctgatttcaacattcccagggagaaatctacaataagatatgtacagcaatcacattttgtatgctgctgcttcaaagactaatagtgtatatcatccacgagtcaaatcaaaatcagtgagtgggtttctcctaatgtcaagtgatctgccagagcctgagcctgaaccgggccacccccttattccctgagaagagaagttctgtggcgtctgctgacccgcagatgctgctggttcagctgcactacccggtgtggtctccatttcactattgttgtcctcttcatttggttccttttcttgtctgatggtcttgttattgttattatgagtctttgcccttgctccgtatacaaaactacatgccaccacctgaataacaaacaagtttttcaaacactaccacatgatatcttgaagaggaaagaaagtgacagcacaaacatatcaaaggctaacattcgtagttagtttcgcctaattttagattcactttacaaccattaagaagaagaatttaatatacctgaacaaggctggctgcgataagcgtgt

SEQ ID NO: 10282 - DNA, 615 bp, Arabidopsis thaliana landsberg
ctagagacgatctcaactcggagcagtctcagatcgagagggtggctaggagcttgtgttggagaaaattggtgcagagagaggatcttgcggtttggcagaaacctaccaaccatgttcactgtaagcgcaatcggatagctttaggacgccctccgttctgccaccggacactacccgaccagggctggtatataagattactagacaagaggagatggtcttactagaaaggaagattttctatttgactagatcatggtttgttctgttttgggttttcaggtacactaagcttgaaacctgtttgacgccgttgccggaagtaacaggatctgagatcaaagaagtagcgggtggacagttggcgagatggcctgagagattgaatgctcttcctccgaggatcaaaagtggaagcttggaagggatcactgaggatgaatttgtcagcaacacagagaaatggcagagaagagtgtcttactacaagaaatatgaccaacagctagcggagacgggaagatacagaaactttctcgacatgaacgctcatcttggaggtttcgcctcagccttagtcgatgatcctgtatgggtcatgaatgttgtccc

SEQ ID NO: 10283 - DNA, 780 bp, Arabidopsis thaliana landsberg
ggatcacatctcagtttcaaattgttaagtcaaaagagcaacaaactcatcaatcttcttgtcggaactacctccttcagagatagcttcgcgagccaacaccttaagcttctcaacattcttcctcatctctttccctctctctccttccatgacctcaacaatgcatctcgcaatctcttctttactcgaaagcccttctccatcggtcctcactctaaccccaatcttccacacatcctctataaacttagcatttgtgggctgatcagtccactgaggcacgcccaccattggaacccctaagcatagtgcctccaatgtcgagttccatccacagtgtgacacgaaacacccgattgattcatgtgctaaaacctctagctgaggaacccacttagccacaagtccagagtctttctcctctgcctcttcgataaaaccagagggtagtttgcttctctcggattctctaacagaccacaagaagtgatatccggtttggctaatcgccattgcaatttccttcatctgtttttcgctcaaagccaccaatgtcccaaacgccacgtaaaccaccgacttcgccggcctgtttcccaaccacttcaaaacagactcgtctggctctgtcttggagttctcgagttcgtaatctttgtcttctggcaaccggttatccaagaacttcgatggaaccaccggtccaatgttcttcaccggccattgatcattcatccatttcactacctgtgaaagaaaaaacacgttccactaaaa

SEQ ID NO: 10284 - DNA, 1850 bp, Arabidopsis thaliana landsberg
gttgcttctttcagcttctaaagacaagacagttcggttatggagaactggttgtgatcaatgtcttcatgtcttccatcataacaactacggtaagtattttttgcatctcaagttgtttgttctgaaatctttgcaaaaacgtttgttaactcactcatgttgcttttgtctttcaaatacagtgacttgcgttgaattcaatcctgtaaataataacaacttcgcaagtgggtctatagatggaaaagctcgaatctggggtttgtcagaagaaagagttgtcgcttggaccgatgctcgtgattccatttctgcaatctcttaccaaccaaacggaaatgtaatttgacattctctgtctattctctactcaaaagatcatcctttctaaaaaaactcaactttgctctgtttttgcttcaggggtttgttgttggttgcatcactgggaactgtaggttctatcaaatcttagataacgatgtgataatggatgaacagattcttatccggggaaggaatagaatcaccgccgtggagttttgtcctggaagctccgagaaaattttagtatcttctgaagattcgaaagttcgaatatttgacaaaacacaaatgattcacaaattcaaaggtataaaaaaaaatctttgaatcttgattttacacttcttgaaatctgtgttttgattattttttttataaaaaaattcagctccatcgaattttgggagacaatcgtcggcgtcgtttgtttcttccaccggaaaacatattttatcagttagacgaggtgtcggagtttatctctggaacaacgatgcgtttccttcgaggaaaggcgcaaaatcgtcgcgttctttcgagtattttcattcgccgggggtttccgcggtggcggctcggactcaaccggaaacaaaagtgtcgaaagtagccggtgatgatgaagaatcacggcgcgttatgagaaaaatacagagctctgggagattgtctcgctcctgtcgtgttaccgccacgtggccggaggagaagctccttatgaatgtaggaagttacgatagtaaccttcccgtcggcgagtttgatcttgccgaggcgtggagactggtgatcgtgactgtgagcttggatgggatgattaggacattccataactatggactgccacgtacattttagagatcgataatctatttttgttttaaataggagaaaacaaaaattgattttttgtttggtttttgttttggtgtctaaatatatgtagattttctagtttctagtccttcgcttccaagttcctcgatggctcaatgccaatttagtcagataagattatgctgcaactgctagagcgactctctcctacttcattttagtccatactagttcattttatctccaagaaaatgactccgtttttcttcaaagctcaaagatgattctttttttaatgggccctcttgaaaaatgggtaaaatcttggtctttttacagatagcaaacatatacaaattatggagaaaacaggattatattgatgcagcttcgttgtagacagactagtagtcgttttcttcattttcccattcctttgctaaattattaaatccaacaaaagcaaattttcttgtgttgcttcataaaatctctgtggaatatctatatctacacactactgaagaccaagaagtaaacattagtttgcctgatcttcacctacctcaaacgagaagtagaagtttttatggtgacttttgtatatagagaaacaatgggattccagtttaagttagctctttttaactttgctaacatatgcctgaaagtggaagacaagg

SEQ ID NO: 10285 - DNA, 1196 bp, Arabidopsis thaliana landsberg
gaagcccaagataccctaaaatcacaattctctgatttgatcttttctccagcggagataatgagcgacggtaacatggacgtcgacgaatcaccagtctcttggaaggtaaagtctctggagaaattaatcgatggttcttctttctcttcgactctctcgagactctcatcgtcttctcgcctaattccaacgagtagagattttcacttttactacaatttcgatgagttcaaacgcccaatcgatgagataactggaacctcgcaatcaactcttgcaacgatcggtgattccgagcaagtttgggggaaatcgatgaagtttcctggcgatgttgatgacgtatatgcggaggattggttatgtaacgtgaatgatgaattgattgagagatttgatgtttctgttgatgagtttcagaggattaggaagaaagagaaggaaattggtaggtctgttgttgctgatgatggagatgatgggtttcagatggtttatgggaagaagaagaagcctgttggtaatgtggttactggctcggcagcggttaatggtggtggttctgtgattgatgttaagatggctgagagggataagaattcatctggtaaggctaaagttccttttcatgtaccaactataaagaagcctcaagaggagtataacatattggtgaacaatgcgaatctaccgtttgagcatgtttggttggagaggagcgaggatgatctgcgggctatgcatcctttggttagtgttttgtgttttttagagttatctgtttagttgttgtggaataatatggtttgaactttggatagagttagactttatttgaaaattggcttggtttagtgaggatgctatcagtatagtgtagaatgagaatttctatttgaatgtagtgaagttattcttaagaacctgccctgtactgccaatagtgttgtattttggttagcattatctgtgttcttaacagccacattaagactctagtgtctgtaagcttaccgtattgtattgatgaaaaggtggcttgggaaaagatctgtttttaactttcttagggttatgttttggctgtcagtatttggccttttcttggcatttttctctctttttatacgtttattatactatgcaggagaaattttcagtgcttgacttcgttgacaaagatgtaacgagat

SEQ ID NO: 10286 - DNA, 1384 bp, Arabidopsis thaliana landsberg
aatgaaaatttcattatcaattatgtaatgtcaaatgttacttgctccactataacaagattatataattactaaattagaacccgtacaatacacgagttaatcaatatatgtttttcttacaaatttaagttcgtttgttgtaatcgtatgtatatattatgttaaaaaaaaatttgaaaatttaaaatatgtttttaaagtttcaacaattaaatcgggttttatgaatttttaaccgcacacaaatcacatccacataaaagctgtatttcaaagaacgaggaagtaatgttccttacaaaaccttaacacaaaaacacttatcaatgaaatcaaaagaactattaagaaacctcttaggcttaaactcttttggatccttcttcctcccaattcttagtatctctattaatcgcccaaacattgatgaaaatctttaaatctttcagaaccgtgtatcccgcaacaaccgaggttttactattccggtgaggaactgtaagataaaggtagcgtctctttcattatagcttgcaagtaaagtaagctaggaatatgaggctctttaaccgatgtatcgaacccaccaagaaccatatccataagcaatgacttgataatggagctttctcatcatcatctataactctcaacaaatactgaagaaaatcttcttcttcttcttcatcactctttttcccaaccattttcacatgattctccatcacctgatcgactaaaagatcaagttttcgacatgaactcgcatttccttagttagtctttggaaatcaaaccgcgcgaaaaccatacgagtatttttgagctcccttcgatatctggaataacagaatcagtttcttgagctcgtttccaagaattgttctttcttcttcttcaacaattgcacccaacatcatacgagtcatgacattaaagatcgaaagaaatatctgttctcaagattcaccctgttgagagtattgctgctaagagtatgaaaacagaggagtgcggatatttaaagaaactgaacattgaagccattggagattactcgtgaaaataatgacagattagttacttggattcttagaagaaatagaaaaccaacattgcaagaatctaaacaaaaaaagaaagtagaagataagccaaaatagttaatcaagaacacagttttgaaagttttatctcatgaacataatcacagattctgcttttttttttttctttcttttttgctttcatgaaatcaaaaggaaacaagcacaattcttctgtgtcattcatatgatctcagaaagcaaaaactattcccttcgtgtctaaaaaagtccttttgaatcttattatctctacttttcttcaggattcactt

SEQ ID NO: 10287 - DNA, 734 bp, Arabidopsis thaliana landsberg
ggtacagtcttgcacacaatgcttcccgtcatacaatcactaaacacaataaaaagcttcataaaggttatttgactatagaagcctcaatgaactagaaaaactggtcagttgtctgaactcaaagaactgtgtcgaagctgcgacgaaacaacttttaacatagccaaatcaagaaagaatctgcctattacggtaaatgatcgcatcaaagcgagaaaggtgctacaagagagtacaagtgtagatacaaaagtatccaagcccatcaaaactaaatgagctacatcaagattccacaaaaccaaggccacaaactttaccaacatccaaacgcttccatcttagaagaattataggacggagagtaagatggtggcgttggcgagatagtgaacatcactaaaagactctatggtagaagagggcgaccaaagacgagcttcaagatctccaaacttgtcgtgaagtagagtccaacaaaaagggaaattttgcttgattgcgcaggagagatggaggacgagcaagtcaaacgctgggagggaaagggagtttgacagctcatcacaagaaaaaacaaaagtgaagcagatctgaggctctctttggtaacattgcataatagcataataatataagttgtagaatcaattcgcataatgaaaatttgcagaataaaatttatagaatgatataatttaaaatatgttgatggatatatttgcaaatga

SEQ ID NO: 10288 - DNA, 345 bp, Arabidopsis thaliana landsberg
attcacctccactcaggagttcggcctaaggttagctatgtgcttgctgactcaaggacaacagtgtgacatggatactgccggacttcattgggtgctcctcggggcatgacatgacgcgtttcccacgacatctggatgaagttgtgaagagaatgtgatgctgaggcttgcgagttaagggtttagatctacgatacggttcattctcgggagagtcctgatccacttttggttctacatgtcgaaagttagattaatggcgtaggtcccggaccttacgcaggcgctgatcacggttcatgttctttggtgtgagcgcgcgaagcctatctacaggatcga

SEQ ID NO: 10289 - DNA, 1177 bp, Arabidopsis thaliana landsberg
aaaaaaaaaaaaggtgaaaagaacaaagagagacgaaatcagacccaaaaaataaaaaaaaatgggtcgttggattcgattatcgtttgatctataaagactgctacgagacagcttgattcactattttttcctcttttttttgctgaattttttttttcttaaggaagataatggattagagacgaaaccaaacgttaaaagaaaaatgaaaaagaaatctgacgagacggccttgaagaagagattttgagattttctttccttatccctaattttttacaactttttatttttttgcttaactaatttgttttctttttctccaaatttgatttattcttcattaactgtaatgagtaacgtcactatatgaaattaatgacataaaattagttggattttaatattttctagcatctttatttttttccgctcaagcaatattgattattttttggtaggcctcaagcaatattgatatttgatttgaaactattacataaaaaatatcataaaaagacataatattctaccaaaaaatgagtatttgataatatatttttaaaagtaaacaaaacaaaatttgtctcgaaactatcagatacaccataaaaaaaaatttggtactatttatgaaatactatataatcatttgattgttaaatttgttttttaatttttattgataataagaaaaattattactaactcgataaaccctgatataaaatatattattatgtagaataaagtaatataatagaatcgaatttcgattgatattatattatcttctttttttgtttagaccatttcttcaataacagtgtcaaacatataatgacatgcattttctacaaagacagcttgaactttagttttatatattcagacaccacttacaaaagaagaaaatattaattaaacatgaaaaagtaaacattgaacatccccatttaattagggctttaccaaattagtcggtatgattaactcgtctaaacactaaatgggcttaattagttgggcttattttaacactaaattggcccattaactttccaaaatgaaattggttcgagatgattcgataacgtgggcatcaatccatgaatcatctcagctttcaccatcaccaataaataaacacacaggtctgctttcataccttcac

SEQ ID NO: 10290 - DNA, 803 bp, Arabidopsis thaliana landsberg
ttttgttccacataaaaccaaaacatattcttacaacctatactccacaaatcaacccaacaccataaaagttgttagttaagtctgcttgtctcaatgttagactagttttgaaacattatatagtcacttaattgttaaaatttacctttttaatttttaccggtaataagaaaaaattattactaaatcgatgtaaatcattttattatgtagaataacgtaatttgatagaatcaaatttcgatggaaaatatcatttttaatatactttttaatgaaaatcatattaagaatttaaaagaaaacaaaaatatctcaaattcccgatatcaaaattatattatcttcttcttttttgtttagaccatttttcaggcccgtctctaactcatggcagtggatgacaaatgcaatgagtccattacaaatttcagaaaaattcttaaaggaaaaaggcttattttctaaaaaaatattaaaaggttttaatcgttttttggattttgtcaaaagcgcataaatatattgagatggagctgctatttcttcaataacagtgtcaaacatataacgacattcattttctagaactttagttttaaatattcagacaccacttacaaaaaaagaatatattaattaaataagaaaaagtaaacattgaacatccccatttagtcggtacgattaactcggctaaatattaaatgggcttaactagttgggcttatttataaaactaaaatggcccattaaaacttcccaaaatgatattggttcgagatattcgatgacgtggg

SEQ ID NO: 10291 - DNA, 856 bp, Arabidopsis thaliana landsberg
catagtacttagatttgttgtttcattaccttaaagttttgatttttccaatctgaggttagggttttaggtgtttctgtcagatttggttcgaatgtatgacgaaactaatactttttttgttcttatttggttggcttaggagcgagtacgaagtatgacgccaaagatataggaagtcttgggagcaaggcttcgtctgtgtctgtaagaccaagccctcgaactgagggtgagatcttacagtctccaaatctcaagagttttagctttgctgagcttaaatcagcaaccaggaattttagaccagacagtgtgcttggtgaaggtggattcggttgtgttttcaaaggatggattgatgagaagtctctcactgcctcaagaccaggcactggtttggttattgccgtcaaaaagcttaaccaagatggttggcaaggtcaccaggagtggctggtaataatgctataagttaaaatatgccaattttggttcttgtttgtttttcattaatcttcagttttgatgattttgcaggctgaagtgaattaccttggtcagttttctcaccgtcaccttgtgaagctgattggttattgcctagaggatgagcaccgtcttcttgtttacgagttcatgcctcggggtagcttggagaatcatcttttcaggagtatgtcgtccttactcttaagtctaatcccaggctgaggtcaaacttaaagctttgttatgacgtttgtgaatattcaggtttgtttttcttgggttacaggaggtttgtacttccaaccgttatcttggaaacttcggttgaaagttgctcttggtgctgcaaagggacttgcttttc

SEQ ID NO: 10292 - DNA, 1332 bp, Arabidopsis thaliana landsberg
gacgtgggcgatggataagatccggcagagtctgttttcaacttaaaatgtcatcacttttgaggccggtgactggtaaaaggaattacaacattagcaatgcgaagacactcctgctgcagtgtttacgggacgctaaatcacatccactccctcctaggcgctttccggtttcatgctcagatgaaggaatcttgatggatggtgttctggtcacatcagccactaaaaagaaggtgtatgagtctccttcaagctatccaggacgatcagcacgttcttcaatcttccggagtcagctcaagaagactacagagtgtagcagccctataagcgattcaggacctaaccaggttcgtctttcgctctttattgtttacatatttgtgagattagaatcggtaagaacatcactgacttacttaagaaacattgcatgtgatattccacaatggtcacaacatagagttgctagacgttagtgacttgatgtctttcgatgactgttttagatcaaacgaagctgaatcagataatgttggaaatgtctattttttgttgaacatgattccaagtatagatgatgctgaacttccaatgcattgatctattcaggagaagcaaatattgtgtatcattgtcgcaactacgctcacatttatgtattgaaatgtctgttgagagttctttggtgattttgcaggaaaccactcgctctcagcaatcttcttcagctggcaaggaaaatatgctggcaaatagtccttgtacaccaaaggtttttactttacaacgcattgtgtatcaggatttctgaagaatcataagtttataaccagttctcatttgcttttatctgtgtttattaggctgctaaacctttcaaactgcaagcttctgctgaaccattcatcctcacaccaagacaagctgcttctccttatacaccacagcaactcccatatgatcattatagtccacagtttccatgcgctgtaagtttatctcaactcacactttttcttcaatgataaaccctttttgtttcagaaactaactcagactgcaattacgtttgcagaatcccctgcacctgcagctatacccgtacctgcaccggcctcggtctctgatctacgtttatcagagaccaccactttttccgctcttaccccatgggcctgacccctatacgctagatagtcaaaaggactttcctccaattctttttgcaaccaaacacccaccaccagttcacacttagaacccacaacacctttctttagccagcttaacacaactaccagggacttaccagtccacacttcccat

SEQ ID NO: 10293 - DNA, 667 bp, Arabidopsis thaliana landsberg
  unsure (1)..(667): unsure at all n locations
aagcactccgttgatggaaggtgaggggagatctttcagagtactgggtttcaaccagagtcaaagggccatttttgtacagactttgatgaggtatctactttccattaaggcctttagacgccagaagctattctgtctaaattttacagtttcatcccccgatgcatctaaattatcatcagtcttgtggtgctcaatatttacaagtttttccggttggacaaaataattgcaggtatggagctggcaattttgattggaaggagtttgttcctcgcttaaagcagaagacctttgaagaaataaatgagtacgggctcaaccctttaatgctcttctcttctgcttctttacgaaaaacgcatcattataaaaaggctttctggtttattctttaactaattttttaatgactgtttctcagatatggaatactcttcttgaagcacattgctgaagaaatagacgagaattctccaaccttttcaggtgatcgataattgatattttcactgtttgctgcttttccctaaatgagatcattgcttctcctgttaaccggttaaatgtattaatataatgcgtcgttgtctatangatggtgtgcccaaggaaggacttagaatagaagatgttctagtcagaattgctcttctgatactag

SEQ ID NO: 10294 - DNA, 584 bp, Arabidopsis thaliana landsberg
  unsure (1)..(584): unsure at all n locations
ctattgatgcacttttggaaacaaagcaaaccattctggatttccaaacccacgatccagcttacattgaatccattgattgtttctagttcctccccaagtaaagtcgttcccagaactaccaatttcagccatatcacagttttctaacattatcttaaaagcttgaaaagaagtttataatctcaaaggttcaccaagcttttcttcattagacaaaatatcgttaaaatcacctatcatacaccaagcttcttttctcaaaagaccaattccagaaattttttcccaaactaaagatcgtagttgnnnnnnnnnnnnnnnnnnnnnnnnnnnnnnnnnnnnnnnnnnnnaaccctaaacaaccttaagatcaatcacatttttgtcttcaaaaaggatctctatgtctaatatatctttccaaaaaattgctaaaccaccactagcaccaatcggttctacagttctaagattattataccctaaccaatcttaaaactttttcacatactcatacttaatttttgtctccatgaggaacaaaagatcagtgaaatgatcctttctcatttccctaagat

SEQ ID NO: 10295 - DNA, 689 bp, Arabidopsis thaliana landsberg
tctgaaccctaaacaaccttaagatcaatcacatttttgtcttcaaaaaggatctctatgtctaatatatctttccaaaaaattgctaaaccaccactagcaccaatcggttctacagttctaagattattataccctaaccaatcttaaaactttttcacatactcatacttaatttttgtctccatgaggaacaaaagatcagtgaaatgatcctttctcatttccctaagatgtcgaattgtacacggattcctcagtccctgacaattccagcttaggacgccttactaataatgcggtagttcacaaggaactaccatctttgtactctttctaggagaaatgatcacattctttcctttatcctgaatttccttctttacatgttcttccagattaaactctttaggacctatcatctgttttttattcttaaccattactatcttttttttcttctaaaacctgatctaggccttttacaggaggatgtttctgctacaaaagttcctgaagaacttgcttctagtgaacccttaaactagaagagaaggcaagaaaggacatacctggcagcgattccaaattgtatcctcgaatctccagtgaatgaagataatttttgcctgatttaaaagcatccacgagaagcttggaagaagaaggcgttaccatttgagtacttc

SEQ ID NO: 10296 - DNA, 2365 bp, Arabidopsis thaliana landsberg
  unsure (1)..(2365): unsure at all n locations
atctttgctttggcggtaccatttgtttctaaagaagcaacatgaatatatatataaattaaagaacgatggacatctatgtaacggtctaacatttttactggcaaagggcatttgcattatttgacctgattgagcatgattaacctttataagataatgtaatctcttaatagccaaaacctacgtttacgcttttacccttcatccgtttttttgttcaactttttactttttgtttcagtcaacacacgtttactcttcatcaaactcaaaccttaaatttgttttattttttagttttattttggtagaacattgaaaaccaaaatttgaagatcaaataaatcaaagttatttatggtagataagtagcttctctcgtcgtttcaagatgcttaaataagtagtatcttctgactttctgattccctcaattaactgaaagaatggttcaaggatttgttagctcttaggatacattatatataagccgtttgaaaaacaactaggtatgttcgaccaagtagtacgaaaaactaactcctaactaaacgagaaaaaaacattaagagaatgagagttccaacatgatttctattattcttgtatgaatgagtttatgagaatttggaataattcatgaatctacccaaattttcattatatatggatttatgaaacttggtaattgatacgaaagtattttgttattttattctcgatatattaacattttatttcttaaaaaaaaaaatagtgttttttttttaacatgggagagtacttaacaggacgggttctcgcagaaacgatatatatttaggtcaaatctgttttatcggggttattagattctcttggcccaactgtagtgtcaaatatcaaaccgatgttatcttattaaaaaattatattaacatcaacttaaattgttaaatgatctacatacatgaattttaccccattatttatttttatttgtcgtcttcgattgtccataatttctaatctgtaataccaaatttgatgatcttcaactcgttaaaaaaaccaaaccatagagattttgtatatccaatttagggaattcattagagttcaagaagtcttcataattaggttgcatctttgaatacctttttctcatttaggcataacaatataataatttgttttttgttttcattttcttttggtgtcaacttcaaaaatctgtaaacccaaaagtttgtataacttgtttattaagatatttttaatttaaatatttttattttgacattttaaaaaaattataaagtgttttatgaatttagggagtaaataatatttatttagaacactataaattagttttacaagttcttagaaatgtatctgtaaatttcaaaaaggaaaaatatagcatttaattttgaagatttttttctacattatatatatgataaaaatattgtattttgtactttgtagttacaaaaagtcattatatcaacaaatctaaatataaaatatttttctatatattactccaaattaactgtcagaataaaaaagaagaatcattattacagaatctgaacattaaaatcgtccctccatatgtggtctctgtctagtccaaaagcaatttacacatcccaagccgaaactatattaaataaacatttttttttctttaactaaaacatttataacatttaacaataaaagttaaaaatcgaacacgtataacgtatttttttacgtatacgtcttgttggcatatatgctaaaaaacttcattgtatacatatacaagtatgtctatatatatgatattatgcaaacacaaatctgttgactataattagacttcttcatttactctctctctgacttaaaacatttattttatcttcttcttgttctctctttctctttctctcatcactatgaagagtttcaacacagaaggacacaaccactccacggcggaatccggcgatgcctacaccgtgtcggacccgacaaagaacgtcgatgaagatggtcgagagaagcgtaccgggacgtggcttacggcgagtgcgcatattatcacggcggtgataggctccggagtgttgtctttagcatgggctatagctcagcttggttggatcgcagggacatcgatcttactcattttctcgttcattacttacttcacctccaccatgcttgccgattgctaccgtgcgccggatcccgtcacggaaaacggaattacacttacatggacgttgttcgatcttacatcgggtatgttatantgtttcccctttatttagttttcttgtaaagtaaatgataggatatcaacatatgaaaaaaatcatat

SEQ ID NO: 10297 - DNA, 2000 bp, Arabidopsis thaliana landsberg
  unsure (1)..(2000): unsure at all n locations
ctatccacataacgtttcaccctcggagcaacagatttgttgtcgttttcctcatcgttggaagaatcagtagcgcatgggtcagtgactatgattttgacaatcttcgggaaaccgtcgaacggtgtggatgtgattttccggtgaaccgtgtacttggattttctcactcggcttttcatttctcttttagttaaccggagaagaagatagagatatagagagagagcctgaaaaaaagtagaagagagaaagaagagtcaaaaaggctatctatgaaggaagaagaaaacgccgtttcttagtaacaatccctttgttaaatatagtcacgccccccccctcatttattcctttttcccatttttcaaaaatattattatttccttttgtgtttttggctttttcttactttccttcttgattttcgaaattatcgttatggaatttccgagatttagccgtatcataattatgttttctgttaatgaaaatttaagtaaggcaattaagagagagattagtgggcgcttcaatcgactagccgcttctccgatttttgacacgtggattatttcggtattcaagagcttcggttttggttcactctatagcttggtttacaagtaactttgactattgttgtaccatgacacgcgcctatatgtgttcgtaaaggtcatgcgcgctaatgagaagaaatgggcgggccttctctcacgtgagactggtcacagtactgtcactcactccttttgacccactatgataattatgaattttatggtaatgatgtaatcggaatgtttttaaagtttttgggaaagatcattgattgttattatttatctcctcttgatttgaattaagaatgtttttattttgggaaattatgatctgtttgcttggagatcaagtgattgcagacattatatattttgtttccttatactaatattaatcagctttgaaactggacactaaaaaggaaaaaaagaacaaattttggataatttttctcaatatcttttgttttggcactttatcatgagaaataaaaaatatttaccacaaatttatagtggtattggatcatctgatataataaaagtcataaactagaaagacaaaaaaataatatagactcaatttctctttatttgttaatgaatttctgaccaggtcaggttattgtgtatatttttatggggatctaggtggattcattttctttggtaagttgttgtaaaagaatctggggtcataatatataccaagtctttcgaagcagtttcggaagataatcaattcaaataattaagagattcgtagcgggaaataaataaggaatactataatcaaaaattaatttatatagtatgtggcgtgcattaacatgcattaatctattaatagaaagaaacaaaagatatgaaacaaaagagaaattggacttatcttattagggccacatgaacaaccttgaagacaaagcgataacaaaagaaattgccacgatatgcgttggacgttgaggcatgagatttatttgttgtaacctaattattatttgctttttggttatactacgaggtatgagttggtgtaggtaggaaacgagatggtctttgtattatcgtctacatgtttttctctctgttttattattgcatttagttgaagggaataaacatcgtgaacaatttacttcacatttgaagcagttcatgcatcatataaataaacaagataaaaacagtgatcgactctcttctccgacatttgatctagacatccatttttattctaatcgtttctgtatagcgagaattttgcagaaacctgcagtcgtacgatagataataccaaanatagtacattctcaactagactgtacatctaagatattatctatcatttttacaaatcacattgaatgacagatacagctatctctctgtagtgatacacatgaggaaaaacagattaactgatataat

SEQ ID NO: 10298 - DNA, 1318 bp, Arabidopsis thaliana landsberg
ggtatattatataaattactcatgaatcatgattccccacgggccaaacaccatctagtttattattcttggtattattaagcgagatcgagagatttaacaatgatgatattattggaatatatctcattttaaaataaaaagtcatcgaaagaatacctactttttgattatgtgcctctcatccccggccaatccaaatcattagccttcgacttaaattataaaatgttctaatttttgttttcttaatctttttgttgttttatagagaaaaaatgcgtcttcttctctacgtttgaagttacaaacttacaatgttccttcttctttttgtcgtcaaagaaggtaaattcattgaataagtatttacaaagtttgctccaagatatttggattacattgagtataagctctttttgttaaggtatatggatgctattgactaagtttacacttctactgagatagaggaagttaaaatcatgcattaactacatctaaaagatgtcacatacatatgttgagaggtaatgatgtcaacattcttctttgtagtcgctgctttttctactttgtatcatttcatatagtataaaattaggttgtagagccccaacataatgttacttgagtatatcctaggctccgaagttggtgcactaccattcttaagcttagagtttagctttcaatggggagtgaatcggttccacttgcatcatatatatactttaaaaagatgtgttcacttcctcctatgaagcgacaaaccgatgccaacattttgatctggagatttccaggatgcgtcaacaaatcagacaataaaactaattactcattagagcttatagctagccctagagacgccattaaaatgttagcgggtgcaaattgctagaacaagaaatcaaacttggtacctcatggattattagggtgtatgtcaaaccattttgccactttgaatactttggctagtgtaaaacattcagttatttatattactaggtgcaagtgcccccacattacacaaaagtgggtctagtccacccataaataacagattatagtatgttttagatttttttttgttcataatatctgatgtttcgaaaaaacaattcaagtttctatgcaaaaatattaaattaaacagctatatgattgtttatattctgcaataaattatatcattggtcaaaatatttttaatagatattaatttatgttttaatgttaaaaaactcaaaataattattttcttaaactctgtgccttaatctaaaacatctatatttttgaaacagagtag

SEQ ID NO: 10299 - DNA, 493 bp, Arabidopsis thaliana landsberg
  unsure (1)..(493): unsure at all n locations
cttattttaaaaatgtcagaaaacataaaattatcacagccgctggttaataaattagtagatctgatggtccaggttggctttcaatgacatcaaccttccactcatatgacgccacgtcactacaccagctcgatcatcggccacgtgtggttcctaatataatttattttcgtttaggcaatttcacattcgcgtttcgaatcgaaacgaagaagatcgagatcagtgaagaagaagaagacgaaatcacgaaaccatgttcttgttcgattggttctacggaatcttagcttcgttagggttatggcaaaaagaagcaaagatcttgtttctcggtctcgataatgctggcaaaactacattacttcacatgctcaaagacgaggtttgattagtttcttcgaattctcatttttttggtagatctatcgattcatgccttctatgcattgctnttgatgagaacatatttgtaaaaattgagatctga

SEQ ID NO: 10300 - DNA, 1209 bp, Arabidopsis thaliana landsberg
  unsure (1)..(1209): unsure at all n locations
taatgagaacttcgacataccaatatacaaagggaatgagatgagataaatacctttgagcgatctgatagaatgacaaaccgactgccatcctctaggttcaagtccttttttatttgctagacaaaccacaaccagttctcggcattctcagattgtaccacagcccaagcaattggatagatttgattgtttggatcgtgaccaactgcagtcaatagaactcctttcacaacatttttcaaaaatgtaccatctagtcctataataggtctacaagatccagcccattgtgttctaagtatattaaaacatacataaaacctattgaacacatcttcacctttttcatttcgatatgtatcaatgaaggcaacagaccctgggttttgagaatgaatttcttcaacatatccccggatatgagcaaattgttcctcatactccttcttaagcattttgagggcaagaagtctacctctttggcattgtgggattgtagacaccattttccaacgctctttgatatattcctgaatatccataggcataaacttctcatttagcctcaacttgtccaaaaacaacctagcaattacaagactcctcaagatctgacatttcccattaggtgagcaactatgccacgtgcatgatgtcttaaccacaaacagttgcctatctggatcatatgaacaatacactctccatttacatttcccgcccataccacacttgaatgaaatcttctccttttcccatctatcttgaacaacattatgcccgtgctttaatgtcacctctaaaatagcttctttgaactcaatccctgtgaagaaagtacttccaatcacaaacttatcacccatagcccttctgattcttctatccctcaccaaaataggatcctcgtcttcatctgagctctcgggaattatatctcggcctatcggtatctcgtcttcgaaatttgctactccatcatctacttcaaagtcaaaacgctcaagaggatcttcttcatcctttttcttcttctctttcttattcttcttcgaattcttcttacttctaacaatttcttcttcaatccgctcttcactctctgattcgntacccncattgtactcgacatcaccgtcactatatttgtaaaacatatcaacatcatcgtcaaacatctacttatcactctcaaatatcaactaa

SEQ ID NO: 10301 - DNA, 713 bp, Arabidopsis thaliana landsberg
  unsure (1)..(713): unsure at all n locations
tgcatcgtgaccaactgcagtcaatagaactcctttcacagcaactttcaagaatgtaccatctagccctataacaggtctacaagaaccagcccattgtatttttagtatgttanagcatacataaaacctattgaacacatcttcacccttctcatttggatatgtatcaatgaaggcaacagaatttgggttttgagaatgaatctcttcaacatatcctcgaatatgagcaaattgttcctcaaactccttcttaagcattttcagagcaagaagtcttcctctttggcattgtgggattgtagacaccaatttccaacgctctttgatatatagctgaatatccataggcataaacttctcatctatcctcagcttgtccaagaacaacctagcaattaccggactctttaagatctcacatttcccattaggtgagcaactatgatgcgtacatgatgtcttgatcacaaacatttgcttgtctgaatcataagcacaatacaccctccaattacatttgccacccataccgcacttgaatgaaatcttctccttctcccatctatcttgaaccacattatgcccatgtttcaatgtcacctctaaaatagcttctttgaactcaatacttgtgaaaaaagtacttccaatcacaaatttatcacccatcacccttctgattcttctatccctcaacacaatacgga

SEQ ID NO: 10302 - DNA, 1277 bp, Arabidopsis thaliana landsberg
aaaatatatatatgttataatgtgaagatataaagaggtacaacacaatctgctagacatttatcatcctctttttcttttactttttagggtagtgagtgttgtgtagtggaactgcgcaaaaatcaagagagacaataaaaatggaaaaggacgactgatcacattttagggttagaaacagtcagtatgaaaaaaagacttttggttaaagaagatcttcttgatcttaaacctattgattgattttagttgatcttttcctagccatcaatccatcgtacagctgatgacttgtaccatcaaattaaaagttatttctcgagttataatagtaataattattatgaaaagtcgtagtgtgtactaggggttttatcatgatgaagatttgaaaaataaataaataacaagaattattatgtagatacaaataagaaaactaatctattttcaagaacaaaaagtcaaaacttgaaaatcattttatggaaaatagcaactaattagagttaggtttattgaatgaatatatccttacttgcatgttgttgtatctgttgaaagtcttgaagcatagaggacaagagaactgtgttggacccatcagaatctgagaaggagtcgggatccaaaagtgatgaagatgattacccctttgtaagccaccatgttcatcatcatggtcagaagccatagtaacttcaagtccttgatcttgatgatgatcatggtgaccctcttggtggtcggtggaatcaaggaccacatcgctgctgctgcttccaccatctccgaggtttggtaaccctagatgaagatccacggttacatcatgacgataactgtcttggcattgatcaagaaagtttgaattagaagaagtttctgtcgtctccatgaaatagtactcatggtggttagcagtaggttcttgatgcttatgaatggggcttaagctaaggagagggagggcttctctaagtggaggagagtcaggtgaagtcaaattagggttttcgttgatgtttgggtttgtcgtctggtgaggataataaaagctgtcatgagagttgtagatgcgtgagagggaagtggcatagttgaagctatagttatagtagtctacatatccatttctgaagatacaatctggatcagccattaactttaggagagaagatagtgagaaaaaaagaagaagaaggcaagatatctctagatgatggagttgtgttaagaaaccagtgaaagctagatatgcatgttatgtgggt

SEQ ID NO: 10303 - DNA, 819 bp, Arabidopsis thaliana landsberg
gggagaagtcagaagatgtaaccacaacagcgttggtactagttacctgaatagttgtcttttggaaagaatgtctttccaagatagttcagcaagagcaccagacaagcttaataactcgaaaagtctcctgcaaacaattcactgaataagagagtgtatagtccaaaaaagcatccctctggtcagtaaaacataagtcagtataaatagaaaatatcacgtacttgtcatcatggacaggaactccccattcttcatcatggaaggcaatgtaacattgatcttttacaagaaacaaaaaaaaagaaagaaaaaaagtaccggttagtcatagcagatgaaaagattcaagcctttggaagttaaggccttagcctcatcggcgtagagaaatgacaaaaactaatctctacaaattcctgtttctgtggtcattgttcaatagagatatgatctgcctgatcacaaaacatagtcaagatttgctctctacattcacaaactaacttccaaagcaagagaatacaaatcttttaaactattcaacttctttatggacattgacaattcaccggtaaagccaagcatcactagtctatgctactacatcagagtaactgataagtgggaacaattgtattccaacaaaaaatgaaatggatgaatcaagagagattgtattaccagatttaggggtgatccaagcgcatcttttacgaccgtcacagaagcaatcactagccttctcatctctctcctccgtcagatttcttctcagtgaagaggaagaagaaactgacccacttcgccgcaaaa

SEQ ID NO: 10304 - DNA, 1524 bp, Arabidopsis thaliana landsberg
ttgttgtatcctatactttgttcaaatttaacttacttccttgcagtgattgatgagcactagaagttctgaaagttttttctgtttgtgcaggtttcacaatcttgccatgcaagagagtttagttaccattatttgactgttatgtttcttaattctcagtgtttgaggagtaagtctaacaattggaagcttgaatttttctttgtaggtaggtctatgtttgtgctcagcaggcagcagaggaaggacggttgtcgaaagaaatgatacccgacgtaagattgcggatgaagacacaagtaatctaatatcttacatcaatggaactgcgtgaaagaaaggaaaggaaaagttggtgctcttctttgcattcaaaaatggatgattctggtacgtagtagcttatttacaactacttgttctttacttaatatatccagacagtgtaataggggctaaaagaaacatcaaataatatatgcatttcccatgtaatggtaattgttggaatggaaaatgttattttgtcagtgaggaaaattctgaggtggatttatattgaactatatcatataagacagaaaggcgaaggtgtggtggttgatgtgacaactatcttactgggacacagagaattttgcccaaaaaagttggcaaagtatcaattgttggctcgtcctctgctataaggtacaatgctggaacatttctccttagctattgattattatgatggaggttatattcaacttagagcaaaatatgtgaagtagatcttttgttgtttgaagaaatcaatgtaatatctaaattatgacatattcttacagtcttctgtgcctttcaatctgctacaatgctttcttcaactttgcagaaatctgtacacattctgattaatctttgacgttttcttaatcgcatatgaattaagtgttgtttcttctgtatcaaatccaggttagagaatgaaccgagcagccaaatcttcagaagttcagaaccacctagtccgaatcataatcagaatcaaaacagcaaggtgtggcagtggctccctaaggttagcatcaagatccaaacctagtaccttgagcatcatcaatctacagagttctccctccacattcagcggcattttcgtttgcttttatagtaaccactaagctcaatctactgaaacaaaatatctcgttgttgatgatattatacaaacaagtaaaatgtctatttgagcttctttcatgcttcaaacatcatctaaattcagacacaaaacaagcttctctatacacacccaacttttttacctaaaaagaatggagaaattgagcaattttcagaaatcagaactgagtaaaatgtggcaaagacgataaatgggcttttttcaggcccaacatatcatatataacccaatgggagatgagaaggagggagagataagactgagaagcagagaaccgaaagaagaaaacataactctcaaagtcgcaacagacaagaaacgagagagatatg

SEQ ID NO: 10305 - DNA, 959 bp, Arabidopsis thaliana landsberg
aaagaaaaagtatgagggaccttcgcagaagttgtaggatccctcacaacaacggcttccttgttgtaagggataatgcttttctcttctatcttttcttacattgagcttttttcgtcataggaggcaataatagatatctgtgtcagcatgtaaatatgggccttaccggcccaggagcttaattgcttaactttgtaaaactgtgtacaagttgtataaaagctaggatacattgaccttaaatcttactagaaatttgaactctacaccatcattttaaagtatttgagatatacctaacattgttataatgacatttttattcttatttagtaatcttttttcttctcaagagtattttgttaatcaacccaaggttacataaagcctactgattttgcaaacataaaagaacgaagctcaacaaaatagctcaccaattttacatagaaagcaaaaagaattttagcgtttaaactagatccaaagtcacatgtcaaccttaaattactactgcaacacgtgttgatgagtcatcagaagtgtaccgatatcaaccaccgctgtcgagctctgatttcggtaaaaaaaacgtcgccgacaaacaatcgcacaaaaattctttttgatgtaaccgaaattttctgagcagagcttcaattgaaagatacagcagaaagggaattgtagtacgcatcggagtattcttcgatcctttaacccaatatacaatctcttgaaactgttcctacaaatcaagctttatactcaaatctcttcaatttgtgaaattgaaacaattcatgcaatccacaagcagtcaatcacaaaggaaacaagtcggagaaacccatcttgaatagataatcaccgactcatatccaaggcaattattgaaagataaagatataaagagatcggaaaaaaaaacgatctacgggcaagggaaaaagata

SEQ ID NO: 10306 - DNA, 1630 bp, Arabidopsis thaliana landsberg
  unsure (1)..(1630): unsure at all n locations
gcattttagcgttattaaattagtggttaaattttattggagtttcatttcttattcaagttgcgtgttaacctttttggaagtatcacctgttttcatacaaaacaagccatggagacggatttatatattctgattatataaagaaataataggagattatttaaataatatatatttggttgatttattgagatttatcttttatgtgttcatacttcagacgcatatatgactcatatctaaaaataatttctacttgcattatccgattctttctgttgctttgtaatggcagagctatccataaagctctgctttgattttcattacttttttcagttgttacctatactctatatacatatttgcttgatcaatcaatttcacattcaaaaataatataaaaaacttctactttccttcaaacaaaaatgtagtttaatagcacaccacacattcaaatgaacaaaataaatatgattgggccattatagaaccgcagtctttagaagactattccacaccaacaacactcacattaaagtaaatgcagacatatgctaaatccttttgataccacataagatttcgttggcaaatttattaacatttcctacttgattcgacttgacctcctaaccaaatgccagctttatctgcttaaatagcaacctacccaaaatcacacatttttattttaccctaaattaaaactgtatacctttttggctgctatttatacacaatcacacaattaaaaaggtcaaataaacaaaataataatattccaaataataacaaaacaaaaacacttttggttttttcttcttcttcttctctctaaatcataaaaacacaagttttcgacagatcaactgttttcttcattacgtgttcttcaatggcgtcacttcactgattctattcctataaaacccacttacccatttccttttatatgcacaaattctcataaagttttcatttttattccatttttctcggaagccatggaagctgctaatgagcctgttaatggcggatccgtacagatccgaacagagaacaacgaaagacgaaagcttcctaatttcttacaaagcgtcaacatgaaatacgtcaagctaggttatcattacctcattactcatctcttcaagctctgtttggttccattaatggcggttttagtcacagagatctctcgattaacaacagacgatctttaccagatttggcttcatctccaatacaatctcgttgctttcatctttctctctnnnnnnnnnnnnnnnnnnnnnnnnnnttacatcatgagtcgtcccagatctgtttatctcgttgattactcttgttatcttcctccggagagtcttcaggttaagtatcagaagtttatggatcattctaagttgattgaagatttcaatgagtcatctttagagtttcagaggaagattcttgaacgttctggtttaggagaagagacttatctccctgaagctttacattgtatccctccgaggcctacgatgatggcggctcgtcaggcctctgagcaggtaatgtttggtgctcaagataagcttttcgagaataccaagattaaccctagggatattggtgt

SEQ ID NO: 10307 - DNA, 1047 bp, Arabidopsis thaliana landsberg
tagtgcctgcagcttttgtatctttcaagagccgttggggagcagcggtttgtgctcaaactcaacagacaagaaacccaacagaatggctaactgagtgggctgcagagccacgtgacatctactatgacaatctggcattgccatatgtagaccttaagataaggaggctcatagtcggcgtcgcatacttcttcctcaccttcttcttcatgataccaatagcatttgtacagtcactcgccaacatcgaaggcatagagaaggcttttcctttcttgaagccccttatagaagtgtatgtctctgtctatctcaacatgttctgtcccgctgcctagtagataaagtctcttaccatttttggtctttgtgaacaggaaattgttaaagtcgatcatccaaggtttccttcccggaatcgccttgaagatcttcctccttttcctcccaagaatactcatgcagatgtccaaatttgaaggttttgtcagcacatcctcattagaaagaagagctgcaactagattctacatgttccaattcatcaatgttttccttggaagcatagtcaccgggactgcgtttcaacagctcaacagtttccttaaccagtctgcaaacgagtatgttctttagacctttctttgtctgcatttcactgagagatatcatatctttctgactttttcatttctgcagtattccaaaaacaattggtgtctcgattccaatgaaagcgaccttctttataacatacataatggtggatggatgggctggtgttgctggtgagatattgaggttgaagccactcataatctatcatctaaagaactccttcctcgtgagaaccgaaaaagatagggaagaagcaactgatcctggaaccataggattcaacactggtgagcctcaaatacaactctacttccttcttggtcttgtttacgcagcagttagccccatccttctcccttttatcctcgtcttattcggcctggcttttgtagtgtaccgtcatcaggtgaaataactaaacggtcc

SEQ ID NO: 10308 - DNA, 1500 bp, Arabidopsis thaliana landsberg
acctccccattggtttaaaacctattcgggactttacctggcttagaaccttttccttgtttcaaagctaattaaccgtggccggtttatttaacctccaaaaaccaccaaaatgggttcaccccaaaatttttttggttcttgatccgaaagaagccacagttccggatcttatgcgtcttttcttctactcggatctcaaaattagaaagttcgttgatccatcggtagagaatcttgaaattcgtctttgcaatttcaggggacggtggatcatttttgtatccattgttgttcaaaaactcttgattatcctcaggaaacctctctcggtcttgggattcgctcttggcttttggctcaaccttccttcttccaatggtggcttcttcaagatattcctaaatcttgtcaaaggttatattttcttttgactttcttgtttagaacttatagttcggttagacattacttttttttgctaaagggttttcaaggttagacattacattataaataaaatatagaattgaatacatactaatttcttcatttcgatagtgatggttactctgaattattcttcaaatcatattatgcgtgactgaggtctgaggtagtaagttgctccaaattttttttttttttttgtcataatctttttaattgattgaatatacagaaacaacatctaggagataatcaaaatgagggtattacttaattatggcaagacacagccattttttaaattcattttggttgtaaatggattacttacgaaaatacaaccatattttctgtaaattatcttcttcttttttttgttgattaatctgtaaattatctttgtatgtatatagcaaattcacaccacttaggtttaaattttgtgtgcatgatctgtcgaataattatcgtatcgtcggtcatgtacctttgtttcacatttatattacttttgtaattttttcaggaaggtttatttggccagaaaaaacatcagcgacatttgcatccataaacggaaacctagaccaaaaagtagagttaggtttaggccggagcatagagataggagatgaaagatacaaacctctgttgtcaattatggcttctaagctgtcttacgagaacgaacattttatcagatccgttcttcaagaccattggcaggttttattaactaactctttcatttttattaactatatttttctttgattatttttcgcaactctttatacagaatattttccatataaaatacgacaacttgtgcagtgttataattagctgtatctttttattttttggtcaaacatttagctgttcatcgagttaattaactttgtcttataacttgcaagtatatatgaccatgatcatgcatgttgtctttcattttgaggataataaaatcacttattatgatcattattatttgtttattatgttgtggcagatggacttattgggtttctacagctgtccgaatgg

SEQ ID NO: 10309 - DNA, 1628 bp, Arabidopsis thaliana landsberg
gactcatctcttgttttaaatttgagtcccatttacttttgatgctaaataggagagaaaacgtttgtgactctcacataacgtagagagacagagagagtcaaaaaaaacagacgggaatattccggcgaagattgagactctcaatatccaatggagaagtattcccggcggtctattctcctttccacggtggtcgccgccgtgttattctctttaattccggtttcaatctctattcccttcatactctttcacggtaattaacaattttcctttcttcttcctcatctatttttatgtttaattcataattaacaaacacaatttagttaatattaattatccaaaaaaaaaagaaaacaggaattggagataaatgttctggtggagttagtaacttcacgcaactcctaaccaacctctctggctctcctggctattgcttgtaatgaatcaccaactaaaacattacttacctaacttcttttgattatgtgtttttagtatcttctaaggatcttttttaattcaaaatgtagagaaataggaaatggagaaaaggactcatggttcatgccactaagaaagcaaacaagtgtagcgtgtgagaaagtgaaagcgatgaaagtgttaagtcaaggttacaacattgttgcagagtctcaaggaaacttagttgctagaggactaatcgagttctgcgataatgctcctcctgttctaaactatatctctttaggaggtcctcatgctggcattgccaaaatccctaagtgtaatgtataacttcattttactatttctttggttaatcttaatcatagtaattaacaaaaaaagttttagttaattatgtgtgttctgttttgtgtcaagtctggcccaatatgtgctataggtgaagctttgttgaagttagaggtctatactgacttcgttcaagtaacactcttatctctatatctctataagatcaaccaaaaccttttaatgatgatttgattacattatgactatgcaggatcatattgctcctagtggttatatcaagattcctggtgtaagtcagttacttaaccaagtcaatcaattcgaagtcgactcgagtttttaacacaatggcttgtttttctcaggaaatttcaaagtatttggagcactccaagtatctaccaaagcttaacaatgagagacctgacgaaagaaactctactttcaaagaccgattcactaacttacacaatttagttcttgtcatggtatcttattgtcctctttttttcaacttcagagattaaaaacatgttatagctcattattatgtttttctaattcttgattcgtaaacagttcgagagcgatacaatgttaatccctaaagaaactgcatggtttggttattatgaagatgaaggattcgatacccttttgtcagctcaacaggtgaatttctctaaattgtttcatggatcattttggtttatggaaatctaaatatgtatacattgttcaacagacaaagttgtacagagaagattggattggtctgaaagcattggatgctgccggaaaagtgaagtaagaaagatatgttaggggaccacctcagtatatcggataggagg

SEQ ID NO: 10310 - DNA, 1296 bp, Arabidopsis thaliana landsberg
agacggatcacaagcaaacggctctgttctgaaatactgctccaaaatttctgtgtgttactaatcataatgcttgaatgagtcagaatatcaaatataagctaaacctgtacctcactctcaagagctctagctgcagagcctctccgatcgggatctatggagagtaaagcctccaaaagggaaagaacattcgttggcaagtctttaaacatctctgctacacgtcttccatatggaagagcgggtctaaatgcagctgaaggtggtagctttagtttcctccagtaatcttctgccggtgaaccacatagcttgaagattttatgcagttgctctacctagaaaaaggttaaacttcaagtcagtttttgagattatgggaagctgagttctagatggatttaaaaattggtacctcggttttcccggccaggattggcttcccggaatatagttcacctaagatacagcctgtgctccacaaatcaaccccaacaccataatgacaagctccaagtagaagctctgggggtcgataccaaagagtcacaacacggctagttaatggaacgcagttctgtggatcgaaaaacgttgctaacccaaaatctgcaatcttcaagactccattactatcaatcagtagattagagccctttatatcacgatgcagaacaccacgactgtgacaatgatgaagcccgcttagaagttgttgcatataacatttaacctaagcagcagaagaacaagttgattgatgtctaggcaagttgatatactgagacatagtgtacgtaaagcataagtaaagggataacctgaggctctgaaaacttgataccaggtatggaagcaagtccgacgagatcatgatccatatactcaaaaaccaagtacagagaagatgaaacagaggcagtgatcaacccttctaacttaagtacattaggatgatcaagccttctcataacaataatctctctcgccataaacttaacactctctaaatcgctaagatcaaaccggactcttttgagtgcaacaatcttgttattagtaagatcacgagccttgtatacactgctatatgtaccttggccaatctgtatccacacaagaagcaaacatttgtcaaaggagttcatcattgaatcaagtcagatcaaaaaggcgataaacacatcagcatacttactttctccaatttctcaaaggtactagcacgtcgtggagtccaattcacaagtgcctcaccagccactgagactagccaagcaggccatccagcag

SEQ ID NO: 10311 - DNA, 892 bp, Arabidopsis thaliana landsberg
catccatattaattgttaagcttaatatatatacaaaacgatttcttttgcaagggatttggtgaccaatagatggggtctaattatacacgagatcctaaaattgcaagatacgagagagggaaataagtcaagtatgagattaatctatgcgcctaaaacaagtttttttattgcatgggatccagggccggcctcatgacatgatcgatcacatcagcctgagatcgctgatgtttacttgatcaataaaagacggctattgtttatattccgaattttcatatgcattgataaagattattaacgtaaaacatatatgcatattttaaactttgtgtggtttgtttagttttaatatacatatttttgctaatatccaaggctagagctctgaattctttctacatgtgaatattgtgtcggtaagccttttgaataattcacaatccttagaagatttcctcaaaaacaatgttcaatttcgagagaatataatgaattttcaattttacgaaaattaacttgaaagatcttttttccttcttcctaatttataattcgtaaataattacatcattttttgtgctttcttctgctcgatgaatagatgactaataaatgttagagagcaaagctgaataggagaattatgtacatcttatgtgcatcttaattttaaacatggtgttgtgttggaaaacattagagacatcgttacgttgattatgtagatatttgttatgaatgctcttttaagtggttgtgtaatgtatataaattatcacatgcacctaccttctaggaacctttttgacgtggaacttgaagatcctagtttgaagaattttgagtttctactgccgacacatagataaattagccattgtaa

SEQ ID NO: 10312 - DNA, 1087 bp, Arabidopsis thaliana landsberg
gttcattgtgtagctactgagtttggagagattacttgagaagagagtgttattgttgcgaaaagcacaagcaaaaggattctccaagaagaagacatccatgatcaaggaatgaaactaattttacgttacttcgtgtgtttcgggagatgtattaaaacttgtgtagaagttttaatcgatcatgtacttgtcttcctgaaatgatctaataaacttgtttgcagccaacgactagttgttgattttaaagaaccaaccaatagctcgttaaattaatattgtctctttattgtccattaagcttccacactatttcaatatctaatatctctcaaaattcttcattggcaaagtttttggtcgccggcgtcaagattcatcatcttcttttagctttctttgcattgtctctccctatttgcattgttttctttcatttctccaagttttttatattttgctctttttaactctattatatagtgcttccaagatctgcgatagagaaaggaggttggttctgacgagtctctttctacaccatcctttactcaaaacatttgttttgaaatcggcaaaagagaagtttcttgaatccaactgccttccttcctttaatttggagatttacctcatcatgtctctcaagtactctagatctagatatctcatggatcttcccgaagaacattctcacagaacatcgttaaccgagttggttacctccctgttggtgtcggatcccgaacctaaagtttgggtccaaccgaagattgccacttagacaaaaggacgatttgaaggagagtcaaataagaagttaataccgagctgggtaggaggttttgagttacacaaagtgaagaactcggaaagggatagaagttcgagagctcatgatgggccggaaatcaaagcccaagaagaggtcaaaggagttcaaattcaaacgttggaacattaagttcgagaaacaaaacggacgtattaaagaagaattaatggtcaaaaatggtgataccaactgtataaaaataaggtcccaaactatgtaaaggacacatgcatttttctgcaaattcta

SEQ ID NO: 10313 - DNA, 1065 bp, Arabidopsis thaliana landsberg
  unsure (1)..(1065): unsure at all n locations
atgaatgtgctgcagttccccattacaaagcaatgagcaagctcaaaaaaaaaaaaaaaatcgagaaaaaaaagatgacttacgaagagcatcctctgcagaaaatcgtcgagaaacatcgcgacatatcattttcctcaacaaatccttcgcttccgatgatacagacccaaacttcttcggcggaaacctcaaattccctctcaatatcgattcaaatatatcttccgccgtctcaccgttaaacggcggttctccagctagcatcgtgtatatcactacaccagcgctccatatatcaaccttctcgtcgtacttcctccccatcactacctccggcgccacgtaatacggtgttcccacaactccctccgccgtttctccgcctaaccacaccgctgatccgaaatcacagagcttaacaccgccgcttacgagatcgactaagacgttgtcaggtttcacatcccgatgaacgacgtcgcaccgatgacaatgagcaagcgcacggaggatctgtttcgcgtatgaggcggattctgattctgataacctccccccggcggagattaaccgatcgtaaatcgtcatcggcggatcgactaattccatgacgatcgcaagagaatcctctgtttcgtagagatcgaagatcctgatgatattcggatgcggcggtaacatcgccatgatcctcggctccgtctctatacactcgcgatctaacgcgtcggtgagcacgcgcttgtcgatggttttgcaggcgtagaattctttagtcgccggtgagaaacagcgagtgattgttccgaatctacctctgccgatctcgtcgcaaagctggtagttattnnnnnnnnnnnnnnnnnnnnnnnnnnnnnnnntccttttttctttttgttgttagtttcttcgtatctctgattcgtgagagagagagaggtttatatagaggaatagaatcaaagtactaaaaaagagaatattccgtttaaggaggttaaacagcattctgtttcaaaagtcaagcttcgagaacaaaaactaagcaagcaaccgactcca

SEQ ID NO: 10314 - DNA, 1150 bp, Arabidopsis thaliana landsberg
aaccaattcccttgggttcagacttcaatccaaccgaaatttcgttattttgctgtgagtttgcagcgacgttgggatccttggacaagaggttgaataaagagttaacccttggcatgagagacttctcatctggtgcctcgaactggatattatcacttagcaactgctgtttcatgatctcaaatttctccatatgttccggatgacttccaccagcagaatcagagagaagtccaacgaaatcgctcactgacatagattggtgtagtccaggtacttttatctgatctgaatcagttatgtttcttgaatcagataaatatgcaacgaaatcactaactgacatagattggtgtagtccatctacgtcgtcagccagattcaaatccgttgtgttttttgtatcacagagaaccgcaaggaaatcactcagtgacatagattggtgtattccaggtgcttcgatctgaccacaatctgttctgtttcttgaattgactgcttcagaacccccaattccttcatttgcacgagcatctatcactagagatgaacgaagcaaacaaacagaaatataaatccacaatcctaatcaggttcaacaaaagtgaaaatgaaaaactatattctaataacgagttatgaaagcaaccagaatgagcgagcagtcatcataatacctgagctgggtgatggtgcttcatgagacagatacatatgctcagatgatgactgagccccaacaggagatgctaaattctgagtcccagagatcgaaggacctgtactaagattcaaattcccaaaaggatggccttttgattcacttggatcctcaaaaatagattgccgtgcatcaaagtagggagagtcaatagctatctccggctgtcggcttagatggaacagacgatgatcacattgaacgagcttttcaaaatgtttgttcattatcccttgagcacattgcagaaaatgctgcctaacagatcacagggagactatcgttagctgaagctaggacatcaccaaatttattcagaaaaaattacatgaaatgcctgtacctgttcatgctggcttggccatcagtgaaataaaatgtaaaatgccacaaggtatgctttctaggctgtgggtttgttgc

SEQ ID NO: 10315 - DNA, 1022 bp, Arabidopsis thaliana landsberg
gatcttcctcactatggttaatacgccggaggagtggcccatttttgcatcagagttaaaagatttcgagtattttaagaatcaacttgtatcttttaatattatgcatgttccccgtactagtaatatccgagcagattatcttgcgaaatgtgcaagaactcgcggattctatttttcccatgtaagttcaacggttctcgattggctctctttaaacgagagcgcttatccgtagaataatatatggagttttaacccggaaaaaaaaaatactcgcctatagtttgctttaaaaaaaagtttcttccaaccaacaaaagcactcacctaatcttacaaccgtgatttttgaccaatgtttttgttcatatctcttcaaaaaaaaatttatactataatgagcattataatatattttctatcacatattattgtgcagaaattaagtatcaagttaaaggcaagttttagcaaaaacacgatttacggaattagcaacatttacacggacgatcgcatatttcagacaagacaaatacagaggataaaatatcataaaagggaaaatgacgacacaaattatgtaggcagtgattggtacacattgttagtttttttaaaaatattactatgtttttgccaaaaaaaattacgaatcagagcaatcatgcataaaaattagaagaatagcgtaaatatttttctcttttctattcacacctttactcgcttttctattcattttcttatttttcctctcaattactccaaaaacataccaattagagtttagattcatgatgtaattgacgaaaaaaatcacccatatgattagttacactatatccgaacactaatattcataaatttagtgtctcggatttatgcatacaaacttttcatggaagatgcttctcatttacaagctgatgataaaattgatcttacattttttaacaatgaaatgtcttctattttttgttatagccaaaataactcagctttcagttatatatatc

SEQ ID NO: 10316 - DNA, 937 bp, Arabidopsis thaliana landsberg
taaaaaaaaaaggaacagagggagtaatatttatactatcttattatttaacaaaaataaaataaatatctaaaatcaatttgaaaataaatttgattgtttgctccaaaaacaaaaaacaaattgatcaactcttgcattgatggatgaccattgtggagtatcctctcgaatatataagtgagttcgatgagctgaaaaaacgtaagatatttcaacactttgacaataagttataaagaaaacaatttactatgtcaataaataccttgagaaataatctgaaaagggcagtagattgtaccatcgttaatccgtcttctcatgaagaccaaaaactcaattgctccatgttggtaatgatgtatgcctgcgaagccatttcatgtaatcagattaaatgttcaagaagagcaacgaggacaattaaatgttcaaataaaaccatctaagagacgtattcatataccataaaataaggacagcagcaaaacatagataatgggagagaaaattaacaaacttcagcaaaaaatcaaaacttgaatgaatgaaaacgatgctaaggtctcaaaccaacttcaagacgatcaaacgtataacaaagaaacgaaatcaaacagtcacaaaaaaagagagaaagagtaaagggttatacataccagaaaatctcctttaaactctagaaaatctccgtatctaaggtctaagtcattggaaatctaggtgttttcttctaatcttcatgcccttttggtgatgatgcttagttacaatgttaagacagaatatgagaattgaacaaattgatgcatctagaacaatgtcttgttaatgtatttcctgtaatctgccttttggtgatgaatcttgatgctatttaaaatgatagagcttgagcaattgagacaggtgcataacaatgtttgatgcgttt

SEQ ID NO: 10317 - DNA, 1711 bp, Arabidopsis thaliana landsberg
atgcttctgcgatcagaaccgaaccgatgttagccaaagatagatcctgcatctgaagcacacaggatagcaagaaatatgaaaatctagagaagagtcgatgaaacgccataaaacaatcataacaaaattgaaatgcttctatcgtttttttttcgagacttgggaaaaatttatgtggaaatggtatctttgaatgatgtaatgagaactcttttgacttcatacacatatgccgctgctttcgatgtgacttcatcacccccacactgagttattcgacatgttctttacatactcggagaattccatcttaacaacaaatgctttgtacaattttggatgagctttatgctgattagaaagaaaaaaaaacagtttttttcagtaattgccctaactaggccgttgtacaaagcggaaacagtaaatacaaaggggaaaacaaaacattctaatgggcttagagcccaatatgaatagattagcatttgatatagtatcataatattttctaagtcgccaccaaaccaatcatgcaatacatgcataattgtcgactaactaacgaatcagatcagtattgcatccacaaattcaacatcagctaatagtttcacaagtacatcagaccatagagtcgcatgaacatcattacttccttctccaaccccttgagaaagtacaagtgtgcctgatgagatcatgaccaatccaaccaaacctcttgaaccacaagaagattaggagcagcttgtaccggaggaattcattaattgttccggcgggtcctctaacaagatcaaaatccaagaagttcaaccaagctatcaatggactactcaaggagctaaagaagaatcaagaagacgtggttcaatcctccttcatagtgatcacggctcaagaggctcgataaagggttaagtgttgcttatgcactctttttcccttgccaagaattgtcccaaaagattttcttgacaaggattttaataaggcctaagtaacactttcaagccttcctttatcagcccaattcgtggtccaaggcccactcacaatgacttggcccattctctcttttctattcaaactttgcatttattgctgatgttatttccaaaactctgtgcatgagcttgcatgagtgtggacttgtgcatgctcttgcatgtctttcttctctcacctcttccccttcttcctcctctcctatataaactcattgtagttctcatttgtaatcatcaaacattttaatcaaaaactttctctttcacttgtttgatctgaaaagtgtgtagtatcttttcaacttgttttcttcttagtgtgtaatatctaagttggatccaagctcgtagtctaagagtctttcatcactcttggaactacaattcgttcccctttcattccgctgcatccactcgatctcgtcgccatcccattcatcatctttccaccgctttgattaagatcaatccattattcactatcaactacatcatttccaattcaaaaccaacaaagtgagtccttggagtatagatccacttccaggagtgtatcatcatgtctttttaatatgacaacagaatcaggtgaaatttcgattatatacataaagttaaccaactggtatgcagttgtatcatttacacattcttcaactgtaacaacatcaactttcatctcatgtcttttcata

SEQ ID NO: 10318 - DNA, 851 bp, Arabidopsis thaliana landsberg
agttggcacatagataccagcataagattctcctgatatacagaagggatttgactgaaactccggaaacattttaaaccactgatgtggatgtaatagttagtgtcttgaatcacacacaacacaaaaaagctttttgaaaattttattgcattcttattctacctcgagaaggaatgtgtgagtatcagacgcggtttttgtatcatcagttgtataatcagcgttgtcgtttgagtaagagaatcccacaccaactggagagtcaaggtatatgatgttggacacctgaaaacaaaaacacattcttaaaagttatagagcaatttcttttgtagaaaatgtttgaaaataagtcaatgttgtttttcttttcaaccttggaccaactataaggattgagatgcagaagatgtgagttcttcttttttggttcgaaattgaatggacctgcaacagcattgaacaatatcatatgtttagatatgggtcgaaaccaaactactagatcgaccttgctctttatcaaaaaccaaaacgaaaaaatctactagaccttgaatggttgacgagtttgtagagtttgagattttagttttcgggttaagtttcttacattttagtttttagttttgataaatataaaacaagtgaacttattttttaattttctattaaactaaccaactttagaaaaactggtttccttagttttaaaagcactaattctcgaaaatcttgattggatgatttagtgagtttttgaaaacaaaaaataaaacccccattctaaaataatctactaccattcaagcctaaatcttttagttcgtacaattaaaacatttaca

SEQ ID NO: 10319 - DNA, 716 bp, Arabidopsis thaliana landsberg
gtaataacagaatcagctcctgaatctgctcttatcaccaaacttcctggtttcgaaggcactttaccttcaaaacattactccgggtaaaatatcaaattctctgttcttgaaattcaagattctgtttttcttgtatataatctttttggtttttgatcaaaggtatgtgacaattgataaggaacatggaaagaatctatggtattactttattgaatcggagaagaatccatcgaaagatccggtggtgctttggctcaatggtggtccaggttgttcaagcatggatggatttgtgtatgagcatggtccattcaatttcgaactaccaaagaaaaacaatagtctcccactcttgcatcttaatccttatagttggtccaaggtaattttaatgaaaacatatctgtgttgtttttttttactagttttgtaatgttttgatgtatgatttgtttactttttcaggtctctaacattatataccttgattctcctgttggtgtgggattctcttactcaaacaataagtctgattacataaccggtgatattaaaaccgcggttgactctcacccgttccttctcaaggtgaatcattagacatgttttagtttttgggtgtaatgcagattactaaatgcttctttcattcaaaatgttcttcaccagtggctccaaatgtttccctgagtttcaatcaaatccttttt

SEQ ID NO: 10320 - DNA, 337 bp, Arabidopsis thaliana landsberg
catatgtttatatgaatagttttctttaaaaaataaataaataaataaataatgtcttctaaagtaaggcataaatatatatatatatatatttgttggacagcataaataatagttgttaacacataattaaaaaaaaaatgtcaaaggtctacagagattcaagtaattatgtatgcaatcgtagggaaaaattaaagtaaacgactgtcggacatgtttgaacatgttatattgtttaatagataaagttttgagattatattgtttaggtcattggtggcaaaacactataccctaaattttttgacattcactaccaataaaacagtcagaa

SEQ ID NO: 10321 - DNA, 1067 bp, Arabidopsis thaliana landsberg
  unsure (1)..(1067): unsure at all n locations
gcataaaaaaaagttaacaaatagcttacagaaatatatttatcgcaagtagaaagtgttctcattttaactagttaaacaacccaattattctctgaacaatggtgaacgttaacataagctgtcagcattgtagctaaccatacaaagataaaactgtacctgaagctcatcttgtccccaggcatacttttcatatgaactccaagcatgaaccattgcctctttaactctctgcattcgctgagcatcaactggatcttcctgaacatccttcaaactattgacagacacatcctcagtgacgctctttatctcttccaactagcagaaaacacaacaaaatttaagatcattataaaaaatctcataactttctcaagatttaaaaactcatagtaaatcaaattcttgcaagaccacgagacgcgtaatgccacatcaatatcagccactgtgtaattaagcaaatgcaaaaaaaggaggaaactttgggtataatcaaagcctcatagggaaaagaaataaataacttaccatctgctgcaaccgcaaaacttcttcatttaacttggaaacttcaaactgcaaaaagtcagcatacattataaacacacataagtgaaagaaaaatcctatcttcacataacacagagactctcctttatccaaagattgaattttgatttcctctacagcccagtataaacaatttcataaagtctagacctttagctgcctactttaacagattcgattagcgcctctcatcaattcaataacgtacctggtagtctcgggaaagagattgacgatcccaaacaaccattgaaacagagacgaagaggatgatgagcaaagcaagacgtcttggtcttcggagataaaacgctgggttgaaatatttccatatcccatgactaccacttacaagtttattcctcgccatctcaattccgacgatcagatctgatctcggaggtgacaaatttttgaaaaaggagaagaagaagaaattgaaaccatgaattaaaaagagaggaagagatcggatcagagtnaagaga

SEQ ID NO: 10322 - DNA, 1080 bp, Arabidopsis thaliana landsberg
ccacagggaagcaaatacactagccttctaggccacaacttctatatataacacttcaaactctgatacacagaacctaaacttgatgtactaagcatcatagggaaaagataagtcaaacccaaatctattcttacaagaacatgactttaacctcaaattgggataaagatagcaaccaacacagggacagatgaatcaaacccaaatccaattcaagaagatcaactaacagaaacataacgctaagtcaaactaacacagaagctcaaattcaagaaactctgagtttattatacctgatcttgaggcaaacaagtgatgtgatactcatgcataacccaaggagtccaaacacctttaggaactctaccttcataatacacaagcgtcttctttatcccaatctcgccgcgattacctctcttatctttgattttcctatcaacaccagtagctttccaataccctgaacttgtagtcctcttcgttaccttcttcttcgcagaagtatactcctttggacagaagaagtaccacacaggatcatccgattttatcttcgataaagctacaacaaccaaacaaatccagaattagaaatgaccgatgatgagacaacgatgatgattttgaagtaaggaaacttacaaggcaagtaaatagggtcgtaactacagatgttgatctcgctaatggcttcgtcgacgagccaagtcttacccaaaattttgttctttagataatggtttatcaattcctctcccgttggataaaatctatacccaaccagatctttcaccattttttttacacagaaacagatcaaataacaaaactttttgaatcgacactgaaattttttagtgtttgagttttaagggctttttctcacttctctgtttctttcttttttcctctatctattattgttttttctgaaagacgaacagtactaatacagttggggtgaagaagaaccataaaaaaagaaagaaagatatttgtgggcggaatgcagtaaaagtatattaatgttttttcccttaaacgttgacaaatgagaggggacaaaaaaaa

SEQ ID NO: 10323 - DNA, 2083 bp, Arabidopsis thaliana landsberg
gcaaatcaaaactgtgtcaatgttttctgattttgaaaccatcttttttagccctttggaccggttttcatgggaggaggaggcatgtttgaagaaattgggtgttttgatccaaatgctccggcagaaatgactgctgagagcagtttctctccgtccgagccaccaccgacgatcacggtcatcggtagcaacagtaacagcaactgcagtctagaagatttctctgcattccacctcagcccacaagactcttctctacctgcctcagcttatgctcatcagcttcacattaatgctactcctaattgtgatcatcaattccagagttcaatgcaccaaaccctccaagatccatcgtatgcgcaacagtcgaatcattgggacaatggttaccaagattttgtgaatttgggtcctaatcataccactcctgacctactcagtctcttgcaattgccaagatcctcacttccacctttcgcaaaccctagcattcaagacattatcatgacaacatcttcctctgtcgccacctatgacccgctcttccatctgaattttcctctgcagcctcctaatgggagtttcatgggagtggatcaagatcaaactgagactaaccaaggagtgaacttgatgtatgatgaagaaaacaacaacctcgacgatggtcttaaccgtaaaggcagaggatcgaaaaagcgtaaaattttccctacagaacgcgagagaagagttcacttcaaagaccggtttggtgacttaaagaatctaattccaaatcccaccaaggtttacacttacttaaatactaacttcttcttcaagtaagaaatcttcagaaactaattaaacccttttttcttatatctctagaatgatagagcatcaatcgtcggagaagcgatagattacatcaaagagttgctaaggacgatcgatgagttcaagctgctagtggaaaagaagagagtgaaacagaggaacagagaaggagatgatgttgttgatgagaacttcaaggctcaaagcgaagtagtagaacaatgtttgatcaataagaagaacaatgccttgagatgctcatggctcaagaggaaatcgaaattcactgatgtcgatgtacgtatcatagacgatgaagtaaccatcaagatcgtgcagaagaagaaaatcaattgtttgttgttcgtatccaaagtcgttgaccaacttgagcttgatcttcaccatgtagctggtgcacaaatcggagagcaccacagtttcttgttcaacgccaaggtttgtcataaaatctcaatttaatccatagtcagacactattagactaactaacgaattgtgatataacagattagtgaaggatctagtgtttatgcaagtgccatagcagatagagtaatgtaagtgttggagaaacaatacatggaagctctttcggcgaataatggttatcactgttactctagtgattaaagcgttttcatctagctggcttattactttgaatatggataattaataatcacattagttatattttcgtattattgttcttagcttgtagctatgcctctgtttttactttttccttgttttggtttaatcacatattccaatcatatccctcgaaacttcttagattgactttcttgattttgtatgtgagagttccatcttttccataatataaaactgttgttgttcttaactgcttaacatatgtctcgttgaacttattgttgactcttggtcgtcggaccaacagagctgtgcgtttcggctcatagttagtttttggttgggccttttctggtaaagcccaatagttttgttagtgtagcccaaccaataagaaaaatgattgcttcgtgtgagaaaacatcaaaaacattctttttaaattattatttttatcaaaataacatttagatagatatactgaaacagattgttttgccccaaaaaaaattaaaaaaataaacggatgggtactaaatcccaaataaacaaggaaaacatcagcaatgacgagtatattaatctgatctaataaaacaaaaatcaaaataatatg

SEQ ID NO: 10324 - DNA, 1090 bp, Arabidopsis thaliana landsberg
tgagaatttatcgtgagtattgattttttacctacagtacataaccaaagcaatgaaattctacttgtatcctgtaatggctgactaaatcaactgcgaatcgtggttcgtcactttcttaattaactatttttttttcgatctttgtctaatttcaataatttatccaaatcctgatacttgttgttccagttttgtgacatggttactgttgctaggctattgaacctcactcttgttgttcccgagattgacaaaacatccttctttgctgattcaaggtattgtaactccttttcttaaacattttctgtttctcttacgttcttaaaccctattgcaaaacgaaacctagaagaatgcttcagattactagaagagcttaacggtgagaaagagaaacccattaattccatttcaagtagtgctagaccaagtaatagcgtcgtctttgttagtgttgttcaccgtagagaaaaccaaatttgaatcacttctgatgatattgttgcctacatctgtctgattttgatttcgtttaattaggttttgtgttctgtcaccatctcttagaccccttctacgttacgctttcctgagagaagtaaaggtctggttgtgcagtgaacatgggggctcttgctcaagttgttccgtggatacccgaagacgacctgctgctaaagaatgctgtcgaggtcagctcccatttcattgagtttggttacatttcagttttcattattttactaccggaaatggattatgttggattgagccatgggtttgatctcaatatttgtctcaatttcctgtcctttcacgcgctttatgtagttcaatgatcatgtagttttcttattctaccatgcttgtttgcagagctgtatcaattttgcttaaattgaagtagttgtctagttggaacattaatgactatcagttctgtcgctcatgaagtttctaggctttcttctttatagttgcttgtatctatagttgattttgaggggattggagagtaccacatattctttgaagcatgttattataagtaattttctttcctaaaagagatccctatctaggg

SEQ ID NO: 10325 - DNA, 468 bp, Arabidopsis thaliana landsberg
gaacttcctcgaagagagcggaaatgatttgaagaaagtttgaagaaaagaagaaaaatcagcttgctgaaagagggacaccgaactatccggtgtgcaccggactgtccagtgagtgcctagagtttacgaagagaagctagccagtgtaagaaagagaacacactagattgtttggtgtgcaccagactatccggtggcatttgtagtggcgacaacgaactcagcggctttgggtttttggcaagcgagagcaccagactgttcagtgtgcaccatacattctaacgatagcatagcagcaatggtaacctgctaacataggactgccacctaatgggtcagaacggtaacctgacaacgcacaggacatacactaaagagtgtctggtgtgcactagacatgcactgttcactatgaagtgcaccacctgacaaccaacttttggccacttactccaacgacta

SEQ ID NO: 10326 - DNA, 1543 bp, Arabidopsis thaliana landsberg
tgggagctccggcgatcttgacggaggagactatttatccaaagacgaaatgaaattttcatagaagcttcaccgcacttggagaaaaatgaaactgacctatacagaaccttcactatatatctatgagcatgtaacacttctaatatagttcacttcaggcaaggtaattctgctgaagaattgagcaacaataactcacggagctactcggaaaaactcccaatctaacattctttgctattgtcataataactaacaaggatgacacaaagttgaatgcagaagaaaccttcgagcagattatatgcttggacacatgatgatatcaaaagaagattgagaaaaacagaaacttttacctgttcttagcaatgtctaagaactcatcgggatatctacgacgaaactgctgttgccaattgaatctgccatagagcaacaaaatcaagaccaaaacgtgatcaaaatcaaaatgaaccagagagtaaaatcaaaatttcggtgctcaatgactcaaatcttattcattccgcaacataaaaaagcagtctttgaatcacacaactatacttttccccccattttctctcaaaatctcaccattcctcaaccaaagaaaaaacagaacacaagcaaagcgatgagagagcttacttgaactcctggaaagcgtaaacggcaggatccggtttgggtatcacaacgcgcaatctctcgaaaagcaccgaagctacgatcttatcagagctcgtgcaaaaccctcgcctgctctccaagagaggcttagctagtagccgcaaagatgatctcggcatttctcaatctcacaacccagaaacgaaatcgagtttggttagagagtgaacgccggcgcttgagcctgagagtgagagggtttttccaaatcccctttcaggtaaaacaatttcgacggaatcgaaaaattattggtttacataaccagaatccggtttgatctaattaaaattggattacataaccaaaccagaatccggtttgctatgcattcggatagatgaaaatttggttcgttcatgtaattacggtgttgacaaaaaaagtaatagatatttagattacctttaagaaaattaactacacatatatttcatcggaaaataaatatttaagatactggtataaaatctgtgttatacatagctgaatttttttattttatttttgggcaaagttacatagctgaatctgatgaagaaattgtaacattatttcgactcatacatcaaaacataaaactttagtttatcacttaatacatacactttactgaaccataaacttatcaatctacgtaaagtcttgggaaaacaacgcgacatgtctcggactatgcagaagaatggtccgtgacaacactctcttatcgattctttttaaatcgaagcatctgtgtttttggttaaagtatgttgtgtggacttgactttttttttgtgtgtgtggtccgaatagattattaataaagcaaaaacaaagaagaagcaatgggtccaaataa

SEQ ID NO: 10327 - DNA, 970 bp, Arabidopsis thaliana landsberg
catgagcactgcgactaggccttcgtcttcatcgactaccatcttagaaaatcctgtttctcaatcacagcctacagaaagattagtgcttcggttgaacaggaagaagaagaaagtttcatggaaagacgggacggtggacaacgagtttatgcagaagaagagttcaaagaaatgttgtatatatctttcataaacaaaagccctttgatgaggatgacagtgaagaagaagataacaacaaccatcaccatcaccatgaacactccgaatcttgtgaggcatcttcttctaacgattctaaagcatttgactaatgaatcagggtttcgtatcactatatagaactattgaatggagatcattggagaatggagaacacatattcgttttgaggttttggtttcattttcttttcttcccattacccaacagagattgagctatatgtacatgtaatcaacctccttaaagctctgttgaaggaatcacaaagttggtttagtaatgagatacttctgtcagacatatcgaactaaaactttcataatataatcaaaatatctcatttaatatcttatataaagattcaactaactttactattttttcaaattgcatggatcttacttcttagatagtctttatgtacaatcataacagccgataataaaattttgacaaagaaaatcacttttaattttcaaggatcttttcaggcatcagaacagtgctttatatcaacttttgcaaatctatcaagaaaatagtggtcatggatgaaatgattaacttatatgttcaatgaatcgatatatagtgtgttgattagtgatcttgtcctgatttggcttgttgcaaatatactatgtgaaaggaataaaaagttgtactaacgcctttgtaatagtgccaggatcacctcttgttttgggcagtgatatgaaaccaaaaatttcaatgatcggaa

SEQ ID NO: 10328 - DNA, 433 bp, Arabidopsis thaliana landsberg
  unsure (1)..(433): unsure at all n locations
gatantgcaagtgagacgttgtttgttagagggagaagagagacatgttcccttcacgtgattgctctatcaggatataaattaagcttagagcaatatcacacgtaagaatagataacttaggaagaaggaaaaatcatagtaaagtaaatgagacgatggatgcagtgatttatctcgtggttcggccaaagcctacctccacaaaaacaactcaaagacaacgctcacatctctcttaaatcattggatggcgtggtcgcaaagcgtcacagcgtcgttgtgctcttgagatgcttgggtactaaatggaggcgcttgggtcccttttatagccccaagggacctaggagcccgtgaaccttcatttgcaagctccaaaacttccatatcttcgtatgcatcagactgccttggggcacaccggataacg

SEQ ID NO: 10329 - DNA, 966 bp, Arabidopsis thaliana landsberg
ggactggtaaagggtagtgagcaatgtgctcttttccttgagagccttgagcttaagctcatcaaagtagtcaagaaccacatggttcataagaatgttcttgacctcttcctcgggtctaccagagatggaaccgatagcatcgttgttaagggccagcacggtgatggtctgacgtttgttgataattggtgtgagctcggtcttggcaagaagctcggtcatggtgctgaattcagggtatttctcgagcactcgggttatgttaaccgctgatacaatggatgaaacagcgagtaagatggtgagacagaggagagaagaggagaccttgagacccatctttgggtgtctttgtttattacccttattattctatagtaaaagctcaaacctcaaagcctgagtttgcaataagaggatcaggttgggtatatatacagaccttaagaggagctcaagattaatggtggagagacatttacttatatttgttttggctaaatttgaacatgactttattgttacctctatatttggctttagactgttttatttttacctttggttctgaggtctgcgttattgatacagagccaacgtagacaagtccatcctaatctttattaagtcaattcttcaacaacttgaggtccgaagctagaatcaggaagttgtgacagggtcataggatgttttattttttttattttatttttgaagatatgttttaccaacaagaaaaaaggaaatacaacaataaaaatgcttttaagaagataataagaaagaaaggacaatatggaagaaaaaaaaggaaattacattaacgcgttagaacaaattatcctcaagagttttcttgtttatataaacataacattacaccttcacttctccacaatttcagatttcacaacaatctcctctcccatacgactaatcttttctgtatcaacagaggat

SEQ ID NO: 10330 - DNA, 2040 bp, Arabidopsis thaliana landsberg
  unsure (1)..(2040): unsure at all n locations
caattctgagttatctccagctctgaaaaatcaatacattgtggagtcttctggaacatagagatgacttcttcttcgacaagtccacacttcttcaatgtttcgaaactctgagttatcttcttctccgagatattcagaaaagtaggacacttcttgaacatttcccatacatctctgacatcaaagcctaacgttatatagatattgactctttcttctaatgtttcgttgcttaatgtgcaaacaacgaccgtagcatcgaaaatttttggggcgaaaggatcaaaacccatctcaataaccttcctaatagaattttcaatatatggataaagttcgcaaaccttatagaagtccgaacgcgaactcgttagtgtaatggttttgacaaagtcatagtatgtgatcatagatttttcctcttccatcctcaagattttcggaactctagtaacaatgtcattgagcctagagcttaaaatttctctggactccaaaaacttaagcttggggccaagggaattctcagcatcttccataagtaattctggatcagtcgtaattatgcttgatatctgagaatctgtgaaatcataacttcttagaagattcagaacagaattgggattgcacttgtcctttgagctgacttccttcaagattgattctgcgaattttatcggtatacccactgaatcaacaaggtaagagaccgttaatttcggctctttttgagcatctctagggatcacatcatcagcactaacagaggagaatgaattggagaaaacagagattacgttttgcacaagtttcactgaagctttcatattacgccatttttgcaactcggtaaatctttttccaagaagaattagagaatacatgacaaatgacaaagccttttaagcacaattatgaatgactatttatgaatctgcttctctcttcgttaacttacaaaacaaaacaaaatcccaaagaaccaaaaatggaagaggcgggagacaaaataaagatgttttagggttttgacttttgacaaaataaacgtgtaatgcgcaacaagtgtttgaattaataagataataaattttcaaccatcatttaaaaaatctttttcttaaaaattaaattgagattaacaaactaaattatatttaatcaaaatatcaatgatattcgtaactaatatagggaacaaaatctttttgtactagtatattccttaaaattcgattttatctcttcttttctgttttaaaaaataccacatttattaatctatatatagacttcacgtcattaatcataattcacaacctcagaaatcttaaagcgagaagaaaaaatcactaaacatgaagaatctggtcatatttgccttcttgttcttaagcatcactactgtaatcaatggtggaataacaagtaaatttgtccgccaagctttaccatcgatcgaaatgtctctcgacactttcccttctcctggtggctacaacactcctgaacaggtatgattttctcatgttaattaacttagatcataaaaaatttctttgttattttagagctttgatacagaaattttgttttaagtttttaaagaaaaaataattagcacttgattactttaacaataaaatcttaacccaattacccaacctttgaagagtttcctagcgttttaacatttagcaattatatttcttatgataacgtaaacacccaccaccaatttcgttctacaaaacactattatcgtttttttgtgtcattgtgtgttaatgtgtgttttcttaaaatgagttacctgatggcttattgtttatatcgtgaccaaatgcaagctataagatttttttgtttgctataagattcatattgataattttttatatgtttttttttaggttcatctgactcaaggagaccatgatggacgtggcatgattgtctcgtgggtcacaccgttgaatctcgctggttctaacgttngtacctactggatcgctactaatggtagtgacgtaa

SEQ ID NO: 10331 - DNA, 1194 bp, Arabidopsis thaliana landsberg
tctgtaatgttgttctcttcttctgaatccaataagatatttaaaagtaagatatttcgttctctctatttccaaatttgtttcttttgtggttaagagtaattacctcactttcttcataaactggttgattttgtaaaagttcaacttttatgcatcaaaagttccgatctttgtgtatcggcttaaggaaacgaagtgacaaatcatattcataggaaaagactttatatatgtaacagatcattgacgaattacatcaaacacttataaaaaacaaatgaacaaatcacaataatacccaccgaaacagaaccataaaaccaacatttgatattgatctaactcaacaactctcaccacaaaacaaaaggacacaaactttaaacttggaacggccatggccagtccttaggattctcctcactctgaaccttaccagttctcttcatcgcaacgccatcaccaccatcgacataagcatagtacttcaagaagaaagcacacacaagaacgatccaatcaagacaaaagatcacaatacaaagcccaccaccgagtttcaagatcacagcagcatcttcctcacgcacatacgacttaagactcccgaggaacttagacgtgttggtgaagatgagaacagagacagagccttggaatatagctgtgagcacagtggctaccatgtgagcagcgtaccaacggtttcttccgcaagaagcagcggcgcagcctgagacagcagcggcgattgtggtggcgtggagaaggatgaggaggaatccgcagatggaagggattagacggagagagagtgtgaggaagatacaacttgaagcagcaccgagaaggatgtagttggagaaaaggaagatcttgtgtgtatggtaatgagattcttctacgggtgatgatgaagaaatgaaacccattattgattatgagtttctccgaattgggtttttggaaatttcggattttgagaaatgggtttcgttttctttgatgatcagaagaagaagagtgtgtgatttgtggatttgggaagagcacagcgagtttgtttatgtagaagttagtgaagagagagattgtagaaggtaaagtttctaaatatgaccgttgttgaatctggaacggctgtttctgtaacggctagtctgatttaataaggtgggcaatgaatgagta

SEQ ID NO: 10332 - DNA, 453 bp, Arabidopsis thaliana landsberg
  unsure (1)..(453): unsure at all n locations
atgctgncgaatctcattgattttcgggtcagctttctttcccttcctgatatcttgctctacagtgggttccaactcaattgtcactccttgagtgtggtttagaaatctgagactcagcctgtcgaattcctttgctagctcatatggcatcgggtgagtgtccatcatgttgacttggctctttctgctcaaagcatctgcaaccacattagccttgctagggtgataatgtatcaccagctcatactttttgattagttccagccatcttcgctgcctcatgtttaactctgactgcgtgaatatgtatttgagactcttgcgatctatgtagatatcacacttctgcccatacaaatagtgcctccaagtcctgagtgcatgaactattgctgttaactccacatcatgagtgggataattcttctcatgaattttcaactgctggaa

SEQ ID NO: 10333 - DNA, 1205 bp, Arabidopsis thaliana landsberg
acagtctgcacgatgtgatccacctcgcctataattatattttctagacacaaatcaaacattatccatctcgtggacaatggtttttaagttttaacgtgaaatatgctcgctatatgtccataactacagtacatataataagattatgtaacaagacgtaccggcatgtcacacatagaatttctcacgtgtattgagaacctaactgtatagttatgttttcatgctttttcttctatttcgctttgcgttgagacgattatgaggaatgatgttgaaggaactacttttccgcgacaagtccgtaattaatttatttttagattcttattaacaaaatccgaagattttttctggggaattcaccaaaaaagaattctaaataatataaattcacaacaatatattttattcaaagttcatatgtataattttacattgagttctttatattaaaaaaaacattaattattacttttagttccatgtgatatactaactccaagatcaataaagggtgatgaaaaggtcttctataagaatcagggtcaaaattaaaaatatctaaaaataaaaggtttagatagcaaagttttcctggttcggtctgttctctgttcctttttatcttcttggcgcttttgaaaaatagaaacccgccactaaagcatcaatcttccacgtgtcccactccagtgctctgtttcatatcttcggagacgtcaatctgacttagggatgcttcaagtctaccatgtgatttatttttacgaagtaaaattgcttaccaatggctgtttctcttattaacttaaacaattgttccaacatatttgggaagaatgaatgtatagaaggttcccatttctttctctcccaccagtcaagctccatttcagtatgttggcggaggacgccatcaaggcagctgtgaaagactacaaggagaagtgtgtgaaaacaaacggttatgcaacagccggataaaccacacaggcttgattttcttttaaccaatgagtaaaccataacgtgtatatgacggtgaaaacaggggagaagtagaagaggatacatacaacctatggtttgtaatgaaactctgttgacaaaaatatccaagaatgatttgcttttgccctctagttgtctaatgttctattgtgttggaatggtttctctttacttttttggaaggatgt

SEQ ID NO: 10334 - DNA, 828 bp, Arabidopsis thaliana landsberg
ctcctcttgctatctatttcccatattttttcaataaaaaaattgattgcgatattagtattaattacttgaagtaaatttcaatggttccttgttaatatgtagtgacgtgatgggttaaaatgtggaaaccatagacttcaggtgatatttatcaactgcccttttgcttaagggattacaaatcaccgtacgaagacgtgaattttcttgtgataccttaaatttttctttccttaagaatgataactttagctagttgtcatttttttcttcttgtaataatcgtactacatcatgggaaaagtttatattcttttgtaatggtaattatagtagcaaaatgcaaaatcatgaaagacattttttttgagtagtacagatttatgagtggtatagactagagtttagactatggtcccttcaaaaaataatcaatgctaatttttaaaagcaacctatgtggacctgcattgcccaagtatatcatatatataaaagaaaataaattaataagttaataattaggaaaggaaaagggtttctttgtagatatattttcacgatcatggcatgcatgcacacaaaattacacctaacaaagtgatttcattataataataaattattgtaagcacacttataattttccactgtcagatacttattttaactttggctgaagcttgtactcaaattttggagtaaaatacttgagtgtttttcttaatatgcaacgtgtatacacaagttcactacgatatgtcaagatgtgagtaggtgtactagtactactgtactaagctatttacattacatactacataa

SEQ ID NO: 10335 - DNA, 821 bp, Arabidopsis thaliana landsberg
tttcagtctttgaaattgtatcatcgcatgggatattcttgtggttgaatgtttcttcatatttataattagattagatattttctacttccacacatttgtctctttttctagtccttgtaacaaaacattgaagttttttttccctcaacgtttgcatttcagtttttatgacaatttgtttcttcattctctgcagacaattcttatagtagctgttggttcttgcggagttgtgcagcttggctctttgtgtaaagtaagtaagatgttctaactgtatgcggtgttcaaagtagcttatacaatatagtaagagagctttcccattgaaaatgtaaacatttgaatgcctctgatcttcctgtatacttttggtggaacaggttgaagaagacccggctttggtgactcatatcaggcatttatttttggcacttacggatccactagcagaccatgcatcaaatttaatgcaatgtgatattaacagtccatcggatcgggtaatgatctttctcattcaatgttcgtgcaaaattggaagagatgtgatttctgagtataaccatgattcgttgtataattttcctgcagccaaaaataccttccaaatgcttacatgaggcatcccctgatttctcaggagaatttgacaaagctatggatatggaagggttaaatattgtatctcaaaacacaagttatagaagtaacgaccttccatacaatttcactccaacatattttcacatggagaggactgctcaagtaattggtgggcttgaagcagtgccaccttgcatgtttggaagcaatga

SEQ ID NO: 10336 - DNA, 1137 bp, Arabidopsis thaliana landsberg
  unsure (1)..(1137): unsure at all n locations
gttgtaagtactctttgccctttgctacttaaatgcaatttaaagcttgctcgtcttgaagtttgtttgccaattctctccatcaacaggcttgtcagtttctccgtgttataacattctattcgactcagcttcctggccctaactatcactgtcgagaggtaaaagctaaataaaggtctactaaagagggattcatccatattcatgtgtttattctggtgagtctcttgtgttaacttacagggttctgagcttgccaggttgccaaggccacataacgttcttgaggttctcttgctcaactgtgagttctaatcatttctccttcccttaatacaatttttggacgtatgtttcttctagttcgtatgtgatgatacgctgatcttttcagttcctcgtggtgtgatatacggatgtggagacctgattttctcatcgcacatgatattcacactagtctttgtccgcacttaccagaaatacggttctaaaaggtacaaagtttctctagtcacatggtaaaacaataaccggacaaaataatagcttgtaaatgtctctctcacaggttcataaagctgttaggttgggtcattgccatcttgcaaagcctcttgattattgcgtcccgtaaacattacactgttgatgtggttgttgcgtggtatactgtgaacttggttgtcttcttcctcgacaagaaattaccaggtctgatcttttacttgagtgtttacttgcataaaacccacaaattttcttatatgattttgttttannnnnnnnnnnnnnnnnnnnnnnnnnncattgctccctgtgatctcaaaagacagaaccaaagaagagagtcacaaactcttgaatgggaacggtgttgatcctgcagatcgggtacgcatttgaatttgtattcagtgataaatccgactgaaaccccaataattgatgttaatgtgtataaatttccttgtggtatttcagagaccgagggctcaagtgaatggcaaagacagcaatggaggtcacactgataatgctactaatggcacatgagatcaatgctagactctagttttcaggtttttgattgttgttaaatgttgatgacatcatattgatccagaaaagagg

SEQ ID NO: 10337 - DNA, 574 bp, Arabidopsis thaliana landsberg
  unsure (1)..(574): unsure at all n locations
gctctctttctggttatatgttcttagtaatagctaaatcttacttagacagtttttgtatcagatcagccgttaggttagttcatttcgatattaacactccttgcccttctctcttgcagtggactttccatccattcattctgaaaaccaaaaagatatacaccgttttgatatggtgcagagttctagcattcttagttgtaagttcctgccttaatagttatcgctagaactataatttaagcttgttgagattactttgtcttgttaatattgaagtttattgatgtttctgttttcaggcctgccagtttctccgtgttataactttctattcaactcagcttcctggccctaactatcactgccgtgaggtaaatcaactgagatacgtacatacacaatgtctcatctgtctaatcggttaagcttaattttgcgcacttttttctatagggctctaaagtttctaggttgccatggcccaaaagcgctcttgaggttctcgagataaccgngagtctactacatatttctctttccccagtcctagattgtgttacaggcattt

SEQ ID NO: 10338 - DNA, 1715 bp, Arabidopsis thaliana landsberg
agacctagacaaaaccgaaatgatagagtgcaaagcggttgcagcgatccgcgatttgatctgcccgcgtcttggaatcatccgaagttcttcagagtgatctccttgtctccttctcttaacggaaacacctgaacctcccttcaccagttctccgttcatagtgtatgtatgaaataaaaccagtttctttctcagcacgtagatttaccttgatctaagtatctttcaatgtttgagccttttatagaggagcggtagagatacatattatggtgttgctagtggaagctgcttggtttcttgagtcgctgacaggttaagtagttaggacacatgccaacttgcaacattggttacatgacaaaataaaattataaaaattgtttttaaatgatgtttgatggtattggaccgtttgtgcggtcggatgttctcttttcaatgttttccccgacatattataggcaacagacgatgcaatgacaaaagatgtgtttaaacaatgttcgagataattgcatatcgaactcatgtaaaatatatctagggtcgagacacatacgtttacgcaagtttgtgacaacagaagaaaaacaaaaaattcttttctactagagatatttttataaatcaatatgtctaccaaagaaacatatttttcttctcccaacatttttaatatattttaatgaaaaaattttcttgcaacattatgtaaaatctgattgattttcctggaattttcttacggtttaacgaggtacatatatttagatagttgttaattatatgtaccaagtgacttgccaagaaatagaaagacatagtcaaagtcaagcatctatatcgggtttacaatttaccgaacatactaattaatattttaaaatcgtagttagtaagcgtagttaatctagttttccctgatgcatcgtaatatttgactaaaaaggtataataaaatgtaatgttatacgtaagaaaaaacaattacgcgtacctaactagatatcttatcatatataaaataaatctgtccgtaaagtttaaaatttctgaaaacaccgacctttccttattggtttactaattccagatatatcgtacgttcaagaccggggaaaacatatatcatgtgaaatttcatgaaactttcattctatttaatattacaaattgtaacatttaatttgaatattcaacattacatatgattataaatgagagtcccgagaccatttctattgtgctaccaaaaacacaaagactaaagaatggatcaagagaaggtattggccgtgaagggcagagctccgccccaacatcaagtgtttgtaagtttccgaggcagcgacgttcgctataacttcttcagctttcttaaagacgcattgataaagaatggtatcaacgtggtaacggacgaggacgcacctaggggaaaaccaatcgatgagaatcttttgaagcttataaaagactcgaggatcgctgtcgtgatcttctcggaaaactatccggagtccacttggtgcttagacgagttggtggagatcgagaaacaaatggatcttaagatgcttgattcttgtcctatcttttttgaggttgagacttgtcacgttaaacttcaggtcgcaagaagtactttcaactacaatctactgcagttggagcacgatgagcggaagaaagctaggcagattagtaag

SEQ ID NO: 10339 - DNA, 1724 bp, Arabidopsis thaliana landsberg
  unsure (1)..(1724): unsure at all n locations
cattagttcatgaaagtcataggcatccactatttctaacatccaaaccaggagagaaaatacgttgttcagtttgcaaggattcagaagagnnnnnnnnnnnnnnnnnnnnngactttgctttgtgtttctattgtgctattttacctcaaaaggtgaggtataagcatgataagcacacactcactctttcttacgggaaggagacaggtacgtcttggtgtgaagtttgtgaggctaaaataaatctgaaaggacggttttatatgtgtaatgagtattgttgtgtcaccctacacattaaatgtacgctaggggacttacacatgagcccgggttcaacgtggatcacctttggtaacaaggtagatgttctacacaacagtaaccgtatgtctcgatctatttgctcctattgtgtgaaacactgtccatataagatagtttacatgtgttctggattgatattatgttcccaaggttgtgtagtgcgtagcatattgcagaaacgtggacgttacagagagttagaatttttgagtagatatgcttaaagatgtatcttgcttttgtatcagtggtgattcttcaatgaactttttcttttcttttccaaagtgcttaccacacacatacatagtttagtaactttaattccagccaaatttatttggatagaccataaaactatactactaatttccatttcattttgctttatttccaacaattacatgcttaaaataatatcaaatcagcagaggtttaggaaccgggcactcctcatgaacaagaagcttcaacagctaagctcttgacgacgccacgacaaggttccccgaacactctagtcgatacttcaacgttgcaactcctcaatccaatacatgcctatcaccgtgtcacacaatccaagtataaataaattttaaggaaatgaaaatgttagaagaaaaaaaaggggtaaaagaatgagtaaagaccttttggacgagggagagagatcgagagctattgcaatggccttgtgtgaagctaccgcaagtacctttgggtgtaccaaagcttgcaaattttatagaagatatcacctgagtagagatagggcatttcaacgaaagaaccggcctggttctgtttctgtttgagatctttgagtcggaagtccatgtgtccaccggtggtgaatgagactgtgacaccgttagacaaagattgcttcctgtttgttttgtcgcaaatgatatttgtgttggatctcctcccatctcctcaaacagaacaagtatgttcccgctcggttttagccacgagcgaggtacatgatacctacaaaagataacttaggcttgaggaagcgttctattctgctgaatgatgtaagctggtttagtacttacaatgtctgtgaaggttttccacagttcttgaggcatttgtttgcacggtaagaacctctatagtcgcatgattctgtacaaccgccatttccagcgatactagttggccagtacctacctatgctctgtccattcacccatgcaataccctttcctgtacccgtgaagtctatagctactggctcgctcccagaaggagcatcaaatgtcgtctaagaaacataagcgattgttagagttttcacaaaatattttggaaaatctaactaatgtttttgttggtgtataatcatcaccttgtaccaaataagtggttgtttagta

SEQ ID NO: 10340 - DNA, 324 bp, Arabidopsis thaliana landsberg
  unsure (1)..(324): unsure at all n locations
agaggcgcaccggacgctgaatagtgcatgtccggtgcggcaccggactgtctggtgccactagaggacaaagcctccaacggtcaaaagctctagaaccctaacgattgggtgacttggctggctaaccggacagtgtctggtggcgcaccgtactgtccggtgcgcccatcgacatcagcctgccccaacggtgatagggtgggaatagnctaataagcgcttaaccattcaagcaatacaccatttacatataacaaactgtgatagtgatgaatccacttttgatatcaagaatagctccacaacacactataaatgctc

SEQ ID NO: 10341 - DNA, 1424 bp, Arabidopsis thaliana landsberg
cgatatgtctgagagtaaaacgaggattcagtcttacaacgaatcgtaaataacacggagatgcaatagcttctcgcttgtgcttggtacacatatacagtacatgtgtttctacccacacaagaagataaatctcagtgaagttactcacataaatctcatttatatcatatcttgattgcaaattctgaaggactccaggttcatgtaaataagccagccttgtcatatcttccaccccagatgcgggcgcttaaacatcttttggataaatattggaatctttaacaacgacctgtggtttccaaagaaaaaaaaaaggttttcgtaaaagcttttcgtgcttccaaagtcaaacacagattgcagaggaacaactggcaagcctttcaagtgaaatagcaggataatagagcacatacttgttttcctgaagcgcagagaactttgatctggtcaccgttgatctctacaacttcaccatctaaccatgcttcatcggggtcctccacccacacatgggacccaactgcagggttgaaggtagcaacctgcaggaaagaaagggtgtcaaaaggaaataaaatctccagaccagaaatgcaaacaagaactggttaagctatttcacttcgttttaacagttgtaaacatgatgttagaaagcagaacgtagcatcacgctcaaataacattacaacaaactcaaagcttcgaagattgcatctcctaatgtgcaatcaagaaacttgcatttaggttcaaatagcatatagaatttcggcttttaaggtaatttgaaaccgtagcaatgtacctacacgtctctgtaaccactagtagctaaatagagaatcagacaagttataggactaagcaccaaactctatcagacacgtctgaattgaagtcaaatctctgtcgtacagggactcaacgatgccatgactcgaaacagctcaaagattgaaaaaaaaaatcacaatcgccaaactcaaaactcatcatcaattactcaattacaaaactcagattcaatcaaaaacgacatcacacgaggaaataaatcaaaacataaaccctatccatcatcataaaacgaaacgaatttaaatgcaatcacgaaaaaaaaaacatgaaaaacccatgaatgaaagaaacctttaccattattgtttaacgaataagaaactcaatgttattttgcttattctctggatctagctgaaatcagagcaacattgaacttcttctttgaactaagccttccaatacaccgacaaatacaccgacaatgcgtatacgagaatgcttcaagaaaccagattcgatgcccagaaaaaataaagggaattagcaaaaccgaaacgcgttgattcttctgattgttggaatgtcgcaaactttctctgattataaaaaaa

SEQ ID NO: 10342 - DNA, 1290 bp, Arabidopsis thaliana landsberg
ttgcttggattgaacgaaagaattatttagacagtatcaaggtagagttctctcgcctcgggtgtggaaaagacagcgtcacaggaacatacaaactagtgtggttacgtaccaaaacaaagaagaaaataaaagaggaaacctcatcgacgatgacatgcgaggttttcgatttcgtttctacgaaatggaggcggtgattccacctcctcctaatcatgggataaagcatgagaatatgtctttctgataccaaaacctgtacaagatcacagcatacaacaaaatacacaatcttatatatgttttttacaaacccacagccattcatatagtttctcttgtcatcttggacctgataactccatggcttgaaccagcaccgaggaatcatctgtaagatccgaataacgttcagaggaagaaaactcgttaggtttactgtaacttctattggtttctgctctctgagaagaagcttcccatttctcaacaagaccatcgccttcaagcattctcacaacttcagacatcttaggacggtgaatgggaagatactgtgtacaaagcaaagccacttgaaccatttcttccacttctattctatcgtagttgctcttcaaatccttgtctactatctgttctagcttcttctcttgttgtagtttctttacctacaagtaaccccaaagaaaaaaccctagaagtgagtatttttaagctaactgaaacaagaagagaaaatgttttactcttttacttcttacccaatcaagtatcgctcctctttggtttgctgcttttccgaattcaagagctctcaatccagtaatcaattcgagaagaagaatcccgaaaccgaacacatctgtcttctcagaagattgtcctgttgagagatactcaggtgcaatgtgacccactgttcctctcacggcggttgtcacatgcgactcctcatgatccaaaagcttagccaacccgaaatctccgacaacagcttcaaagtaatcgtcaagaagtatgttcgcagctttgacatcacggtgaatgatctttggatcacattgctcatgcaaatacagcaaccctcttcctgctcctaatgctattcgctttcttgtgccccagtccaataccggtttagctgcaaaccattcacacgaatcgtaaaccgggtcaattcatgtaaagaaatcaaaatcaaggtgcttaattaactacctttgagacgagaagcgaaactgccattggacatgtaaggataaacgagaagccgtgcagagggag

SEQ ID NO: 10343 - DNA, 1108 bp, Arabidopsis thaliana landsberg
acatagagaggagacccacaaagtgggatataaagccgttttagacgggtgctttcccaatgaagtggaccactccacttggaaagataattatttcattttctgcagaacatttttaaccattacatgtgaccacaaaactctgtcaaaaccccaaatattaaaaaacttatgtttattgctctctctctctgtttctcactactcttactagactcctccatagctaagctccacctactagattagcctccacgcgcttttattattactactgccacagtggcaaatccaccttcttccctctcatggccaccacaaccatcatcatcttcaacacctttcgccgccgtctcaatcccacctgatcactcttcctcctccgtcgccgccgttggaatcagtactactccagactacatgttaggtcttcgaaacatcattctcttatctccaccaccgacgcagataacacggccatctcttcctccggtaaacttcgcggcggtggaagacaacaacacagttggagagaaagtatgcagagactgtggaaacagagcaaagaaagagtgtttgttcgaaagatgtagaacttgttgtaaaagcagaggatacaactgtgtcactcacgtgaagagcacgtggattccttcttctgcaactcgttcttcatcttctccttctgagaggaagaagaagctcaaaatcgataaacagagttcccctaatgtctcgctacttccgacaaccacttctcgtcaaggtaatgaatcttggaactagaattgaacaaaaccttttttaatctgaattttgcgtttttgtgtggaaaattgcagagagaggcttcagagaggggttaccggggaaaattgaagctccggcggtttttatacggacgagagtaacagcgataagcaacaacgagcaagcagagattggttatcaagcaacagtaactataagtggtcatatcttcaaaggctttcttcattactatggtgttgatcatacaaagcttttccatgtctttctcaaaaatgatggaaactacttcataggattctgtgtataaagttctctgttttcactcacagtttttgcc

SEQ ID NO: 10344 - DNA, 1957 bp, Arabidopsis thaliana landsberg
ctacattgacaaattaacctttaagcaagccaaagaatggagttagaaactagactccaaatcatcagcattccaacattcaaccaaacctaagtgcaaccatggcaataactgtggcagctctgaagtaaacttctttgattcttctttccactttatttgagacttcttcttcgttgattgttttcctattgaaattaacaagggcttccctgagtctactcacagaccacgagagcaataccaaactcaaactcattgcaccctcgaagaattggtttgcgcaaaagggtacctgcctggaagcaacattacaaacgagaaagaagagcacagccataccagtgccagcaaagccaattgaacactgagtcaaaagctcgaagagttctccacgtgatttctttagagatagcattgtggtttttctatgttgttcattgcctatcatcagagagagaaggctctcacacgcatgaagacggtttcgttcgtagaggtcatattccttatctcttatcttcggattttgtttctttggtgaaggcttgagcctggttttcttcggactgttggaaatcgaaagaaacgttttttaaagatgcaaaagtaccaaaaactagttgatgatattagatacctctttggaggagctagtgtaactgcgtcctcgggtagctgcagagtgtctattggtacttcactgtcgaatctgcagaatgagaggagagcaaaaacttaatgttaaacccaaaaggatgagactcataggtatgaatcaaacttgcagtgaagaattaactaccgctgaaactgcgggacaagccgtgagagctttctccatcttgttgagttccttaatctatgaaactcagctgccgtagagaccaaatcattcaattcagctctgctacttgagaacagaatgttagcatccaccatgagatccaataacggctttgcatatggttgctgagaacttgatcttaaagcatctagacccatcaattcagataggagagacaaatcgaatccttcttctttgagttcttcttctgatctagacaaaaggaactctaacacctcctcttttcttgcatactgctgagtgatccccaagcttaaacacacagggtctggtccagtttctgttaaccacagttcatgtcagtcgaaaaaagggattacaattcggtgaattcaactgaaatttgatcaaagtcacataccatgaacatccatgagtctatgcttcatcatggttgaatcaaactccaaaaagtggttagacttactaaaagaagaaaaaggtttcaatggctccaagagttgtgatttcaggttaaaggagctctccggtaatatctcatattttcttcctccaggattcaccagataagcccggcttgtctgaatcattcatagacataagaaccaaacaaggagaagacagaaccaggacaagaattcaacgagagattctaaacccaagtgttttaaaacagagaaagtaaaaaactgaccttgatgatctcgttgcttcttagctcttgaaggagactaaacctaagtgttgaatagctatgagaagccattgagaaaaaactgacttcttatttttttttctcttcttcgtcacaaaaccatggaaacaaaacgaaaaagcttatcgtcagcaatctcgcctatatatgcgtcagatattataagatttgtgtaaatcttttctttattcagttttggctggtgaccaaaacacactttgagtttttaaatatttaccctttgaggcacttattacttaaattaccaagaacatacccaatcttttcaataattacataaatatacctttggtttcttatattctcgaaattaacccaaagatcattagggtacatacattctttactcgagagagagaagttctaaagtcctcaaatcccgcaaagctttt

SEQ ID NO: 10345 - DNA, 737 bp, Arabidopsis thaliana landsberg
  unsure (1)..(737): unsure at all n locations
ggatagaattataatctgagataaagtttttgtttttattggtttcattctgttctgattattgaaattggtttggttcctttgtgtagaacttaatgcctggaggtgtgaactcacctgtacgtgctttcaaatctgttggtggacaaccagtggtgatggattctgcaaagggctcacgaataagagacattgatggaaatgaatacattgactatgttggatcttggggacctgctataattggtcatgctgatgatgaggtttgtttctttccagttttgatgatttttagatagctgaaagtttagtagttgatacggtgatgtgtctagtgcaggttcttgctgctttggctgagacaatgaagaaaggaacaagctttggtgctccttgtctcttagagaatgttcttgctgagatggtgatttcagctgttccaagtattgaaatggttcggtttgttaactccggtacagaggcatgtatgggtgtgctacgtcttgctcgtgccttcacagggaaacaaaagttcatcaagtttgaaggttgttatcatggtcatgcaaactctttccttgtcaaagcaggtagtcggtgtagctactttgggtctacctgactcgcctggggtccccaaagcagctacttcagatactttaacagctccatacaatgatattgctgctgctgagaagctttttgaggcanacaaaggagagattgctgccatcatt

SEQ ID NO: 10346 - DNA, 875 bp, Arabidopsis thaliana landsberg
  unsure (1)..(875): unsure at all n locations
accggaatggtgttagttgacaaatgtatgttccaatcatgtgtttacttccttctttgttgagatgtcaactttgtttggcatggattttccttctcctgaaacaagaataaatatttgcatttgtcgttttggtgatcactaatgacgtgtcaaaaacttggctcttttggggctgatccggttttcgtccaacgaatacataccggaaaatatatccaaaggaggatatgaattgaacccacggtttatcagtttataccgaaatcaagttctttaggtgttttggttatcgcgactttgttttattataacagagaaacgaaaaaaaaacttagctaaagaagatcaaaaacttttcttagggctttggagattcgagctcgagtgtacatacaagtctggtgatatccacgaaaatcagaagacgagatgctaggagaatgtgggaggctatcaaagacagagaaaccggtcgaattcgttccaattccnnnnnnnnnnnnnnnnnnnnnnnnnnnnntttgtctctccaactctctaatcgaaaagactttgtttctcctcatcgtggctccgttaactcccttcaggttctctctgatgtttccttttcttatccctgactgaatcttgtttatgtagtttgctgcttctagagtaatgtgaattgatcagctgcttgtgttgcttactttatgtattaactgtgttatcaggttgatttgacggaggggagatatcttctctctggagcagcagatggttcagctgctgtattngatgttcaacgggccactgattacgaggcaagtggtctactngccaagcacaagtgtatatttactggtcgacagcaacatgaaaatggacat

SEQ ID NO: 10347 - DNA, 748 bp, Arabidopsis thaliana landsberg
  unsure (1)..(748): unsure at all n locations
ggagttaacggagccacgatgaggagaaacaaaatcttttcgattagagagctggagagacaaaatccggcgggatttgaatcgattggcgaaggaattggaacgaaatcgaccggtttctctgtctttaaaagccttccacattctcctagcatctcgtcttctgattctcgtggatattaccagactttatgtgtaaatatactcgagctcgaatctcccttgtccagcaccaaaacccctaacaaaagctttgatcctcctccttttaaagttttgtgttagaaaaacaatgtcgcgcgataaccaacagcaatcgaaagaacaaaaccaaaccacctcaaagaacttgatttcggtattaaccgactaaccgtcggttttcatatcatctttggatttattttccggtatatacagtagttttaatagccaattaatttgttgatttaatttttctctcaattttttatttttttcgtagatttaataatttaccccaacaaaaatacatacagttagtcctaaatcttcactaatccactaaaaacaatatgtcaaagagaagcatccatatctttacttgctatcgaagatgtgtgagcttataaaaagaattttgccgagaaaccgggataatagctaactgaggaatcgcatgagcatattgaatctctcaattttcccagaatcttcttcactgcctcaaaagaaatatgaggctntggcactcacatgatttatacaa

SEQ ID NO: 10348 - DNA, 935 bp, Arabidopsis thaliana landsberg
gttaaatactcaacaaactcttgtattttattcatattttttgcacactagtaatttcaaattttaaaaattttgaacactgagaaaattgcaaatcagaaaatggttatttattccaatgtttttcttacatttaaaaaccgaaaaaaatacaaaacaaaaagtcaattaaataagcaaaaaaacattttagttcttgagaccaaaacttgtaaaagggtttgaaaaaatcagattacgaaaccctagttctctctccggcgaaaaccatggtggcgcaaaacagtcggcgggagcttctagcagcttccctgatcctaactttagctctaattcgtctaacggaagcaaactccgaaggggacgctcttcacgcgcttcaccggagcttatcaaatccagacaatgttcttcagagttgggatccaactcttgttaatccttgtacttggtttcatgtcacttgtaatcaacaccatcaagtcactcgtctgtaagatcctctcgctgtcacattgttttgatgattcttgaattcgtttcttgtacaagttgttcaatttcaattggaatctatcactgtaatcttgatttcattctttgatatagagaagaacagaaaaatacttcattgttgagaaacttcatatacttatctgattcaacattagtctctgttttgctcttatatttggcttcttagtttcctagtatgttttcttcttggcagggatttggggaattcaaacttatctggacatctagtacctgaacttgggaagcttgaacatttacaatatctgtatggaatcatcactcttttgccttttgattatctgaaaacatttacattatcagtcacacatataacattttgctttgagtcatatagtgaactctacaaaaacgagattcaaggaactataccttctgag

SEQ ID NO: 10349 - DNA, 716 bp, Arabidopsis thaliana landsberg
actagtagtcgattcgtaattaatatattacaattatagcgccgaacctccagacttcttcaactacgtgccgttttttatataacgaaccgacacacatcactgtcgttttgaacaccacgtcatcatctccaatcgaggcggacttcacggggcccggcgacgagttcactgggtttccggaacgaaacgatgtgacttccggccataaacgccgtgactcgctccgagactcgtatatcttccatctttagctcttgaagacgacgcacgtactccggcacgtgtaagagatcccaaaccacacacaaacctcctggcttcacaactctcacaatctctccgagcactctcattctctccgccgcagcttccaccgacttctgaccatgctctttccccaccgtgtgaacgaacaccgacgagaccaccacgtcgaagtaattatcgccaaacggcaacgtcttcacatctccttcacggcatgtcacatactcttgcacacctacacaattttgaatcacaaaaacaatgagaatctcaaattcgatttgaaattaggagaaattgatcagttaccttcgagtttagcggtgcggagagtggagagagtggtgcgtttagagcggtctaacccgacgacccgaccggagctaccggttttcttaagctgtgtagcgacggcattgaggaggataccacggccacaaccgaga

SEQ ID NO: 10350 - DNA, 857 bp, Arabidopsis thaliana landsberg
  unsure (1)..(857): unsure at all n locations
ttattagaatgaactgcaacagaatctattacatatatatagcacacaaagcaaaacaatactcaactatacacatacaacaaactcaggacgtgtgatctatctaattccaacattaacactcgagagatcagaaaccaccaacgagcagagagagtccgagcaagaagagccaaacaatatgaatcaataacaaagcttgtccaggaacagaagcacttcctgcattacctgtgtcacaagctccttttttgactacgcgagcgccatggcaagctgcgtcgggacaaccgcaccagtacgtgactccatcggttccacaaaccggatccgcccggaaacagttgattgggcatccaccccgatccttaacccgagggcatacgtcaccgcgggatttatctgggaaatcatccgcagcttgtaaaccgatcaagcagagaactaagaaaaggaaacgaatgctcagtgttaacgacggcatcnnnnnnnnnnnnnnnnnnnnnnnnnnnntttctaaaacccagaaatctaatccttcagaagaaccctagagattcgtggcggatggagaggaggtttctaattttgcgttcaaagaatgattgaaaccctaatttcatgagatttggggattttctcagagagagtttgcgtaaccgtgttgtttgaattggtggtacagctggttcacgcaccgagtaaagcaaaccacagaaactacgcgcagttatttgtttaaaccatcaaacgtcatgtcgttcatacttaaacaactaaacgtcatgtcgtgtatttctacggcgtattgatgcatgttcagcaaacctgggtttttggtttatcaattttttttt

SEQ ID NO: 10351 - DNA, 1024 bp, Arabidopsis thaliana landsberg
aacttgtggtcttatgtgttaatttaagtatatatctatattttataaatatctaactaaacgtttgatatatttttttagagtatattgaccacgacgacccaattcatgagtgtcaggtttgtaaagcttatatgtggtatgatgaacgtattaacaagcagtcaaaagtaaggacccctgttttttccttatgttgtggtcaggggcaagttaaaatttcattcatacgccaaactcctgaattattggttgcattgctaacaaacaatgatgagctaagcagacattttagagacaatgtcagagcttataacatgattttctccttcacttcactgggtgggaaagttgatagatgtgtcacaccaggacgtggtcctcaaatgtttcaaatccaaggagaaaattatcatttaatgggaagtttgaagcctccaaatggtaaaccccctaagtttcaatagctatatattgttgacacggaaaatgaggttgataataggcaaacagttatgaggtgagtttttctattattaaaacattttttgatatttttaatttattatgttgacaatgtaatgtataatctaataactttaactaaacatgcagcaaatccaaggaccctcacaaatataagaagaaacaaccactaagaaaagagctaatccagaagatcatccaaatgttgaatgaagtcaacccataagttgagaaatttcgaactgccagagacagattcaacactaatccagatgatacatttcatatgaggattatcagtagtcgagagaaggatggcagaacttataacgtgcctacagcttcagaagtagctgcattgattctaggtgattttaatttgaaaatggatcatcatgatattgttttgcaagcaaaatctagtgaactacagaggataaaggaaatacatttatcctatcttgcattacagtaccttttactgtttccttatggcgaggatgggtacaagattggaattgagaaaggtcatgtaaag

SEQ ID NO: 10352 - DNA, 513 bp, Arabidopsis thaliana landsberg
  unsure (1)..(513): unsure at all n locations
gcattgttgttatgcaaagggaagagcaaaataggcaccaagttgggctgtcagtcagttggttgacagaaatatggccaccagtggtattggccgaacttgagatcagatttaagctaaaaccagtgggaattcgactaggaatgttgtggcaaagatggagatggttgatagaactacaactttgatgcagagggatgatgatgttgccatagaaagtttagagataatctaccctaaacatcatttgtctggcgctctaaacatgactctcatggtacagtagccgatcagatcaggttccgtgaacctcaccgctgatgatcgtcgcgttgtgattcacgatgactgccaagattcgtgcgttgcggattgtggataactgcgggcgggtaaagatcttggcatctggattagcttgagtccgaccgcggctaagctcgccgtacccccttgctcatncgacgatcgggataagagctcgccgnccgtggtcgatcactgncatgcgcc

SEQ ID NO: 10353 - DNA, 526 bp, Arabidopsis thaliana landsberg
  unsure (1)..(526): unsure at all n locations
taacactcagctccggctgtgggcgcacatctttcagaccatttctgcataaacaaatacaaaaacttatcagccacatggactctgttttttaacacaacgtctaacaaaaaagtctttgggacgataatgccactagttcagtttcaatttcttatattgattgagatacagtagactcaagagcaaggggagttttacccattagcatatggcacctcgtcacgtgctctataaggtggtggtgacctactgtagttgcgaccacgaggagaaggactacgcgntcttggaggaggaggagatctagcacgagggctgtaacttctgtgaaaccaaaagacaaggtaataaatcaatgaggtagaccaatttcttttagttgcaaatcgtcaatcagaaagaatagggacaataaccttcgtcctccataggtaggactctttctgtatctaggaggactgcgactacggctgcggctacgacgcctaccaccagaaccaccacgagaacgacattcacgtgc

SEQ ID NO: 10354 - DNA, 1354 bp, Arabidopsis thaliana landsberg
gagattattactaaagttagctttacttgttgtatataggcttcatgagcttgataacaagtttctttaggaggtgttaaagagccagatcaagctttcagaagaggtaacttgtattgctgtcttactttggatccagaatgcgtttatgtgctgaatactttgcttgtgatagattttcttagggtggttgagagctgaaagttttgatatttagtcaactttgttccactgaaccttctaggaagctacctcaagtagacaggtgatcttaaagattctcttgtttctcttagatctcaatctttactgtttctcaagtttcctatgccaactctacttattcttgtcttccctcttcctcactttggcactttgttttgtccttagctttgttgacgggcttcaagccagtggtaaagatatgcttctgtagaagggttaatcttgagcattaaaggacatggctttctactctgaagacgacaagagcgaagactacctctttaagattgttctaatcggtgattctgctgtcgggaaatcaaatttacttgccagatttgcgagggatgagttctatcccaattcaaagtcgacgattggagtggagtttcagacacagaagatggatataaacgggaaggagatcaaagcacagatatgggacacagcaggtcaagaacgttttagagcagtcacttctgcatattaccgaggtgcagttggagctcttctggtttacgatatcagcagacggcagacttttcacagcattggtagatggctcaacgagctacacagtaagaaacctcttatcttttcttatctgctactaaacaatctcccatttgctaattgattcaagaataatgaaagtgaggggtgtcttcataaaactgttgcagcacactctgatatgaatgttgtgacgatcctggtgggcaacaagtcggatctgaaggacttgagagaagtgtcaacagcggaagggaaggcattggctgaagcacaaggtcttttcttcatggagacatcggctttggactcatcaaacgtggcagctgcatttgagacggttgtgaaggagatatacaacatactgagcaggaaagtgatgagctcacaggagctaaacaagcaagaccctgcttcactgagcaatggcaagaaagttgtgataccatcagacgggcagggcgagtccaagaaaggtggatgttgttcctcttgatagaaaactgaaattgtagagagcttaaaaaggaagactattgatcatctgtttgattgtttatgttgtccgcgttgccatgaatgttgccattagagatgggcttgtgttgtggtgtgg

SEQ ID NO: 10355 - DNA, 1196 bp, Arabidopsis thaliana landsberg
tgattcgacttgatttgtagggaaagccgatgaagaacattgttccgcagacttgccagatctgtagtttcaatgttggcaagactgttgatggagatcgttttgtggcttgtgatatttgttcattcccagtttgtcggccttgctacgagtatgagaggaaagatgggaatcaatcttgtcctcagtgcaaaaccagatacaagaggctcaaaggttctcttttgatccttctgaagtatactgtcttcattgttcatcgatagtttatcagtatgttttgaattttggatcagattggtatttatagcaatttgctaatttctgattctaggtagtcctgctattcctggtgataaagacgaggatggcttagctgatgaaggtactgttgagttcaactaccctcagaaggagaaaatttcagagcggatgcttggttggcatcttactcgtgggaagggagaggaaatgggggaaccccagtatgataaagaggtctctcacaatcatcttcctcgtctcacgagcagacaagatgtaaggcattgctgttcattcttccctcttaagcattcgcatcctcacgcaatttagttttggaatctgattttgtcatttgcttatttacagacttcaggagagttttctgctgcctcacctgaacgcctctctgtatcttctactatcgctgggggaaagcgccttccctattcatcagatgtcaatcaatcacgtaaatatcctttatttctaactctctcgccaacacatatatttgtacctaggcttctcttttatgtcaaaactctaaacaataaaatctgttgttgtcattcacgctgcagcaaatagaaggattgtggatcctgttggactcgggaatgtagcttggaaggagagagttgatggctggaaaatgaagcaagagaagaatactggtcctgtcagcacgcaggctgcttctgaaagaggtggagtagatattgatgccagcacagatatcctagcagatgaggctctgctgtgagttcttgttttgtaatcttgtttgttccgtcgtggtgtaccgagcgtttttcctattaagcaatgtcctgatactcattttccaattctttatttattgtacaggaatgaccaagcgaggcagcctctgtcaaggaaagtttcaattccttcatcggggatcaatc

SEQ ID NO: 10356 - DNA, 1206 bp, Arabidopsis thaliana landsberg
tttgatcgtaacgcactgatacgatactctctccagatgtaatcgatcactttgttcatcaccatttcatcaccagcttctggtctaaccgggacatggcaagaaaacagaccttttccaactgtaattgcccatatgtgcagctcatgaacatccacaacttcctcaatttccatcaatccctattcgagctgcctcgcgtctatctctctcggtgtgctctccattagaacttcaagtatgcttcgaagcatcttaatggttgtccctaaaacaataactgaaaataataacgtgcatatcaagtcaattactttccatttagggttataccaaatcataccccctccaatcattaccccaatgctctgaattaaatccccaagaacatgaagataagccccttgcacattaatgttccttatttccttggatttctccaacaactgctcagctctttccccataactatgaccatgatcatgactgtgaccatgatcatgcccatgtccgtgatcatgtccaagcacaacaatcattatgatgtgttacaactaaaccaaaagcagcaacaagaaccataaagaaaccatcaacatcatcattggtctcttgaacgagtctagttacggcttcgtagaccaaaatcccagtgagtaaccaaatgagctggattgagacaagagtgcataaaatctctatcctgaagaacccataactctgtcgcggatttgcttcccaagaagaagcccacaaggagagcatagagatagcaaaagcaccaacatcagtgagcaaatgagctgcatctgctaatatagccaaactgttagccttaatgccacaaacaacttctatgctcatgaacaaaagacataacaccacaacgaaacagagttttcgcattgaagcagctcgtttcttagcatcacttgaagatgttgaaaacccacaagctgtttctccacaaactttacttcttcttgaatccatctgcagcaaaaaagattgtaactttagagcatgaatcaatattcaatgggttctatacgcaatcctatgaatagagtatatagatttgataccttacaacaagatagtagaaactcaattcaggagtaaggtgttagagtttgagacttgaaggagatttttaaaggtggaaaaaacagagacatgcatcccacaactacacaaggatgcgag

SEQ ID NO: 10357 - DNA, 1800 bp, Arabidopsis thaliana landsberg
atgtgtaagaacgtacggccaatctcgcttttttccctgtcctttcgattctctataatacctctttggttccacgtatccactcaccgtcactttatgtatctttctattcacctccaccgatttcacacctgcgcgatttttatattgatataaagaccgtgttaatttggcttgttgtatgtagaaatggtttggcgtgcttacatgagtactcgtttaatggaaatcaaaattacaaaaaaacttacagaaaccattcatgacataagtagtctacgagttggagattcgaacctttcatggaggaaaccgcgttcttgactctgcgttcacaaccatcgcagtccattttcacctttatattcaccgtctgcatgactttccgcttcctcctttttctggtgacgcggaagtagtcggagatatactcggaaagagaatcaagagctcccatgtctattactctcaccaagaaagatcagagatgcatatattatggactggacttgaccatatttatagcaactacatggtgacttaatggacaagtgttatgccgaggattaagtacaattaaatgtgtttaatattcgtaaagtgtaattagagagatgtatatgtggccctctaattttgttttcctccaaatacacacgttggacaacgaggccaatgtttttgggctaaagcacacgactcgcgccgatttctttgttacaaaattctaatatccgttttatattaaaaagctaactataataataataaacagaagagtttgtagttataatttctttttttctaacaatgtccgatcggtcgtttataataaaacaatgtcacgggattagaggtttatcatccacatcacctgagtcacctcaaaattcacatgcgtcaaagttaattcattgagaatggcaattatggttgtgtagattcttcttttaccatctaatctttttcttttacaattttgtttatgatcattttcgtcgtatacatatatatgatgtcggtatgtatatataagtttatgaaaaaattgtaatcgtgtattgaaaacgacatgacccttctaattaatttaacacttttgttactttggataggtacacgatcggatgaatgataatagggtttatagataaactacacaatcacacattcaattatttcaatttaggtcagaaacagtaaaagggaatagttataagagaaaaatagaaaggaatgtagcaatttaaagggcaatgattcgatgagaaaaaataaggtgtgggggtccgatcttatacgaagtagacaactctgatcaaactatttaggtagtctatagtttgaaataagaattgttataaagcccctccacatctttttattatgtacatttagacatttttgttttttgctttatactttccaccctataaacttcgttggcattttcttctcttacaccccaattatcatattcttcttagacctctttttttttttccttttacaaaattatattttttctatttttctcttctaagctactcaacacaattgatcgaatttcaattttgagttaaagtaccccacgagtaattcttgaaaaaaattcagcaatatactaaagaggggtgttaccgatatgaagttaattccataagagggtttcattgaaatagccagtgacaacataaaatctcgagattaccaaatcgacagctattatatagcatgccatagcatttagcatagcctcactttcaaaattaaaggttactaaagcaagtacccataact

SEQ ID NO: 10358 - DNA, 893 bp, Arabidopsis thaliana landsberg
cattttttggttacaaggctaaacctgtaaaattgaatttgagtcagcagagaacaatctcagatttagaatccggcaaagattaaagagaaagagagctagtatgtcaccaggaagctcccatggatcgtatttgtagagatcgatctcagcgatgatcggaacggcgatggactgagaggcacatttgcggcagagatagtgcatgacaagctcttcatcggtagggtgaaatcggaaacctggaggcaactgtaataattctgacatagtttaccctctttcttaatattattgttactatgaatggaggaggaattaggaggaggttgttgaggatgatcctgatcctatcctaatcaattgtagtatctctctctctttacctctgaaacttggcgtttttgaaacttggaaagaatgagagaaaagtcaattatataaggagagggagtggacacgtgtcgagatacggaggaggagaagagcttctagaacacacgtgggtggatgacgctgccgggacacgtttcgcaagtagaactccgttgctgacgtggcgatgagtttgatgttgtcattgcttacgtctgtcgtttctgggggtccactcacttgtcgttagaatccaaatccgaccggtccgatacgaccgaacccctgggctctatcttactatggattcttcgtttccggtcggtggatctccggtcccactgcctagttcctccgtttatattttttttttgtctttttgcaaaaggttcatatcatttcaaaatcccacacgattaaacggtgataaagttcatatctctctctagtagcctccaccattttcgacggtgttaattatatttttaagtttttgctagaaaagctcttatatgaat

SEQ ID NO: 10359 - DNA, 1202 bp, Arabidopsis thaliana landsberg
ggttatgatcgtaccatttgatcttgctgtcttaccgcaaccaacctgatcatcgtagttcagtggtggtcctccggttccacaacataccattatcgaatgatcaaaacctattaccataccaaaaaaaagtttcaagcactgttaacttgcacataagtaagttttggcattccggttaaaatgccaccactaacacaaaagtaaaaaaatgctttctaatttgagtgaactgaacattattaatacttagttacttaccatatttggaatgattcaggatgaggtcggatttgatagagaagatatctacgtatgtgaaacgggaattgggatattgttgagggagttttttgaaaagaccatgaagctgcaaattgaaaagcttagcagcttggttatggtcactgacacaaccaaactcatcaagctttgatttgtctttcccaaaaattgacacaacttgtgctaaacacccaagtggtcctgtgttgtgtatccaatagtttcttgccccctctgcatataatctctagataaagaattacaaaatgaattaatagtatgatgatatcttatactcaaatcaaattcaaatatttcccccaaaaaatgattatccgtgtaacaattaacaaagtgtcatttatagttttatttaagattgaaaaaaaaacgagggttaagattcatgtaaatactaacctttattccatcttgaaatatatctaagattataggaaccagagcaagaacttgatctactgtcttggtgtaaaatgctccggcaatatcattttgtccgatatcaaacatatacaatccattactaaaaaaatattcggacggtaagtatctttggagctcttcatctgacaaacaaaagagaaaaaaaaaggtacattggtcagtgactaaatgattcaactaagtctaaaatgttgatgaacttttggtatcatttgctatttagttaccttgttgtatcaattgaaggactttggacttaaaggtgatgaattgagagacttgaacaccaaaaccaaaggggctataggatgcagcatttgccttctgaatcgttgacgcagccgcagcaaaattgcagcctcttcggtcagtttgtcgacttatcgaatctaaataaggcctcaaatatggtcgatcaattgcttccactacaaaaacatatgtcagcgcac

SEQ ID NO: 10360 - DNA, 1256 bp, Arabidopsis thaliana landsberg
taattaatttaaaatcatagcagtaattacggaaataattattcgcattcaatcccttcaaggatccggttcggtttgctgcgtcggccatccggttcggtttggatttattaattttgctagggcttctgattttaaaatgttcggtttgggtgaaattgctgtggtatatatgaggagctcctgcatcgccgccataactaaggataacattttgatctttttatcgtccatggatcctcttgctttgctttgtagtctttatatgtttgttcgattagattaaggttttttgccgtttgtgtagtgttattgcttgaattgattacagtcttttctgagttaggattagataacttatggtgcaaagagagagggagagcaaatgatgggatacacttgatctctgaacttcacaggtaagttcgcttgttgataactactggtctgctgatgctctctttctcacactctctgctcctgattgggattttttaatgagatttgattatgtaagacgttactgtgattaagtgtagtagaatttgatgtgtagtttaaacattagtaatgattgattttattatatatgaagttaatcataatgccttggaacatgatctttagaaaatgcatcaataatgtttggatgaaatgcttaatccatctaccccgcaaagcttaaggataatgaccggatgggtaagtcgttctgaagattgtttgactagtcatctttgtgagtctcttttactggttcaaggaatcagttagaaagagatgagcaagggagtaggatgattaagaataataaattgactcaaaataatcaaacaatgagatagtttacctggttgtatcatttccataattgtagttagataggaaaggcgttggtcatcagaaggtacaagcacctttgtctgctcgtcatcctcaatagagaaaaaggagggcttaaacgtatagaagtcttgggaccaacatttggctgtctcaaaaactccccaactgtcagcttccatgtcgtacacatgaagctcaatgtcactagaacgtatcattttctccctcaccactagacacttgccgtcatatgcaaccacgttccaacattcaagatctgattcctccattgatacgttcttgaactgccttgcgagtgtccacttgtcatacccgagtagtgtgtaaactgaaatagaatttttcgtcccagatatcaatgtcagaaggttggtctcatcgtgtgctgc

SEQ ID NO: 10361 - DNA, 527 bp, Arabidopsis thaliana landsberg
agaacatgatattcaaatttcgaaacgtagaattcgatatgtttagcctaatactatcaccaaaacagatcgtggcacaggaacgagattcaaacagcaaaatcaaagaagaaaaacgaagaaaaattaccttggggacgaaaagagagagagagaagaaggaatttgtgattgatcgctttgtgggagattcaagtgagaggccaagagaagaagagagaaggacttagtggagaaaggcttgaaaaatatcttcggtcaatcaataaaggatattgcaaaaaaattgaaatttcgcacgaaatgtaaaaactgaggggtttaggcgggatttcaaatatattttgccaggtcatcaatccttgtggtttcacatcattggccggtgtcatctcaagttttgattctaggcctttggttatgtgatttctcttgggcttcttctcagcgtgagaattcagcggcaagcgatatgactcattgcccttatttttggtcctaaataattaatttaaaatcatagcagt

SEQ ID NO: 10362 - DNA, 1470 bp, Arabidopsis thaliana landsberg
acatttagtacatgaagtttctgagaacaaagacaaagacaacacaacacactagttttttgcttttggaaagtatctcaaactaggtactttttgtttgtgttggtgaaggttactttcctggaaaataaacctcacgtaaaagggattatcaacaacataaagttcatgccttgggaaaatacatgctttgtcacagggggaagtgatcacgctgttgtactatggaacgagagtgatgatgaagaaaacaaatggaagtcgaaacctttacacagaaatctacattcagctgctgtaatgggagtggatgggatgaaaaacaagaatgttattttatcagtaggagcagacaagagaatatacggatttgatgttcaagttggtagagcagactacaagcatcaaatagactataaatgcatgagcgtcctcgctaatccttgtgacttcaatcttttcatggttcaatccgggtaagaagaacttatcaaatatggtttccattctttgcttgcggatttactaaagaagaatcccgacattgtaatgtcagggaacccgagaaacagcttcgactgtttgatatcaggttaagaaaaaccgaactccattcgtttgggtggaagcaagacagcagtgaatcacaatcagctctaataaaccagtcttggtctcctgatggtttatacatcacctctggctcagttgatccggtgatccatgtttttgacatcaggtaactctttcacagcatcaatggctctctgtttacacactatgtaagaagtgaaaattggattgtgattgtattgttgtttcacttgtgggtaggtacaatgctcgtaagccgacacaatcaataaaagcgcatcagaaacgagtgtttaaagcggaatggcattactctcaaccacttctcatctccatatcttctgatctcaacattggtctgcacaagatctcatgaaacttttgaagctctcacatgtctttgttcctcatttcttattatctgaggatacaggttcaggtggcgaatatttatcagccatcataccaattcttagttttaggtataaacatcattcccatgtattaaactctcaatttttataaaggattcgttaattaacattactgcagaaagaaagaacaaacacctaagattattataaaaaaaaactcaaccttttggccggaaaaaaaaacagaggaaaatctcaaagttctgtcttttactctcgtcattcgtcaatttgcggattttgttctcaccctcaatttgagatgcagagaatctccattaatgtctccggaatcagaagattctgcatcacctctctttcgtaatcttccgcttcaaacctcaccggtaaaaatttcatctttgtatctaaaacagacatttctctggattcatgttacttagggcttttactttcttgccctgggggttatctaaatatc

SEQ ID NO: 10363 - DNA, 1058 bp, Arabidopsis thaliana landsberg
tgatcccgagagctgattatcggcaaaatcaagatgttcagttgagacagttacctaaactggcgggaagtccacccacaggctcgttctgtctcaagtgaagcaagttaagctctttaatcttcctattgaaggaggtatctctccttcgaaatgattcccgaacatatcaatcatcttcaagcttgtgcagtttccaatctcctgtgggatttcccctgagaaacgattctcatacagaaacagaacctctaattttctgagtgcgctgatctccttcggtaacttgccttccaagttattgtgatacaacacaagccactgtagattagtgaggtttgatatcgaaggagataacgtaccctccaaggtattattgtggagataaagatctgtgagttcgactagctcaaacaatgcttcagggatcgagccagcgagagaattgttcgacaaatcaagctgcttaagcgattgacatttgcttaattccacagggatttcaccagaaagctgagttccagacaaaaccagttgctccaagtttgtgttgttagaacaaatgctctttggtaatgaaccagagagatgattgtttgctagaaccaaatcaagaagctgactcatgttccagaattcttcaggtatctctccggtaagattattcgccgataaatcaagagtttgaagatttcccagatcagccaaactcttggggataagaccttgaagttgatttgccatcaagctaagatactggagttggctcatttcacctaattgactcggtatctctccggtgagactgttgttcgccaggttgagtatttcgaggttttcaaggcgtccaagctccgccggtatcgtcccgttgagcatgttctccgccgcagtgaacacagtgagatcagagcagtttcctaactcagccggaatcggtccttcgagatagttatcttgcaatatcaacgactgaactcggacgagacgaccgagctgactcggtataggaccggtgagtctcaagaaccagacaagcatctggagattcacaagtt

SEQ ID NO: 10364 - DNA, 1798 bp, Arabidopsis thaliana landsberg
gtgaccgtgttatgtgctattatcattctataattgactttcaatctgatttgattttatgaggccattcacttttaatcaagtaaccaaatcttatgctatcgacatagttaacctgtaacgttttctgttcacagaagtacctagagcttttgatattcttggcaaaacaccaaacctttttatatttaccaaaatatccagaacgttttagtcaataccgaattactccaagccttttgcaatttacaaaagtactaaatcaagaaaaaaaaattaaaaagccaacctaagagtctgccatagcagtaaaatgttggtatttctcatttgccttcttcaactttttcaccaacctacgcatcgaacgattctcctcagtcatcatctcctcagtctttctcttcttgtcttttgttatttccagttgcaccaatgccttctcttgcctctccgttacggttattggaaaatgaacttccggtgtactgacaacacacaataaacaaagatatcaacactcacattaaccaagacagattaaaaagaaagcaaaaatctggaaggtttctaggcctccaagctttagaaaactgaaaggcatttaaggatcaagagaaagtgcatgtaccagcaaccagagtatatgaaaccgttttctctggcgatcacaccatctagagacacagcgtctccaccattgatgtgaggaagagctgcttcaagatgctctgcggtctcatatacctgcaactctctgaaaactccatagaatagtgtctctctaagcccgtaacccgagcttgattgtatatccagctcctctgaagctaaatctatcatgttcacagcgtagcctttgaaaccgggtataggatctccattcggcaggtaagggttatccatggctaatctcttctgaggatcattcctcacaagtccgttcctccaaggtctgcatgttttgaaccagaacatatctggttaagcaaaagattaacacgaaatccaaatatcaaaggaagagtaccaaaatacctagttgcatcaagacaaataacaagaaaccgattggtgatagatcgtccgaggctagctgcttcagattgaagcttgcgatactcatcgcttttgggtccaaactgtgatgatttgcacaccaaagaaagcattgtgtctttccccaaatattcagacaaaaccctgtcataccaaataacttaggaaattgaagatttgccccaagtgtagacactatgaatttgatcagaaagactctggctataaaatcaatgtcacctgcttagcgacgtggaggcaactgaacctagaagcgctacaacgccaaacattcctttctgtgacagaaacagagaccgtggaggtggagcctttctgtacagacaacagaacactgatgctgcagtgtcatgatgcttctcttcgatttgcttcatcattgattctttggtggataggcattctggaaacggtgcaccaagaggttccagagaagctgagatgaatttacatgaagaggtaagaattgccagtttatgctacgatccgccattattttgaattagaaaactgttgaaataagacttgtgaaactctccattaagtattgagcatgctcagaagtcagaactaaagaagtaggcaatgttctagacaccaaatttagggatagtgtttcaaaaacagaaagcaagcaaataaaaaaatagcaccaatgcagctttaagttcaaaccccatcatagttatcaaacttcaacagatcaagatacgattac

SEQ ID NO: 10365 - DNA, 291 bp, Arabidopsis thaliana landsberg
cggtggtcggggtcgtcttgcgttatttgcaagccttcgggattatgacggctggtgtgccgatgacatggtagaacacgtcggagagcagggcctcgcctttggctgctgctttggccaatgcgtcggcctcttcgtttttgttttgctcaacgtgttgtagagtgaaacccttgaactgattttcgaggccggacaacggtgaggtattgcatcagcacgggctctttggctgagtattctttttcgatttgaccggcaatgaccttggaatctgttctaatgatgcat

SEQ ID NO: 10366 - DNA, 2785 bp, Arabidopsis thaliana landsberg
tcagttgaattggtatatcaaaatttgaactgattgggtataaaaagaaactgagaactgattcatgctaaggaaaccttgtttaacaaataccatggatgctttttaaccgtatcagcctctccaatgttttcgtaaatcaatagttcaaaatttttttctaccacacaagtgcatctccattccaattttcaatctatataaatcatatgtattttttgtatccaatagtcatctttgtaaagattttttgttcgtgtgtggcggataagcaaaaacagaataacataatctcttatccaacttatattgccacgtggacagatatagttggtgaagcagatactaatctaatctgagcaaaaccagttgggctatttgaaagccacaagtagttggaacctttgtttcttctaccctaacatagcccttgcaaaccataaccaaaccatcatcatcatcatctcttggtgacagaagaaaagagttgaggaacagagaaaatggcagcacaagcacttgtgtcttcttcacttacctcctctgttcagacagctagacagatatttggctcaaaaccagttgcgtctgcctcacagaagaagagttcctttgttgttaaagctgctgcaactccacctgtcaaggtacatgacagtctctattctttcacagatctctctctttctctatgtactgaataatctgatcttgattttgtgttttggtttttcagcaaggagccaacagaccattgtggtttgcttcatcgcagagtctctcttacttggatggcaggtaatgttcaaacaacttttggaattttatttgttttgagaacttcatgatgttcaaaatttggagatgttctgattcttcttgcagcttacctggtgactatggattcgaccctcttggtctttcagacccagaaggtactggaggattcattgagccaagatggctagcatacggagagatcatcaacggacggttcgccatgttgggtgcagctggagctattgctcctgagattttaggaaaggctggtctgattccagcagagactgctcttccttggttccaaaccggtgtgattccaccagcagggacatacacttactgggcagacaattacacactctttgttctcgagatggctctgatgggattcgctgagcaccggaggttacaggactggtacaacccaggatctatgggaaaacagtacttcttggggttagagaagggtttggccggttcagaaaacacggcttaccccggtggacctttcttcaaccctcttgggttgggaaagatgagaagtcactgaaggagttgaaactcaaggaggtcaagaacggtagactggctatgctcgccatcctcggttactttatccaaggactagtgaccggtgtgggaccttaccagaacctgcttgatcacttggctgatcccgtcaacaacaacgtcttgaccagcctcaagttccactgaggtgatcatcatctcatgtgtttttatgtctcttgtatcgtacaatatttccatctttcgctaccattggcttcttcgtattgtaacaccctgtgtaaacatattcgtgttttgtaagaaatgacaatgtcaatggccaaacgaaaaaacttttaggattaacagttggcatttgcaaaccaaacaaagcggttagtatattcaaagaatgttatgaaatactgtacctgttatgctttaaaagtagtctcatcttatcactctgtatctcccaaaccaccttagacatttaagacaaaaacaaatttaacaataagccatgttggtgctatcaaagagaaacactatcaatggatttgaagacaaaactataattgaagaagtagctctttcgtgttatcttttaagccgtacctagttcagaacttgcaagacgaatggaaagaagttctccaccagcagaaaattgcactgcgtccattaggtcctggttccacataaagaaccctagtccattgatataaacaaaggccaagcaagaacaattgcggagacaaatctggtaacaatcttcagcatccaaaacacttgcaaattcgtaaaagtctggaggctttatgttggcaactggatggaagaagtttgcatcttttttagttgagttttcctgacaatgtagtttggtacgcctcacacaaccatcagtccaatttcctcttttccactcctcaatatattttggtataaaccctttgaagcatttacacactgacttgacacaaatcccaaaaggtccacatacaccgtaataatcacatgagtgcgctggagccacaaagttcaatacccaatcagtcccactatgcctagaaatctccagtgaacccttcgatgttatcactatacgtggaagtttgaagtttctgtttaaataagtgagggatcctgacccgtttgcatcttgctgaaggcttaatggatttgtaaatgaatcatccattagtggtaccccgtgaaccttgttttagcccatggaccgcttctccaataaggcttcgagcctctcatagttaaagcttgtgttggcacttgcgttgtaatctgaagcacaaagtcaccaaccgctggatcagtgtaacttttccaagaagtcaagacctgcttctcgccagtggcgaggttatacatcagagctgagaaaggaagcatagtatcaccaagatggtcaaagctttgccaaagagttcttcccgaaaaattaactatgacaataagatttccggtg

SEQ ID NO: 10367 - DNA, 512 bp, Arabidopsis thaliana landsberg
  unsure (1)..(512): unsure at all n locations
caactaaatacccagtaggtatttttctgtaatttttggcacagagacctattatcacccatgaatcttagcaaaaataaattttagtccagaaacctcacctaaatcagagctatagtgtaaagtacccttttacccttacttttgttatttttgcacaaggagtatctgaattaattccaacctcaaatttttagaataaaccacagaggtcaatgtttacccactgtaatttatgtaacatttttggaaaattttaatttgccatggtagttcaaaagcactcaataggaaacataatagaaagtaaaatgagaattttgggagaaattgataatgtacaaataaatcctcctaagagtcccatagaacataaaggaggtgattgcaggttttaatttcattcaagacccttanatgagtggatgaaaccctaacacaccaaccgacgaagaaaacctagtgtcccactggtttatactatttcacatatgtagattacaatggcatac

SEQ ID NO: 10368 - DNA, 1260 bp, Arabidopsis thaliana landsberg
  unsure (1)..(1260): unsure at all n locations
gacacacatatattcaccaagtttttgaaaatgtattgtatgtctctctatataaactccatctcttttcttgttacttcccaacaaaacatttttctctctttttccacacttcatctaaaaccctccggctcgaacagaagcttacagaaatcacatcaatggatgtcaccaagagcctcctctgcttcatctctttcgtcgcctttcttctcttctcctccgtggcagaagccaacaaagcacaccaccacgagttcatagtacgaccgcgtttcaataatatgaacgttttttatcaaaatgttaatcaaaatgtaaaagaagatgtatgcttacatataatgtttatgcatgcagatacaagcgacaaaggtgaagagactatgtgaaacacacaacagtattacagtcaatggaatgtttcccggtccaatgcttgtagtcaacaacggtgacactctcgtcgtcaaagttatcaaccgggcccggtacaacatcacaatccactggtaatacacgatttaaaccacactctcgtgcttttagtgattaatgggcccgtttctttactgtattgaacggtttggtgtggctatcatctataggcacggtgtgaggcagatgcgaaccggttgggctgacggaccggaatttgtgacccaatgcccaatcagaccgggatcaagttacacgtaccggtttacaattcaaggacaggaaggtacactttggtggcatgctcatagttcgtggcttagagcaactgtctacggttcacgttctcgtccttcctcctgctggttcgtcttacccattcacaaaaccccaccgcaacgtccctctccttcttggtaaaattatactaaaaaatcataattaacaaattcagtgtgatcatagttaataaataggtgattttgattctgataatttatgattctttaaggtgaatggtgggacgcaaatccggttgatgtgttgagagaatctatacgaaccggaggagctccgaataactcagacgcttacaccatcaatggtcaacctggcgatctctataaatgctcttctcaaggttttactctttttcttcaaattaattttaattttatcaactgtccaaaaacttgtcccatatattttaccctgttttctcccaactgtcataactgactgtggtatcttttagtcaaaataaaacacatcagcccaaaagactcanatcagtatatcaactagactcttttataatctttg

SEQ ID NO: 10369 - DNA, 1553 bp, Arabidopsis thaliana landsberg
atgatggaaccaaagtcatgattccatagtaactccggtttaattgcttcaagaggccattaactaagtttctttattaagtaacatggattagtttcttcataaagataaaactaattatttaaacaaagtcaaagctagctttagatgcgtactagagtgaataatacaaatagtaaacgatattctgatcagaaaatgggatttgactttagcacttcaaaatccaaagctaaaagacaaaaaagaatagaggttcgatttgcatctccattaatgggcatcgatctttctcttaagctcgaggccgaggagaaaaagaaagagatagaaggatcgaaacatagccgtgagaacaaagaagacgaagaacatgatgctagtggtgatgaagatgaacaaatggtgaaagaagacgaagatgattcttcttctttaggtttaagaacccgagaagaagaaaacgaacgtgaagaggtacctacatgcgtatatatacatacatcaaaacattttatgtgcgaatatatgttaacatctatggatggcgatcagctcttgcagctacagatccagatggaaagtgtgaaagaagagaatactaggttgaggaagcttgtcgagcagactcttgaagattatcgtcatcttgagatgaaattcccggttatcgataaaaccaagaagatggtgagaaattatttcttcatacacgttatacatagtggtgactggtgataattaatatgaaacttgattgatgttttaacctaggatcttgaaatgttccttggagtacaaggcaaacgatgtgtggatataacaagtaaggctcggaaaagaggagctgagagatctccgtcaatggaaagagaaatagggctttcactttctctagagaaaaaacagaaacaagaagagagcaaagaagctgttcagtctcatcaccaaagatacaatagtagcagcttagatatgaatatgccacgtatcatttcatcttctcaaggtaatagaaaggccagggtgtccgtgagggcgagatgtgagaccgcaacagtgagtttctttatatcatatcttggactcagtttggagattggtaacatgatcatttaataagaaagatgtgtgtgtgtgtagatgaatgatggatgccaatggaggaagtacggtcagaaaaccgcgaaagggaatccatgtcctcgagcttattaccgatgcaccgtggctccaggatgtcccgttagaaaacaggtaactgcacacaccctcaaattccggggtcttactatttatttattcaaagataagattttatgttagggaaccattttgatcaatttactgataacgtagtattttatagatcttccaactcaaaacgaattggttaatgagttgattcgtctatgtactttatatattactttatgtccaatgtagaattcatagcatgtcataaccacatttgaatggaatgaaactatgtatatatatatagttgataatgagatttgttacattgtgaaggtgcaaaggtgtttagaaga

SEQ ID NO: 10370 - DNA, 359 bp, Arabidopsis thaliana landsberg
  unsure (1)..(359): unsure at all n locations
cattttaatcaggtgttgggctattttaactaggatcccacccacacaatattgaagacatacacatcattatggtcattaataagttatgaattccctaatcaatagaaatttataagaaatcatatatccaacatttatggatatatgaaaagttataaacaaatgatataaaaggcacaattttatagctggtgcactgaaaaagaaacaacttctcttaccatttaatacaccgagaatggcatcattttccactgggaagaggaggggggattcccctaactattatagncttgctctgaaaagactttaaatgtaatctttaccggataaagtacacaaaatgaagtgaaact

SEQ ID NO: 10371 - DNA, 2118 bp, Arabidopsis thaliana landsberg
gctaattcaaagcagctcaatggaaaaatttatcataaaagttacagattatcaggtgatccattaacatacttttttgttttcctcaagaatatttattggaatatttttgggacccatgaggcttgaggaagttggtttcgttcatgtatattgattcctcttaactttgttgttgttcataaaagagttcttagatttttttttatttcttttatctatttggctttttgtgataaagcgtggaaatttgatgttaaaaataataaaataatagagagcgtcgaaaagacattacgtaaaaactttcgcaggctatacatgcacatctaccattagggggtttctacacttttaggctcccatatggtaatttgttcgtaaaaagataaatttagttttttttaatacttaagtgtacatatggtatcaccaattttaatatataagcatgcattgataaatataaatgtacatttattatggaaattctaaataatgaacaatataattaaccattagcttttacacataactcacgtaacagaaggtttaatattatgtaaaccaaccatgttcattatcattgggatctaagaaaactagaaatactaacgggtatataagtatcatacactatatatgactaattacagttttaatcttcataacaggttatggatatccttgggcctagtaggtcctgctttgtatccctacaatgaaaacatcgaaataaatgtcatgattatgccgtattggtttaaccaactatttttccattctatttgcaatcccatcgtcgaactcatgattgacaaggcttgtcaaaaagatacacataaacgtaagccttatagaaacactcaccacagtgtacatgagtacatcacgtgaacaaagcattgtcagcttctatttgaaccaatgacagtgtgaaacgtgtataagagacattgctttgagaaacacttcccacgccctaggagcattgctcacgtggcctgagcttaaatatcatcgacacacacattaactctttgtatatatatgagtgtgtgtacgagtgttcgtcgatgacaagtattcgtacgctgctgcttatgtgaaaaactttcaacggcattgattggtgagagacatagatttgtggaagctcttaatattgccgacgtgttatgtcgtcgtccataagaagatagggctaggctagtactcttaggctatactttgaaaaactagtttaggagacatcacatcttagtctgccttgatactgcatgtactgattaacgattcgacatgtccttactaaaacattattcaattaacttccattttatttatacattttaaaccggtaatcaataatacatacctatatgaatatttggatcgtctatacccatgaacctctgtgttaatgaatgtatatatatacctataataatactgattgtcatatataacttctttttggttattttacaaaaactgaagcatccattttatttgatatctatttttccattttgaaaatattatactcaattgcatttcgaggcaccatatgaaggatggcgtgtgtcacttacatccataatcaaccaatttagcagagaaatgcttacaaacgagaaaacaaaattcatactacaagtcttacgagcaatgaaatccatactatattacgtgtaaattcatactacttcaatttacacgaactgagtttaatggacacaaaaacatgtagtcttgttacaaactaaatatgttgaatatgtgagaaaatgggaacactagtgactaatcatgcatctctgtcttattctatttctttgaacaatttttttttctttttctttgttgaaatataaaactttattgcaactaacaaaaaaacgtcttcacattgagatgcttctgaaactgaatgtttgtagaagagtggagactagattacaaaaaaacaaaagattggagaagagaagatttagctttttagagggatcccttttttctgctagaaaaattatctcctcacaacacattagagaaagaaaaaaacatttgcttcttctatcatattatatacagtatagagaacatggaattagt

SEQ ID NO: 10372 - DNA, 9027 bp, Arabidopsis thaliana landsberg
gacccggaaacattttatgagatgctcaaactcaccgtgaaaaaattattttttttttcttcaaacacttatattttgggggtggaatgaagctctaactcttagaagagaaatactcaaccatcttttttattccgagcacatgattaccaaaaatgcaataaaggtgttaatttttagcataaggatattctaactatggtcgtaacttgtaatggaacacctatgcattttttatttttttggtgcacacctaattcgaggaaaaaggttgaagtaatcataattacataagtttctaactatggtcgtaatcgaacacatctaaggcgtagtaataattaaggaaaaaggttgaagtagcaaaacgacgaggttacgatttgtaaattccataaatgccctctctcattttcaacctcaaagaatcgtttttggctttcatcagccgcttcgtatttttgttttcttcagtaacggaaaaaatggtttccgacttggacctcgtgacccgactccgtgagattctcggtagctccgacctgaacacggcgactccggcaagcgtccgtcgtcagttggaggcggatttcggtgtggacttgacagataaaaaagcgtatattagggatcaaatcgatacttttctcgagagcaatggcgcggtagaagacaaacctgagagtcccaaggtagaagaatacattaatgccgacgaaatcaaggcggaaattgaaggaggcgatggagaagacctcgacggagatggaagtggaagtgaggaagagaaggaagaacggtaattactcttgtaatgattgtgctttatgtgaaattggatttttgaaattcaaatatcgatgaatcagtgatcatacacacacacaaagattgagtatttataggaatctttagcatttttcaatcgaaccaatcaaaatgcttccgatgcatttctaatcaaagaccacttgtttaatgacttaagtttaagggattattgttcattgatgtgttaggccagtaaaggccaagaagcgaggtggtggcattaccaaagtatctcagttatctccacaacttgagaaagttgttggagcatctcagttaggtcgaaccgaggtaattttcatcttcttccgacaactgttctgcgaagcggaattgtactttagtcttttgtgttgtgtatatttatcaggttgtgaagaaaatgtgggcatatatccgagagaaggatttgcaagacccaaaggataggaggaagatagtgtgtgacgagttgttgcattccttgttccgtgttaagaccattaatatgtttcaaatgaacaaggcattaaccaagcatatttggcccttaggtgatggagatggtaattcttccttgtcattatacaattcagaaaactttcacatgagactgcatgatatctgtatatatatccctagtcttcctgttcagtcagtcattgatcctaaatagctagatcagctaaatatccctagtcttcctgttcagtcagtcattgtatcatgtgtctgaaatcaagtaccccactgtagagagtgatcatgtgtaattgtgtggaaatagtgttcatcaactgttaatagtgttgaatattgatattttccctcagcgtttgagttgttaggatgcttatatatttgttcaagagacctctctaatgaacatcaattttgtttagtaaaacagtattatagatttcgggttggagacagcagttcctgagttttgtgttacccaagtacaatgaaatgaattattttttccagggtgtgctaacgatgtgaaagaagaagatgaagatgaggcatcagagggaacagataagaaaggggagcagagcgaagaagtgtaagagaataaggaagaagaaagtgaagagcaggaagttaggagtttgcggaaacgcaagagaaaaaagtttgttttctctttctccctcagttcttgtaattgtacagctagttatcgccaccctgtgcccataaactaagttttctctattaaataggccagccaagtcggtagagaagcccaagagaaaaggaggaggcggctttgctaaagtttgcagcctctcgccagagcttcaggcgtttactggggtgacagaattagccaggacagaggtacatgtctgactcgagggaatcagtttctcttcgttattgaactcaagctctgagcctaaatttctaagctacttgtctaattttcttaaccaagtctcttgttttgacattttgtctggtgaatggtttcaggttgtgaaattgctttggaagtacataaaggagaacaatttacaagatccgaatgataaacgctctataatatgcgacgaatcatttcgatctctgttccctgtcgagtccatcaatatgtttcaaatgaataaacagctaacaaagcacatatggcctttagaggataatgcaggtatttgatgactggaagttcttacatgttctgggagccatctttttccggtttaggctttttaaccgtatactaactgttgtttgtctctggtctaggagaatcagttagctctaagtctccaaagaatggaaagcaaaaaatggaatcagatggaggtaagaaagctagatgaatttaaacttatcccatttctcatcactgtataaacaaagcatatgcattcggtcagacacagatagtgaggaaccaaatgagaaagataaaaagcagaagaaagaagttcttgctccccttccactttcagatgctcttgtcaagttcttgggtgatggagaaaactcgctgtcgagggcggatgtggtaaagagattgtgggagtacataaatcataatgatcttcaggtatgccatttgctctctacactctgttttttcttacttacctgcttctttacaccattttcttaacttaggatccttctgacaagaggagagtcatatgcgatgagaagctgaaagaactctttgaagttgattcattcgaagacacatcagtctcaaaacttctgaccaaccacttcatcaaggccgaacaatgactctttaggaagtagccagttttccacgtaggcaaaacccagttctcctttcctggacattttttttggatcagtagaggtcggttcaggacttgtaacgcgcgacaaagccattttggatttgatttggtctcctccttcactttactggtaagttaaagactaaaaaggtatctcgattgtgagacttgtaagcattgcgttttctgaatttgcttgcaagtgcagcctttttgagttctttcaaatgtttgccctttttggtatatagtgacagaaaccaaattcaaggataatatatgttttaagaccaaaccaattgttttgatcatttcctcgttttgcatattcttagttgtacagtgaattttgttatgcatcagaatccgaaaatgttgttacaaggttttgtcgctgattgaatatgctcagcagttggtcatagcgttttgttaaatctcatataagtttaagttctctattaaagttattagtaatttacaaaactttaccatcaaaacatgtcaaagattattgcatagaatggctcatgtttcaaattctcgtgccgtgaaatgaccatgaccatttgacgaaaattgtggctttacacatgattctaccaaccaattgacaatagttcacttcaataactagaaactctaaatacctaatgatagaattagagaaagcagacaagtattcttttcaaaacagtggttgagcgcggagtccaacatttagatgtggagtctcttatggatcgttctggccgagattacatgactgagctgaattataacagcaacacattggtgtctttgaagcttgcaaacgtagggattatggatttggatcccccgcttggtgtttctcttccttgtctcaagagcatgcatcttgcagacatttcgtacgatgatggagaaactcatcgcaggttgtcctgttcttgaagactttgccttaattctgcctgatgatgagcgccacaaagctatgccttctctgcgtgtgaggtctcagactttaaagagctttctgttcgcgtttgagtttaataccactggtaaagcttttgcagttgagattgatgctccagcactcaagtgtatgactttcagtgatagtcaatctgataagattgtgttgaagaatctgaattctctttccatggtcgatatcaatagtgactttcatcttaagtatgggaaaactttgggtccaagaaagagaaacgttatccgcgattttctcattggtatctctagtgtgagacatatgatcatctctaagcttactctagaggtaatatatattcacttccatgcatacttctagcattcaaatatagtttaatgatcttccttgatgtaaatttgtttctttctttcgtgtaggtcctctttcgatattccaaattgggacggaaatttcccaaatttgataacttgactcgtttggaagctacactctctagatccatgttagaactatttccatcctttcttgagagcttcccgaacctgaaacacttaatcttggtaaaaaaacttaaatgattttggcgtaacaacattgtggctcttgtggatgtttataattgaatacctagctttacttttgttggtgttttcaggaaactgaatgtccagtggaggtgatggagaagtttgaactcgtaaatgtgcctcggtgtttcgtatcgactcttgaacatgttgagataaaaggattgtttgactggggggaacaggatatgaaaatagcgagttactttctcgaaaactcagcagtcctcaagaaactgattctgagtttcatgggttgtcctcaacattattcggaatcagatatctacgaggaacttaataaactcacaaaacgttctccgagatgtcaaattatcattagatgctgaatgaggccatgagtatcatgtgtagaaagtctgttttctcatgaaacactgattttttaaagatcattttgttcttcttcttagttttggttggattccttgaccataaaactcggtcatagaacgaaaacattgttgtttttttaattttttcttaatctcaatctcagtttcttatgatctattggattctctgaagaaagtgatattattacactggacactggtagtaggaacattggactaaaggatctactctcatctgaaactctttgcgcttcctcctagtatattgaaaatttcggttaactcggtaatgaaaaatccaaaccaatcaaagctactgtataaacaaaatttcaattgaattccggttaaattaataattttgattggtttaattcggtttaaaatgaattgaagacgccaatcgatcgtcgtcatcttcactctttctttccagtcacggtttacgcgtctctctatctcccacctgcgattcttctccattatctttgctaattcagaaggtttcgcttcagcttcctcatctacattcttcgcttgtttcttatttacagacattctacgacatttttctgatactgtttcggtgaaattctctaatttcgtttagttttgctttacaatgttcttcattttgtgtctctcttcgttcggattttgctctgtagagacgcaatttccattttattcttctgatcttctcttttttttttttccggttggccatatacagctagggttttcagttttcactggttttgttctcatcttcctctttaacggaaatttgtcttcttgtaattactgggtcttgttcttactcatcttcttcgtctagtttttgaaaagttgtgatttttagtaggtttctgcaattgggttagtcaatcttcaggtttagggtttaagaataagggtttatgctatgatgatcattgggactagatgaatataactcaaattttgcaatgccactctgcataactatgaaaactatctcattctctcttatttgtcctgttttttttaagctgattggatttctaaccagcttctttttgttttactatgggatgtttatgtgttgtaggttgcaatgtattccagaagagagctggaagatttggagtacagatactacagtgaaatgaaagatggtacaaggaaagtcaaaatctcagagtctctgttcaggtgtcccttttgttacatagatcgaaagcgtgattaccagtttgatgacttgcttcgacatgcttctggtattggcggtagttcccgcactaaggatgggagagataaagctagacatcttgctctggagagatatatgaggaagtatctccgccctcgagaaagaccacgtccttctccaacttcagatgtctcttctcttcctaaagaggagtttactggaaagtggaaatctactttgtcaactactgaagaaggagaattcataactactgaaaattctagttcacctcatattgtcaaagctgaaccaaagtttgtctccggagatgattctggacgtagtggtgaggaaagactaaagttttctgataaacccgaccccttttttagcaacgaagacaaatcataccctgccaaaagaccttgcctagtttctggtgcgaaagagggagatgaacctgttcaacggattggtctcagccatggtgctagctttgctccaacatatccccagaagctagtttctttgggtgctggtaatggggatcagatgtatgtgcatccctggaaaggtatcctggcgaatatgaaaagaacgtttaatgaaaaaacaaggaagtatgctggtgagagtggaagcaagataagagaagatttgatcaagaaagggtttaatccccataaagtcacgccactgtggaacggaagacttgggtttactggttttgctattgttgactttggtaaagagtgggaaggattcagaaacgcgaccatgtttgataaacactttgaagtgagtcagtgtgggaaaagagaccatgatctcacacgtgatccaggtgataagctttatggttgggtagcaaaacaagatgactactattcaagaactgctattggtgaccacctcagaaagcaaggggacttgaagagtgtttctggtaaagaggcagaagatcaaagaaagacattcacgcttgtctccaacttggaaaacacactggtaaccaaatctgataatcttcaacaaatggagagcatctacaaacaaaccagttcagtgcttgagaaaagaatgaaagagaaggatgaaatgatcaacacacataatgaaagtatgttctcttactacgaaactaatttttgcttgattgaggtgcttggtctagtatttggaaactgataagtttgcttttccatgtttagaaatgagtattatgcagcaaactgcacgtgattatttggccagtatttatgaagaacatgaaaaggcctctcagcatctggaagctcaaaggaaagaatatgaagaccgggagaattatctagataagtgtcaagctaagaataagactgagcggagaaagcttcaatggcaaaagcataaggtaacattcacatgcttcgtacaaccttacccttaaactatcttgttcttagcaatgattcgtggaatcttataatatctgccagaacttaatggcaacgcaagagcaaaacaaagctgatgaagacatgatgagattggcagaacagcaacaggtaagctttattgttaaaaaaaaacaaaacactttgaaagttaatgttcaagttgctgtttgatttttggtcgtacttagaaaactggctattgttttacagagggaaaaagatgaattacgtaagcaagttcgtgagctcgaggagaagatcgatgctgagcaggcattagagctagagatagagcgtatgagaggtgacttgcaggtcatgggacacatgcaagaaggtgaaggtgaagattcaaaaatcaaggagatgatagaaaagacaaaggaagaactgaaggagaaagaagaggattgggaatatcaagagtcgctctatcaaactcttgttgtaaaacatggctacactaacgatgagctacaggatgcgcgcaaggctttgattcgtgtaagcaattctcagcctctctccatctcgtcccttcttcctttgatgggttgttatttggattttctgattgatgaacatttatggtgttgacctagtgagactccatgttcttacctggtaactcatggtagaaatctcagatggtagtggaagtgatttgccatttgtgttctgatatttgcaactaaccatgcttaagctatgtgcagtcaatgcgagagttgaccacacgagcttacattggtgtgaagagaatgggagcattggatgagacaccattcaaaaaagtagctaaagagaaatatccagcagtagaagctgataaaaaagccgaagagctctgttccttgtgggaagagcacctgggagactcggcttggcatccgattaaggtcgtcgaaaaagatggaatcgcaaaggtaaacacgcttttctctcaaacaatgtttctagatgatatcttagctcctgtaatataagaacatgagagtgactataacgattttgcaggaagaactgaatgaagaagatgagaagctacaagagctgaggaaagagttgggtgaggaagtgtatgcagctgtgacacaagcgcttaaagaaaggaacgagtataatggcagtggaaggtacatagtgcctgagctttggaatttcaaacaaaacagaaaagcgagcatcaaggaaggagttgtttatctggtcaactcgtggaaacagaagaaaccaaagccgaagcgtagataaaaattaattctagaaacctctattgttgataattattaagactagatgagatttcatgattatccccactaagaatagttataaacttgagaaaaaaataaaaatagttatgaacttat

SEQ ID NO: 10373 - DNA, 1186 bp, Arabidopsis thaliana landsberg
gaattgtgactagagagttatgaaggagatggtgcatacaatcgcagtggcatcaactcttgttccaataatcttaagtctcacttcacattccttctggatcttaacctgcaagagaagcattggaaaattgagtttctagaagatagatgaaacacatataatactgttgggaaataagaactagagaaagaaacacactgatccatctgatgtggtgtaattaggcatgtctccagcttgaaactccatatcatctggaatcaactgtggtgataaaagagaggagaacaagagtaagtacaaaacacctagaaccaaaaatgaactcgaggtctcattcatgatgaaagatcataagcttacatgcttagacacaaaaatctgaacagggccagcttcagcgaagaatcccatctgtgataatattaggaaaatccataaggttgatttgtcactaaagacatttgactaaaaaaataagactatatagatacattaccttattgaccaaagtgacaacagcttccaaaatctcgcctttgaaaggtctgaaaacgacgcattggtatttaactggaaaggtgacaaaaccagtcccatctctgatcaaaccctttcctattgtatctattccagttatcgccactacaaatccatgtcggccactgtccataccacaaaacgaaaagagcaaatattgataagtatcaatatgacattgcaatgatgaaacttcacatcttaaacctaaagcaaatacaaaaagctagaggcctcaaaatacaaatctctgtcacaagcaatggattaagcgaactatactaaagaacaaagttttagacttgagtatcaaatacaaaacaagatactggatctgaatgatttgcaatcaggcatctaagtgagctggatgaagtcatatcttaatactaagaaagctaaaggcttcaaagcaaatccctttggaaacaaattctgctaaaaatcagactttagtcacaagcagcagagaaagactacaatttagttaaaagaacgatctttattcgaatttaatccactctaatccctaaaacctaacaaattgaactagacggaaattagggttcgaaaaaatatgcaactttgtcgaagttgtcttaaggaaaacgaatccgcattgagaattgaggaaaagggtttg

SEQ ID NO: 10374 - DNA, 813 bp, Arabidopsis thaliana landsberg
ttcccagtcccagagcttgatgagcatatcatcagatgatgataagacatagggaagcgtgggatgaacagcaacacagcgaatgtaatcagcatgagcctcaaatactttgatcttatccatagtgttgtagttgtagacacgaataaacatgtcatcagctccagctacaacccactgcttccgtgcaatgaactttgctgaccgaactgcacaacaccaggacagagattcaacaaatgatgtgcgaaagaataagaaggaacaatgagatgctatatatcataccaggcaattcagtcacgtcgaaagattttaccattgtctgcaaaagtcatatttgggttaacaataatcagaagggagcacaaaatataagagtgaagaccaacagatagaaagtaagataaaagcaagagatgatactaacctgggtctggtaattccagatgcacagagttccggaatacaaacttgccaggatcctgaaacaatctatggattagtacttgtttccttaacgatatataaagcaatgaagaatgaatgcgctcaaattaccatggctctgttggatggagatctacagatttgactctttctgatctttgagcaaacttacgctgatcaaaacaaagaagcgtgtcaatacagtcccgaataagaatgattaaggatgaaatcgagcatcaaaggagactgcattaccttgatttcgagtctcagtggctgtcaacaaaagaagcaaacacttaggttagtgccgaagagagaaacataaaaaaaaatagcttgtacagaaatacttgatga

SEQ ID NO: 10375 - DNA, 816 bp, Arabidopsis thaliana landsberg
tcttttggacatgcaactaatcttctaaacttagatcttagcagatgctcaagtctagtggagctcccctcttctattggaaacatcacaaatctccaaacgttgaacctttgcaactgctcaaatctggtgaagcttccctcttctattggaaaccttcatctattgttcactttgaggttggcaagatgccaaaagttagaggctcttccgagcaatatcaacttgaaatctcttgaacgacttgatctcaccgattgctcgcagtttaaaagttttcctgagatttccacaaacattgaatgcctctatcttgatggaaccgcagtagaagaagtgccttcatcaatcaagtcttggtctggactcactgagttgcacatgtcatacttcgaaaaactcaaggaattctcgcatgttctagacatcataacgtggctagaaatcggagaagatatacaagaagttgctccatggatcaaagaaatctctcgtctacatggacttagactctacaaatgcagaaagcttttatcactcccacagcttccagaatctctctctatcataattgctgaaggttgtgagtccttggagacactagattgctcttacaacaatcccttgagtcttcttaattttgctaagtgcttcaaactgaatcaagaagcgagagacttcatcatccagataccgaccagtaatgatgcggtcttacccggtgcagaagtgcctgcatacttcactcaccgagctactactggagcttccttgaccatcaagttaaatgagaggcctatttctacatccatgaga

SEQ ID NO: 10376 - DNA, 1086 bp, Arabidopsis thaliana landsberg
cttccgattattcattatggctatcgtatgactcttctgtcttattcgaattggatcaaattctctctggacttgctagtttttcaataacaatttgttaacagctttggattagctcaaattctttgcaaaattgtcgttacaaagatggttagggaaccatggtcaaagctatggctaaaaggtgtgattttgttggcaaatatcttttgcagattcgaagttcacacagcaggagcttccagcttgcaagccaattctaacccctggttgggttagatttctttctaatctctattgatgtttgagacatctgatttctgtacaaggcgcaactaaaagctcctttttttacatgtttgtgctgttgtgcaggtcatttcgacatttttgatagtcagtgttatctttattccccttggagttatctcccttttcgcttcccaggatgtaagtagttactaaagcattgctgctactcatcagattctcttccatatctcacgtgtttcatctcccatgtttaggttgtggagatcgttgatcggtatgatactgagtgcattccggcacctgctaggactaacaaggttgcatatattcaaggagatggagataaagtttgtaaccgggatcttaaagtgagttacttctgccgccacgtttgttttgttctttgagatttgatagatttttgcatttgttgtttactttctctttttctccactggcattcataggtgacaaagcgtatgaagcaacctatctatgtttattaccaacttgagaatttctaccagaatcaccgaaggtatataacacttgatagcaactacgccgtagcattatataattttgtattagacctataatgaacaatgtgggttctatgtggaaatcaacaccgatatcatggagtaggcgggaactaagactgatgtgtgtatctaacttagattagtcaagattttatagctctaatgcgtcgatggtgtctttgaaacaggtatttaaaaagtcgaagtgattcacagttgagaagtaccaaatacgagaatcaaattagtgcatgccagcctgaagatg

SEQ ID NO: 10377 - DNA, 1114 bp, Arabidopsis thaliana landsberg
gtgaaaaaaaagaaaaaaaagaaagagtaacggagtgtaaaagttatttgagttggtatcattccttcgtatggctcaggaaaaagaagagaaaaactctgccccaaattacaatcctttttcactttctttttgaaagaagtatacccgaaactatagctgtccctgcaactgcaactgccactgatgatattattctctttaacgtaaacactgacttgtcgcttggtatctccattagatcattcatctgcaatttccgtgaaaacgaacataaatcacaatccgaaacaaaaataagctccttcattcagatattgaaacgacaacaaaccgtaataggttgcttccaattcttcttgattccattaatatgtccttttccgataactgctacaaccgaactatggtcacttgcaactctcagcaaagaggatgccatgtacctgcgcatttcatttatcaggatgtgaagtcgatgataatttgttaattcttctctatatttgctactaccagcatttctatttttagtttacgaatctgataaactacatagagggaatagagaatactaactggtctcgctcatgcacaattgtatccatgagagttggaaattccttgctcatttcttgaatcaccaaagtcaccatatccacattgtccatatctttcagctgaaccagtccaatttaccattgatcgatagttagaatcaatgtatatttgttaggacaaatcacacttaattattagatgtgcggaaaaggaaaaaaaataatacagtaagacttaccattttctcgagttcctcagcgcccggcaagaagacagcttgaaacagtatggagtataaaaacttaaccttgtgccatagaggcatcttggcccatgttctctttaacgtaatctgcttcgagaaatacaaaattaatgagtatactgaggattgaggaacgcttttgaaagaatatacgctcatgaaatgcataacattattgaaagactgttttgaagctacggacaaacatatcattataacctgtacagggcgatcaccaagtatcaccttgccgccatatttaatggcctcttcatacgacacacgaaa

SEQ ID NO: 10378 - DNA, 651 bp, Arabidopsis thaliana landsberg
tgtttatcatttgttgcttgcagctctgagactaatgaagagcctagatattacgatgatacgcctaatccattaggccctcagattcacccctcagggtatacatcaatttctactcttatgtgctcacaattatgatcaaaaactaaaacttatcggttattgacttgtgtatttcctagcgtggtagttcctccgatacctggtaatggtggttacagtgatctcttccctggcccaggtgctggaatgtaccctggcaggtttgttatagacatttatagtttctattatacaactgtatcactttaaatcatttataatgtcactcaccacatatattttctctccccaggggtggttatggggatggaagcatgcttgtaggtatgtacgattcttcaatccctcttgagaagcaagatattataacgtcttacttgattataattcgttaaagtgattctgtttggttgcaggacctactgatcctcgctttttcccatttggtgatggatctgatcgacctggcttcatgggaccaccacacccgtgaaatcactctttgtttcacagacacatagagatgcacagccattgatttgacacatgaaagcttcttaaattgttttgacaagtaacatggatttt

SEQ ID NO: 10379 - DNA, 1348 bp, Arabidopsis thaliana landsberg
  unsure (1)..(1348): unsure at all n locations
tggaagattagaggttattgtttccagtagttctctctgttcattctctgaaactgcggttgaagatgacgatggcggtttccggttagaacgtagaatcccgggaatgtgcttcttagcgtaacaaatcaaacagctctctatgatatcggagctcagatctcctgatctcattgataggatnnnnnnnnnnnnnnnnnnnngactcagttgcgtcagatcttcaaaccacagctccatgttcgaatctctactcggtttctttcgagatttcgccgcgccgccgggtataagttgcagatcggtggcggagatgtttcctcttccgccgccatcgtttactggccaaccgaagagtgaaggatcagctgaggaagctctggagactatagagtcgatgcactgttccgttataccaagcgatccggctaaaggagagactgactcacaagctttgagagctttaatggattcacgcaagctcttgtagacggaatgagagagaaacctctcagtcttggaaattaggttatctggtgaatactcttccgtcatttcgaggtgttcggcggcgcaacgaagtggaacaacggtggaagcagagaggtccatcttgacgccgtagcagaacttgcgcaccatctcaaagctctctgaactaccgggaaaatcctcgagtttgatgtgaggataaccattttcttcgatctcctgctcttccacttcttcttcttctttatcgtcctcgatttcatggcctttacctttcttgtcagtctcttctacttttgggtctattacagttatcagccccatggaagaggaagatctagtctcttggtctgtaatcaacctgtgaagtttcctgctctttggcatgagtggaaactggaaaagccacagacaacaacacaaatcttgtgagtaatcaaagaaaaaacagagagtgccaaagaagaagacaaatcttcaggcttttgtgaacgcaccttatggagatggaatgtcatgtcatcaacttcgatttcaatgtcactaggtaacccagtcgtacaaaacctgcatcacgataccaaaacgaaaaaaaaaagggaaatgagaaaatttctttaggcaacattttaaaatattattattgttaagataagtgttagctgatcttcaccatgcttggcccttggaggtagatttctctgacgccattaatggagacaacaactcagggctctgaaaaaaatatcactcaagacaggaaaaaaacaagactctctctatctctttctaaagaggagaatatggagagaacaagaaggggaaagggaaggccatctggtatcgtaggtcatat

SEQ ID NO: 10380 - DNA, 408 bp, Arabidopsis thaliana landsberg
tggtggctgaatgcgtttatagcgacggtctgtgggtcgctaaaagtctagaaatttaacgacttatggtcggtcgctatagaggtaagtgtgtgactgatggtgggtcgctataggggtacgtgatttttgtgtttcttatttactcaccaaagcccatctaaaggcctactaaacaaacaaacgaaaccctattccacgtgcgcagccgccgtcacttctcccatggccgccccctccctcagccgtggcgggtgccgccgccacctcacccttggtgctcgccctcagccctgtcgtgcccctgcgctcggtcctcattggttctgggagaagtcggtgttgtgcgccgagaggggcagcacgttcgggcgcggtgcgacggtggacgttcggagctacagcgcc

SEQ ID NO: 10381 - DNA, 961 bp, Arabidopsis thaliana landsberg
agagcatgtgactgactgcactcatgcagttgtagtgtcatgaattgtatattttcttctgctattttctaactatgttgttatattgtacagtgcagtattgattccttgctagagtgcacgatcaagcacatgctcttcctgcagagtgtctctcagcatgctgacaagctcactaaaagtgcaagttcaaaggtacttaataatttctagtcttcccaaggaaagttgctttatattctccatagtttgtgaagagacgtttccttttattcatgactgattaatagatcatttatcaaattgttggggaagttttcttaaaagcttatacatttgaagttacagatgcaacacaaggataccggcaccctaggaatatcaagcactgaacaaggttcgagctgggcagtggagattggaggccatctgcaagtgtgctcaatcatggtggagaatctggacaaagaaggagtgatgcttattgaggtgtgcattattttctcgttacctttttcatgtatttgaagcactttgtcagaacgactggcgaactctgcatttatcatcctgaattttgcggttatatgcaattccttgcttgagtgtgttttggatgttgaacagatgctatgcgaagaatgtagccactttctcgagatagcgaacgtgataaggagcttggaactcatcatcctcagaggcaccactgagaaacaaggcgagaaaacatggatatgttttgtagtggaggtaccttatttgggaataattgataactgttctccactctaaggtcacacacagcatggaatatactccaacacttggctaaacatctttacagtttacatgatctgaatagtcatccatttttgaacatggaactaaaacacgtcattttagttttaaatccgaatggaaacaaacaatataatcgctttaacattacagcatcatg

SEQ ID NO: 10382 - DNA, 1249 bp, Arabidopsis thaliana landsberg
atgtcatattgtcatcaaccatcgtattttcatttgatatagaaaaaatatatttccaagcacaatcgtgtgtgtgtgtatgcatcatcattatatgcatgttagtgttagagttacatattctatagaatatgtaaatagttagaagcgtacgttccttgaaaattgttcaaagtatttctattattgttttcttttgttaaagtatttctattattgtctcaaccaccttattaaattaaattacgtctctatctctttctatggagtcgtgttacgtctttctagtttgagatcttctactacttgttttcttcaagataataattttcgttttatatatggaagatgctggtgaacatttacggtgtaacgataacgttaacgacgaggagcgtttgccattggagtttatgatcggaaagtcaacatccacggcggagctacagccgcctccaccgttcttggtaaagacatacaaagtggtggaggatccgacgacggacggggttatatcttggaacgaatacggaactggcttcgtcgtgtggcagccggcagaattcgctagagatctgttaccaacacttttcaagcattgcaacttctctagcttcgttcgccagctcaatacttacgtacgtatatatgcttcactgtttcaaatcagtattttaaactatttgtgtttctttgagtttactaagtgtatttgcttaattaaaggcattaatgagtgttgttacaaaaatattatagggttttcgaaaagtaacgacgataagatgggaatttagtaatgagatgtttcgaaaggggcaaagagagcttatgagcaatatccgaagaaggaagagccaacattggtcacacaacaagtctaatcaccaggttgtaccaacaacaacgatggtgaatcaagaaggtcatcaacggattgggattgatcatcaccatgaggatcaacagtcttccgccacttcatcctcttttgtatacactgcattactcgacgaaaacaaatgcttgaagaatgaaaacgagttattaagctgcgaacttgggaaaaccaagaagaaatgcaagcagcttatggagttggtggagagatacagaggagaagacgaagatgcaactgatgaaagtgatgatgaagaagatgaagggcttaagttgttcgcagtaaaacttgaatgaaactagattgctaaattgatattcgtaatataccagtttcttcatattctta

SEQ ID NO: 10383 - DNA, 501 bp, Arabidopsis thaliana landsberg
tttattgtccgagagagcgggtcatttgtgggaaagctcatggggttcgtggacatggatttggcatccaaggaaatgtttggcctcaacttctcacttagaccccgtgccaagaaatctagcctttggaaacgcagcgttttgtcgctctctattttgtaattataaaggacaaaaatccaagcgattcattcctgagcactaaattaaaagtggtgtggcttctgtgagaagtacattcacaaatctaaatttgatttgggtctgagactgagattgagcagtctcaaatgtaaaattttaaaatggcaaatcgcaaaaatcatacatgatatgtttgtgcgtttaactgtttagagtcaggtgatactctaaagtcgttagcataacccgacatctcaataagaaaagctcttgtgtttctcttccggtgagtttgaaatcttttcatgcagtttacttgtgtgtcacatttttattgacctaagaatgcttcacatg

SEQ ID NO: 10384 - DNA, 1004 bp, Arabidopsis thaliana landsberg
actatgtagcacgctctcaataaaacttcgtggtccataaatagtcataagatatatctttatcccgaccaatagccaaaatctatctgttttgatcaattttctaatgtcgaataaacaatcatctcagctcatttcattgcacaaagatggtttataccttctagaccttaatgaaaccacgtctttgaagctaaacgtgccctttacattaccggcccaaactgaaccagtctgtattctttcttgccgtggagtgatatgtctcaccctcaaagacaacaatgagttagctatttggaaacctacttcaaaaaaattcaagagagtatcgatgattaaaccgggtcaaaccaaaaatctttgggattcggttatgatcgggttttagatgattacaaaattgtgacgattatcgatcagaaaacctatatatttacgttcaaagaaagttcttggagagtaagcaaactaattccctctagtgattgcttcttcaaagagaggaccggtacggttgtcgacaattgtatgtattggatagcaaaccggttcaacaaagaaaaattcatcttatgctttgatttcgttaatgaatagtactcaaaactaaacgttccgatgatgctatcaggattggagttcaattcatggttagatgtttcaaggagagaactatgtgttatcaatcactacccaagtgtagatgacaatttatgtgtatgtcgacgagaaattagaagcggcaagaagattgcgagatgggatagcgacccgtggatgaatgtagcgggaaacgatgacgaacccgttgatattaggtttgtatgcatagcaaaaaacgatgaagtctttagtggtgcgatgtcgtagtaaagaagaagaggacaatgtttttgtgtacaataaggaacaaaacgagttcattgaagttttattttctagtcatttgaaagtgttgggatgtatgactaaacttatgtaactccttatgaaaatatatg

SEQ ID NO: 10385 - DNA, 1229 bp, Arabidopsis thaliana landsberg
ttgtgctcttatatgaagactctccatgaacttatgctctgataactctgcttggataatcttagactcagtttcgttagcagggaagatctgatcaagcattgcctcatattccttgacaagcttgaacaataagtctgtagtgtaaaaaggttgctgaagaactttctggatgaaaggtaaacgcatgagatcaccagttcttttgtcatacttcttcagtatcttaaccaatcctgttgtttcaacaaaccattcatcaacgttttgttctactactaataataagattaagtcttaatgaggcaattaaattacattaccagtgtaattaagagcactgtaattctcaagaagaaccatttctccatggaaatcaacaatctccttcctgatttttatcatcttctccattgaatccttagctttcgcaattctatctctaaattcctgtttttgtacagacagagacacattagaaaaagagatgatcatttttaggaatcggattcgaaatgttgtttatattacctttagtctgatgatatattcttcttccttctcaacgaagaaattgttgaatttctccaactcgtcttctaacaattggatgaaatcgatctcttctttcgatattccgacggaaaactcatctaaacggagtcgtttaacgggacgatcggcggttttggaaccgatgagtttgagtcgttttttgagttctttgtaagacaagaacttgtcttgccattcaggaagtgtctgctcaatctgattgctgagactcttaccaaacttcattatcttctgtgtgtttttatttttctgggaagcttaagtgagaaaattcaggaatatgatgaatgaagaagaaagagagggtgaagaggtttagagatataaaagggattaaaaagaatattcttaaggtttctaattagaatatccttttttctctgtctttctttcgggagaatatcttccttttattcctttcttatttattacttttctggtttatatatttttgtggttatctgtgggtgagattataacacatggctatgtcagttcataaatatcattcacatgccaatttttatttatccaataactatttttatagatttgctgtcccacaaacttattattacagattttatttacttatataagaaaatattatatccgttatctgattcttttgtttctaaattccgatgggtatc

SEQ ID NO: 10386 - DNA, 778 bp, Arabidopsis thaliana landsberg
  unsure (1)..(778): unsure at all n locations
actcagaaaaccgtttagacaatagactcaacggtgacggtaacaacgaaagtaacggtgctgtcgttccgcccggtaaagagattgtgaatattcatgaagttaccgccactcgaccgttgagtacttctttgtccaattgttgctacaagtaaataaactgatgatcatctatttttatattgttatatgatatattcgataatgtagagttttataattgttgctacaagtaaataaattgttcatctatttttaaattgttatgaaatattcgataatgtagttttataattgttgaaaatgttggcttggcctgggatttttgtcttattttattctcgtataatttaattacatttttgggtgagacgaatgcatttgaaaccttacaaactaatatgtaaataaatattaatttttatatgattctaatgcttgaaattttgataatgatgcttaatgcaagtatgattaagcatcattatatttggtaaaatcaacaatcaaccaaaacaaaagattgataatatttggcataaaaaaaattgccaaaatatatccgcgaatcacgggcaaattatctagtttaaaaaaaaaaaagaagaaaacaattatctagttntatactaatctcttggaatatcaagattttcccatagaagccaaatcgatcaaagccctagcatatatttcccctgttttcttcgatatatactngtctttttttaacctccctaatcgtctccactctgaaatttattgacaggctgaatcg

SEQ ID NO: 10387 - DNA, 1758 bp, Arabidopsis thaliana landsberg
cacatcatgcattttcacatatgacttattgttgaactttcctccttccaccaacaaagaggcacaaacaagagtaccgagtatctcatagccttcacccaccgctccttttttattttcatctccatcaatgaatccctcgcatatccaataatctatcagcctctctttttctattaaatcatcttcgggaaacagagagcaatataggaaacaagttttaacactctcactttccagattatcatagctgtacttcaaaataggaagaatcctctcctttacagcaccaaaatttgcagcatatgttgttaagacatctactgcacgatcccattcttgcgttgtcttcttacatgccattgtctctccaatgacgtttagcgctagcggcaaaccacaacatgcttgagcaacttttcttgcgatttcgggaatgtcagggtggctgcttaatgtgatatctccaacttttttcttgaacaaatcccacgcatcatctgcacctaaacaccggacttccatcggatcatgaactcccatgctcgcacaaacactttgacagcgagtggtgaatgctattttgcatccgttttcacttgttggattcgggattccaatctcagttagttccaccctcttccatatgtcatccaaaagcaacacaaatctctttttgcttagaaaattgagtatatcgactgccttttggttttcacttttctggttccattccacgcctttaaatcctattttttcgccaatctctttttgtatcttgtggatttgtagatcaccagataccacaacccaaatgacaatttcaacgccatcatcggtgtcacaaaacctattgttgatccgagtgagaagggttgtttttcctactccacccatgccatagagacccataatcttagttccatcatccatgaggtggtcccatgccttttctaaaattgtttcctgaccaacaatcgttggttgtagaggcctttcctcccccacagctctcgtagctggatgagccacctcttcaaaaatccctttagattttaagtcttcaactatattcaacatcaagaagacccttcttccatagtcatagctcaatcttaagtttctcgagccaacaccacaacaacacaacctttgaagttcaacagttctactactatctagatcattgaattgggattcgatagtcttgactctcttaagccataccttgatttgatgaagcctttgtagacctccttcttctgctgtctgcaccttacgtagcagatcagctctcaatgccttgagatcttccatggcttcctccaaagaagtgagattctcctttatattttgaatataataaagttttctgcaaaagcatctacctagatggttcaacaattgatcgcatgatacttggacagagacacaaccacccatcttgcacttgacacacaaagacagattcacaaatgcaacgaggaagcttaatcttgaactgaaatttagtcaattggatgtgaaaagattatgtggaagaaaagaaatttgctggaaaaaattgttggaatgggtcaaagtcttcttttggaatcgtcataatgcatggaaccatcacattaatatgtattataccaaattaaaggattcctccggtgccatggcaccttcacattttcctatataaatggggaaaagtggctaccaaaaaaaactttcatttcatttttacgcctaataaaactccgtcctttt

SEQ ID NO: 10388 - DNA, 941 bp, Arabidopsis thaliana landsberg
cttcatgcttggcttatcttctcagctgagtcccgcaaaacccaattgctgaacgataatgatgttgaatctagcgacaagagtgcaaaaggcacacgatgggctgttttagttgctggatcaaatgaatattataactacaggcatcaggttgttaaattatgtttgaacgtttaacataacaaaaaaaaaaaaggtccaagcgagatttgtatgaactaaatcgaccgacgttttatttcacaggctgacatatgccacgcgtatcagatactccgaaaaggcggtttaaaagatgaaaacatcattgtgtttatgtatgatgatatcgcgttttcctcggagaatcctaggcctggagttatcattaataaaccagatggagaagatgtttataaaggagttcctaaggttcttatttctacttcttttgtgcgttatttctacgttgaattcaattacatatatatattcaagttttgttgttattggttgggtaggactacactaaagaagctgttaatgttcaaaacttctacaatgtgttacttggaaatgaaagtggcgtcacaggaggaaatggcaaagttgtgaaaagtggtcctaatgataatatcttcatctattatgctgaccatggagctcctggcttaataggttttcttaattttatgaaattattacgtaccatcaatccatatctataataaaagattttctcttgatactacgaaaccgcgattttctcagcgatgcccactggtgatgaagttatggcaaaagatttcaatgaagtcttggagaagatgcataagagaaaaaaatacaacaagatggtatataactcaaccattcgttacctagctttctacatatgtgttctgtttttgaatctctatggtgtgtttttttggatgtttaggtgatctatgttgaagcat

SEQ ID NO: 10389 - DNA, 1232 bp, Arabidopsis thaliana landsberg
ccagaaaggttagtcagtgtcttttttggatccgctgcaactaaagtctatttgaaaaaacggaaaaccacattgatctgtggtgtatatggggttatgttcttatcaaggttgaaaaaacggaaaaccacttgttcagttggttctatggaatgtgataaggccggaagctttatacctcctacggcataatcatttttctcaattcaatgtttagtttttgtgtgtatgctatgagagatacactgagcttctagctctttgagcttgacgttttctgttaaccgtataaagcacattttttttgtttctctttcaaacacaacattcaatttaaggatgcattcattgtaaaaagggttttttcttgaataaatttcacattcattcaaaaaaaataaaaaaataaaaaataaagcacatttttcctcgagtctcttattaattttgatgtacttatcgctagtgaagagcttaggaaaggattcttattgtttgctcaagaaagcacctttttcgctttgttgaattcaaagcagagggatggattgttcttgtttcaattctgatcatttttttttgctaaacctaggaaagatgatttgctgtcttgctaggagcacttgtttcattaattataactgtcatgagtcgagatgaaatcatgataatcttctaatgtcaaggataaagttataaactattctgctgtatcaaatttttttattagtcatgataaatatgtgccgtgatttactccactccacttgtatatatatatatgttaaccttttttattagtcatgataaatcctgcgccgtgtttaatggaaaaataacgacacgcaaactatatcactttttatatttactttttctaaccctattcttcatatcgttccaaaagaatttgattactgcaacatgaaatcacggcgacagaatgtgtccgtggctcgacaaaccatccttggacgcgacgaaaactttgaaccaatcccaattgatctcgttatcgagatattctcaaggtcgcctgtgaagtctatagcaagatgtcgttgcgtatcaaagctttgggcctccatactccgcctaccctatttcacggagttgtacttgaccaaatcttgtgctcgcccgaggctcttgttcgcctgccaaaaacacagagagttgttcttcttctcgacacctcagcctcataatcctaatgagagctcgtcttcttt

SEQ ID NO: 10390 - DNA, 1559 bp, Arabidopsis thaliana landsberg
ggagattaagttagggtttttggggacatacacacacacacacatacacgttcataaagtcacaactattagctaatatggatctcacggttgatctgatcttcatttacactcatacgtaacaatactaactaaaacctgactatcgaaaaccatatatatttctttagcttagtattgttatctacatttttatcataacctttacttaatcatctcctctctatcaatctacacacatcaacccatacgaaaccatccaagggccaaaactatacacagaatatacgtaagcaacaagcagaaaatatatcatccccactaattatttctaatccatgatttgataagttgaagatgaatatatggccgagttctcagttccatgacttgttgactcaaaatgaatgttattaaaggtttggtcacaagaatgaggcaggccgagggaaagggagacgctgtttccatccattgtgtgatagttttcgaaccctccgttgaaattgatgaagttcgcttgattcatgtgttgcttcgtgaacctcatgactacgctgcaacttgaggatgaattttgcctaggggtttcagtttcagtgaatccttgacgaaaggcgggtaggatcgtgttcgaagattcatttgaagttgtattattgtacggttgctttgaagatgaacctttggtactataccggtcacttccttttctgctttcttcaatatccatttcttccgaataaagttcctccaccagtggcttccacattcgaactcgagcattaatgaaccaatttgacacctacatccattttacacaagatactattaacaatacttattttgattatatataatcatgggtgctaaaagaaagtattccataatatatataattactaatttaaccaaaataaatttgatttactttacaaaggatcacatatatgatatttctcgtatgctatcatcgctattttcattaaaataattataataaaataaatatacatcatctatctaaataaatttaccaaaatatatttggtttacctgcttttcttagaattcttgggtacgtttttgttttcagactcgaaaagaaaaaaaaaatagaaataaagagatatctttctaaaaatatttttttgatcggaataaaatttgtttgaatctatatatatattcggttttacctgtagattatttattcttgatagtcggtgttagatgatgtcatgaaattgtatatgtactatgtatgagacatctaacattaagaaacttaagtatgtccaacttctgataatcgaaatcaattacctgactcttagtaaggccagtctgtttggcaagcattaccttatccaaatccctcggatatctatacaaaccaaaacaagacacaactaaatcattagcatgcatgtctatacaaaactaagtaatgatcctagcttccatatccttagttagttccctttgcttcaaggtcccatcattctgatatatcgacaataatcgtaacaagaattaaagatagaagaaaacgttac

SEQ ID NO: 10391 - DNA, 254 bp, Arabidopsis thaliana landsberg
gtttttgtcagggtacatgggagcagaatgagacttaagccaggtaaagatggaattgactttttaaggagaccatggcatatcatgttatggagtgctgagtcagtcaaggcaccagtaacgggactgtgacgctgattattggtacatctcttacggaataatcttgtatagatcgctcagattgcgcgagatgcaaccatgcctttactactttccactacaaacatgcttatgataccgcattctcttgt

SEQ ID NO: 10392 - DNA, 1517 bp, Arabidopsis thaliana landsberg
gtggcaacgtaagtgaatgggtatacgcttttaactttttcattgtcatcttttactttggatttctttttagctaagaagtctagctaactatatctatatctataagtgttttcacacaaatgggcttgtgtgtatagtattattctatggattcaattatataagtttttttttggattttggacaagtttggtgagtagaagaattagttttgttggaaataatggagggggtggggtcttaccaattataaaaaggacttgtgttgacatgcttgacaatgagaaaacgatgtttttacaagcataattctgtgttgaactttcaaaattacatttgcttaatcccaaaatacaccaaagctgatccagacataaactttagatatttttttgttttgcttacagataataaacttttgtctttctcaacctatagatcttacgtgccttatccagtcttaaagttaaatccttcatgggcccagcttgatttgttctagttccaaatctgcatctccaaacttttttccaagttcaggatattcttttgagttcttagggtccatttttgctttttatagcatggaactttagatctttgatccagaatctgatttctggtgagttttctttttctagtttgatgatatttgtggtcacaactttcttttttgcttttgtggttgaaaatgaaaacttgctgttttgattaagtacttgagcttgtaactatgtttttgtttcagcaggtttcttctttcagagaaagcaagtctgatgatagaaagttctatatattcacagcaacaaagacccttcatttgaggactgattctataactgatagagcagcttggttacaagcattagcatctacaaaatgtatctttcctctgcggtcacttaatggggatttctccttcataccaccaaaggatttgtccatatcaactgagagactaaagaaacggttgcacgaagagggtatgaatgagaatctcgtcaaagagtgcgaacagatcatgctctcagaattttctgaaatgcacggacaagttaaacttttacacgaagaacggactaatttgcttgatgcattgaggcagcttgaggtaaacttactttatttccttcatgctttttcttttttggtttgtttgatcttttgatgctggctctttctttcttgttaaacccttgtgctattgtttgagagaggtgggcgggtgaatttgtattattgttcaagaatttaataggagtccctatcgtccccttggaaagtcagtagtagaaaactcaaaactggtcatagtcacatcaccttgtataactataggtacacagagaagggattacaaaagttgtggacaagtatgagtttgatgtcgagtgtctgtttcacatttcttatgtccatctttcacgtggatgtgtggcccatcgtgttgacaaaactatgaatttgatacatctaaataaaagcataaaacgtgttcatgtgtcatttat

SEQ ID NO: 10393 - DNA, 2875 bp, Arabidopsis thaliana landsberg
gatttttttcttaggactgagaatttgtttttctattttggttatatgtgattgctttggctagaggagaagtaaaaggccaaggacaacctcacatgttttggagatattctttaaaatttctttcccacattcaattattatgtcgtcttttgcaacttccgtttttggcttccacttctgaagtttccaggaaaataaccaaaagtatatattttaaaatagatattaatgacgatcaatgacgataacaatgttaacagattaattagaccgatatatatacacgatttgattttcagattctatctagaaaaaaggtaggactaaggaagtagattaagttttaagccaatcagtaagattgcatcgtgatttaaccaaagactaggaaacaaaataagaattattttcctacttaatgttaatgttgcaacaagacactaactaacattgatttgaaagggtaaaatttggtttagtgcgttccgaagcatgaacacaccaacaccacaaattctattatcattattcataaagtgtgttggttggacacttaacaaaaatggttagtttcgtaaacgcattaaacatgaaacatgctttatagaagaagaagaagaaaaataaatagtgccacacttcaaaatgtgaaaaatataaaaaaatcatgaacttaaattagctaattactaattagctactcctcttttttctcattggtatccttggatataattatgattaatcatgatttatgttgtgtcattatactcaaaatacggttatgaaaaaaaaatatttcaaattaattaagatcaccatgcaatttaaaaatttaatcgaatctttttcgtttaatatgatttcacagttacgtgctacatatttattatttttacgaatatactacatgatgaataacaattacaataagatgatatcgattgaacgtaagaaattatgtacaattataatttatatccatcacaatatgtctaactggctggtgttaagtcattatgcagttccgcaaatttaatgataaacttacaagaattataacattctttaactctaaaatttgaaacaatttttttcgtttaatgatcctaattacgtacatctttataattatcacggttacataatatattcaaagtcaaagagatcgcattgattccgtacgaatgaaggaaaacaaattgtcattaccaaaataagaaatatacaaaaactacaaacaaataatgaatcaattccatctttaaaagtctccaaaaaaagtcaaaaaagagtcacatttcttcttcttttgtttttacctaattttactctttaatcctcaaatcaaaacaataaaactaaacttttcaacttgaaaaaaagaaataaaatggtcatgatgacatgttaacatgaacactagcagtcatgaccatatcacatacagaacacgtccgtaacagagccgacgatccacaatccgtacacaaacacaaatgacgtcaaggcaacaccaacacactcgccgttaattgaccgcaccgtttacatcctccgttaacaaccgcagttacatcacctccgtcacagcttccacagctagattctgcatcatcagcttcttcaaccaaaggacgacgaaacgcatctaaatcatcgacttgagctaaaacttgttcgagatttgatctgagattattagcagtagcttcattagtttgtgctaaatcacgccagatctgattctctacgtagagattcttcacacgttcttgtaaaacccagtttaatttccccattcttataatctcttcgtctttcgctttcagctttttcaatatcgcgttttgtaccgctgacgctaacatccgcgtttgcgttctttgtctcgcttctaattcgattctcaacgtttccgtttgttgcgctacgaatctatcgatttctgagttttgctgttggatctgtgaaactaactctgcgtcgattaatgacgccggagaaaacgcgattgctctgcgtttctgagatgcgattaaagcgtctgaatcaaacgttgaatctctctgacgttttgaaatagctgtgagctcgctttctgatttgttgaagctgttaatcggatctatgtactgtaaattccgatcaccgattgttaacggaaaaccaccgccggcgatttgttgtccgttgttcatattcgtttgagatttaacacattctctggaagaaaagaaatgtaacaaaaaaaatcaatacaactgcaaaaaaaaaatcaccgaaaccgaatcgtgaagagaatgaaatttacctgtttgtaatgtattgagaagacaagagattcatgtgtcttgcttcaacagccatttgtaacgttttcttaaggttctcgagagagaaagagagagtttgcaggaagaagaagaagactggtgaagaaatctatggagggaggctttttatttaaggaagagagagagagaaaaaaagtcaaaaatgaataaattaaaataagattatttctagaaagagaataaattatccttttgaaagttttacatttttttaaattaatttcctatatataaatatcttaacaaacaccagcacatgtgactgtatatgtatacttttttttttttttttgattgacttgacttgtagtgatatggtataaatattgtgtattcctaattttgtaaatttaaaattgatttttatttgttagtaatgtttaaagaaagaaattgtttagctatttttccttaaaatctgttattttttcccgtgcataaatgctatttatatcttggtataatatatcatagcaaaaggaaataaatttagctaatataaattttcagcagtt

SEQ ID NO: 10394 - DNA, 1795 bp, Arabidopsis thaliana landsberg
  unsure (1)..(1795): unsure at all n locations
ccgtccctaattgtccaaaaatctagagatataggttatggttttttcttaatttattttatacataagttatgttcctcgactatatctacgacatgattgattgaagctcgagagacacaagttgagcttcaatacacaaccatttaagaaacatataaccatttaagcgaaaattattattaatactttatccacctttgtaactaacatcctgtgacattttacgtgttccagatatcacttgatcctgtgactttttagcattttccagggtaccttaaaagtcgagttatcgatctctgctagtaatatctgtttctaaattgacaagtgaaaacgaagtcgtttcgtcaacaccaaaagcattaaacacgtcaaaaagacaaaaccacctttgtcttcttgcgttcttcgccctcaacccaccactatcaatttaagaccaatctgaaaaccatcatgacgacaaggatcatacattttttctttgctttctttctccttgcctcacttttcctcaaaggcagtattctaaaatacattcgtacatatatacgatgttgtgagaagccgtacagttgtataacacaactaaagtagcaatctatttgttaaattttatggtgagtgtggattcattcaaaacttccatccccatcactaccttcatccatccgaccattcaagcttcgaaccttagattctgtggatcaaaccattggtggatatcccgtggctgcctcaattctattctactttccattcaagatggttcaaagttctacttcaagcagatattttgtgaatggatttaagttattattcctgtctatttgagttttgtagaatttgctttctagtatacatacttcaccatgtattataattgactcaactttggtcatccaagtctatactagtttatactttcatatggtatagttcgggaccgaacatggggtcctatatctaggagatagtggagcagctgacgacacgtgacgagctccttaatgaataaaactccacataaacagagctaacaataggacaaccatccttccatctctccgacttcccatattggtttgtttctcaattttctatttaaagacatctaaaaaatgaagaaaacattgattattaatttctacaaagtaaactcatcttattttgattgtaatttcgagttactaatacattagcaatgaagatcagtccatggatactcatagccatcatcatgatgatcttagcatcatttccttctccgatcaaagtcgttggtgcaaaaaaagagctaccattttgcaatctggatcttctagcttgcgtccaaccttttctagttaacggtcacggaggcaaactgcctaaaggctgttgtgagaaaatgaaaaagtcaacatcatgcatgtgtagattccttacggccaaggaacagaatctaaacgcagctgctcatagaatattctggttttgccatatttctgtccccaattgtccaaaaatataggggttataggttatgttcctcggccataattatgacactttgtactaaaatgttataacacctatgggcaaggtgtttctaaattggtaagtcggaaaacgacgtcgtttacaaaatccgatctgcacacacactcacattcatatgtcgntcttcgtcaacgtcggtgaagaaagcataaacacgtcaaaagacaaaagcacctctgtcttcttgctttcttcgcccttttactttaacccacgaagatcaattcaactaaaccaatctcaaaac

SEQ ID NO: 10395 - DNA, 531 bp, Arabidopsis thaliana landsberg
tgatgttgactttttcattttctcacaacagccattaggcagttttcttccgtgaccacgaactttaaaaggtaggacgcaaggtagaagctccacattgcaaaatggtagatcttttttggcaccgacgactttgatcgtggctggaaatgatgtcaagattatgatggtggcgatgaatatcaatggaatggtcttcatgatctgatgaattagtaacttgaaatcacaatcaaaacaagatgagtttactttgtagaaatagtcttcatttttttttcttattgtctctaaatagaaaattgaaaaacaagaaaatattgaagtcggaaagaagagaggatggttatcctaatgttagctctctttaattatgtggtgttggattcattaaggacctcgtcaatcgtcacgtgttgtcagttgcccatctatcttctagatataggatccgaacactaagatatgaaaatgaaagtataaactagtatagacttggatgaccaaaggtgagtcaatatatacatagtg

SEQ ID NO: 10396 - DNA, 340 bp, Arabidopsis thaliana landsberg
taaaatatgagataagtggatgtatgagttcagataggttattactgcaaggacttacttaccatgcgttgttctcacacatgagcagacactgtgtattgggattaagagataaagaacggagattttggtaagacaaaacaactctacttcgacaggattagtctccgaaatcacatcatacatgtaaaaacattatcacatgttggagaaaacctgcattgggcatgctactggaacatttgtatcttgctcattaatgttgtgacattaaataacatatccattaacatgatttgcagacacaagcaaaaagcaaagtgatacctaataacctgta

SEQ ID NO: 10397 - DNA, 1713 bp, Arabidopsis thaliana landsberg
ttatatggcttccttttttttttttttttatcaagcaatgctcttttctttgccttgcattcttctgataactccccgagcttagggttggctgttcttgagattttcgatattttcacggatccaaactggtattggatcggggtaggaggcattctcgggtttacggttctctttaacatcctcgttaccctcgctcttacattcctaaaccgtaagtacacttatattgattgattgtttttatcatgttttctaatagaatcatatatctacaataacttgagacctaaatgttatgatatagaagaacatgaacgttgacatttatttgtgttccttctcaaacaaacaatatcactttttgttgatatgccagcacttgagaaacagcaagccgttgtttcaaaagaaaatacagaggaaaacagagcagagaacggctcaaagagtaagagcattgacgtgaaaagaggaatggttctaccttttactcctctcacaatgtccttcgacaacgtaaactactacgtcgacatgcctaaggtaacaccaaatcccaaatccttgttgacattaaaaccataaagatgttaaccaaaaaagaaaacaggaaatgaaggaacaaggagtttccaaggataagcttcagctactaaaggaagtgacaggggtctttaggccaagggtattaacagctttgatgggagttagtggagctggtaagaccactttaatggatgttctagctggtagaaaaaccggtggttacatcgaaggagacatcagaatctctggtttccctaaaagacaagaaacctttgcaagaatctctggttattgtgaacagaacgatatccactcaccgcaagttactgtcaaagagtctctcatctactctgctttccttcgtctcccaaaagaagtcactaaatatgagaaaatggtaacactttttcttgtaacttaacaccatttataataggatctcaatccatacaccaacttttgcagagatttgtggatgaagtgatggagctagtagagctagagagtctaaaagacgcggtggtggggcttccaggtatcacagggttatcaacagagcagaggaagagacttacaattgcagtggaattagtggcgaatccatctataatcttcatggatgagccaacctctggtcttgacgctagggctgcagcgattgtgatgaggacagtgaggaatacagttgacacaggaagaactgtggtctgcacaatccaccaacctagcattgatatctttgaagcttttgatgaacttcttcttttgaagagaggaggacaagtgatttatgctggtcctttaggtcaaaactctcacaagattatcgaatatttccaggtcagattctacatttaatttgtcaaggtctctatattaaaatgtcagaactttcatgatcagtcctcttttgagaaactgcaggcgattcatggagttccgaatattaaagagaagtcttatccggcgacatggctgctagaagtgagctcaatggctgcagaagctaagcttgagatggattctgctgagcattatataacatcatccttatatcagtgagcacaacctaatattcaaagtctatatcattccagagttttcaactcagttagaattgttcgtggtgtagacacatcacgaatcttgtaaaggaactaagct

SEQ ID NO: 10398 - DNA, 531 bp, Arabidopsis thaliana landsberg
  unsure (1)..(531): unsure at all n locations
catgtgaaatgttgttttcactaggtagtatagtgcggtttgaaatgaactcttctttccaaattatcagttttaatatttgcaatatgaaaaattaaagataaaaaattagaaaaaacaatttcgtcgatttgaatgtcttccagatatgctaaaaacgctagtcattagttggaaaatacatcatcttcaaaaaatcagaacagtttggaaaaaaagctacgtcttgattgttatcttcaatcatacatctcatcgtgcaaacaaatgttttcacttcggtatgtagtgaagttaggttccttacaatatctccaatagtcacttctattttttcttctctttataggtgattttattttaaagtcattttattctaatagatacctccaaaatagaaaaaatagaataattttagttttactcaacaattcgaaatctatntctattttttcatttattttaaagaaaaaattatttcaaaaacatctgttagaataaaatatctctatataaaaaaaatatagtgac

SEQ ID NO: 10399 - DNA, 432 bp, Arabidopsis thaliana landsberg
tagaggctgtcatggaatctgtgaaggcatcaacttctgcttctactaaaatgcctagttcagaaagcaaaattttaaaaaaatctgacgaaactggcactgcgcaagttgtttcttaggctggatcctcagtttttgtcgaagcaagaccttcggagactgcaccgcgaatcttggaaaaagaaggtgcccctgagaagtccaagtctcctactcctaaagcacctgccgaggagttggaatttattgttcgacatgcttcgggtaaacaattatcggaggagcagattgccgaaacaaggcaatacgccaaggatttgaagtatccgcaaggatccttggtgtatagcggcactaatgaagatgattttttctattgcctactagacaaaaaagagatctttgtctgctgggaaatgatgaagaacatgg

SEQ ID NO: 10400 - DNA, 1361 bp, Arabidopsis thaliana landsberg
gattcatgaaccaaaaactagagatatcttcattgctatacaagttttacaaaaacgatagaacaggttttgtaataggttttgatttattgtttcttatatgcttcttttataaggaacatgtaattaagtaaaaaaaaaagatttggttcaacataatcctcagaccaattacaatcaaggatcgctaaaacatctgacttccatcaagttaaagtttggctacatataaccacgccaccacagtattcagatcactaaaacatctgatttctatcaagttaacatcccggtaaagcagatttagggatggtgcttagcaatgagaggtttcagcttcttcttgtcagcaagaatcttgaggaagttgaagaggaaagggacatagttgtgtttccttctcttgttttctttcttccagttcttagatttctcctcctccattacaatcttttgtgaaacagtctctatcccgatattgacttccgaaagctctctatcaagagcctcgtaactgcttttctcagcgtatttatcagcttgcaaagcacctaactgctgcaaaaccctctctcgctttctttgatactctttcagttcagctacatacatctctttcctgttcttaactacagctaagagactaaaccgaatctcattctgcgaataccggtcaatctgctcttgtaccacaggttggaccattctgagccactcgattccttctggctcacccagacactgtccaagactaatgggtccttctttaagaccatcgagctcatataagataccatcaacaggtaagtagctgatgtaatgatacacatcatcatcttcgtctagatttttcgcagcagctaattcttcatcttccatgatggaagacgggtcaggcctggcaaatgtgttgtgagctgcacgtatcgcctcattgttgttgatggctaaacctttcagttcaggaggaaattctttggcgaattgtttcagttctgatagttctgagccaatatcaatactcgaagagttcatgaggactgataatatcgcttgggtcgcacaagcattgttgattatctgcaagaaacacatagtttataaaaaaggtaatgattggaaaatccgtgagtcacaaatctaatgtgagagtaaaagacctggcttgcaaagaagaaattcgggtttggctctgtgatgacaacacgattctccttttcttctggacgccacttgtaaagcaatatcaatccatagacaggtctgcaaatatcagacaactcaaggtaaatttgacttagtttttcttctgtttcgaacaatagaagatgaacgagtaacaagtaaactaccttatttca

SEQ ID NO: 10401 - DNA, 746 bp, Arabidopsis thaliana landsberg
agtaaacccaatcactcacttctcctttccgaaacaagaatcgattctcaaagttcttgatcgacttgtttgacttgttcacctccaacttcttcagattctcgaagctacacagctcggcgatagccttcacaactccctttcgttcctcttcttcggtgaaaggaagctctaagaaagttgcaagcctcttcaagttggtctcgatgtcgtctttgagatcctcgtaccttaaaaagaagactttctctggtctcttcaagctctctctccagtatcccaacatgtgttcccaaaacgggccaaacccgatcactccccggcaatacagatcaaaagcttggtctagcaagactgggctcactgactcggatttgatgttgttggtgtaatgccacgaagagatgaatgtgtcaaacgggttccggcacaagtacacgaccttcacaccgggtttctcgatcgtttcctttagggaaccgaacggtaagtgggttgcgaacgttcttggactggctagacccgagagatcgggaacatctccgttggcgtaaagcttgtactcgaagaaaggtacaaggtcatgagggttggaagtgaaaagagggtggttggtactcgaggcaaccggatcaaaccggtgacggttaaggatggtgaaagttaaagcttttagccaggttgtaccggatttaggtatggtggcgagaacgacgtcgttttcgagggattgtaaatgtttttgg

SEQ ID NO: 10402 - DNA, 1595 bp, Arabidopsis thaliana landsberg
tctcgcaacgcgtttttggtgtttggtcccaatccttagcctctaagacaaatcaacccaaattttctataacataaaattaattagttttgaaaaaaacaatattttaaaattagatatttgttactatcggcacaaataaatctcctctcaaaagtctgccacgtcataattgcaattgttccgcgtctctgctgctacatgctcattcactcgcaaatcgcaattttcttcttaaccaaatttttatacaaaaaaaaagctcagacagaagtactaaatggtaaatttgacataattaattggtgtgtaattttataaatacagaagtacttgtgtcttgtatttattagtattccttatttaataaattacttttcacttaatcatccaactttgtcagattcacacgcaaccttgaaaaaataaaatagaatggtattgtgactttcgtggaaatttctacttagatgacacagttgctccaattaaaagcttacaactttttcttcatctttctttatatttctcacccatttttcaccaatttctctccacttaaaaccaaccccaattctcaccaaaaatcgcaaaaaagatttcaactttcgataaacccagatcgaaaaatcagatttttccagatcaatcagagagttagagatggagtataataacaacaatcagcaatctttttggcagttcagcgaccagctgagagttcagacaccgaatctagcgaatctgtctctcaacgactcgatctggagcacaaactctgtcttcaaagagcgtcgaaacttagacatagccgccaccaccgacaagaacaacaaccagatcgactattatcagaagaagacaacttccgacaacatcaattccaactggaactggaagtcttctggttcaaacaacgacatgggtttaggattcggacctgtgggttcaaaatccaccgtcgatttaaacccaatcgacaaattcaactcaccgttcaacgacacgtggaaattcaactcagtcaacgttaacgttaacggttactcaccgtcaagcgccgttaacggagatttcaacaaaggggtttacacgtcgatgaagaagtatgggtacaacgtcaatctaaagaacaacaacaagaacaaaggaatcgatgaagatcatcagattcagaaaggtgggaagaagaacagaaagaatcagcagaacaataataaccagaggaacgaagacgacaagaacaatggtttggacaagaggtttaagactcttcctccagcagaagctttgccaagaaacgaaaccattggtggttacatctttgtctgcaacaacgataccatggaagagaatctcaaacgccagcttttcggtattcatcaccacatctttcttcttactgtttcgattgtttcttcttggttttgatttgtggggatggaaattgtttaggattgccaccaagatacagggactcggttagagcgattactccaggacttcctctgtttctttacaactactccactcaccaacttcatggaatctacgaggcagctagctttcgaggaacaaacattgagttgaatgct

SEQ ID NO: 10403 - DNA, 368 bp, Arabidopsis thaliana landsberg
  unsure (1)..(368): unsure at all n locations
ttagatgtaacagtgtgatgggatgaactttgagtatgaattcgaccttgatttattgatcaaatgagctcggtccctatagtagaattgtagatggtatatagctctacaactttgctataggtcactggatgtgttgccatttgaaaatcagagaaaaagtggcttaaacttgctctgtcaggcaactgaatggggggctctgatggtacagtaccggttcactgcagaagatcttgaaccccccccccctttttgctcgtcgccggtggcccgtcgccgttnnnnnnnnnnnnnnnnnnnnnnnnnnnnnnnnnnnnnnnnnnnnntccgccccgtaaaaatcctcgccgccggtgagctggact

SEQ ID NO: 10404 - DNA, 1173 bp, Arabidopsis thaliana landsberg
aggactcgattgtttcggattcctaagctgccttcatacttgggagactaatcacttgtaatataatgattgtacatgaggtaatgcactctttaaaaacacagaaaagagtatcccagaactatatggcaatcaaaacatatgttactaaggcatacaatagagtagaatggaattttttggaagtaacaaagaaactatttggttttttggaaaaatggatagagtagattatgggatctgtacgatcaatacgatactaaatacttgtaaatggtttacacgaaagtataattaaacaaggagacccactttcaccatatctttttatactctgtgcggatatcatgaatcatttgataagaacaaaagcttctactagaaaatttggggggtcagaataggcaatggagtcccagcgattactcacctacaatttgcggatgattcccttttcttttgtcaaaaataataatcgcaattgtaatgcaataaaagaagcattcgaggtctatgaatattattcgggacatagaatcaatccaagcaaatctctcattacatttgggtccagaatcaatgggaatctccaaaccgactaaaacaaatacttgaaataccgaaccatggaggtggtggaaagtacttggggttatcaaaaacaatttgggaaaaaaaagaaatgttcacctacattatagatagagtaaaacagagaacacaaacttggagtgcaaaatatttatcaactgcagaaaaagaggttttgttaaatcagtagctctatctatgcctgtttattcaatgtcttgttgtaagctcccaattggcatagtttctgaaattgaatcactactcatgagattttggtgggagaaaggcaatcaaaatagaggcatcccatggattgcgtggaaacgacttaagtactcaaaaaatgaaggaggactcgggttcaaagaccttgctaaatttaatgatgctttacttgctaaacaagcttgcaggctcattaaacatccaactttattgtttgcaagaattatgaaatctcggtactataattattgtcagctactgaacgcaaaaaaaaaaagagataaacaatcctatggttgggcatctatattagcaggaccacaacaacaacttctactttaaagatttaatttt

SEQ ID NO: 10405 - DNA, 234 bp, Arabidopsis thaliana landsberg
cgatccttgcagggctcaactagcaatggagatgaagaagatcgcctgcggagtcgttttcgctgctgcttccatgaccgccgtcatggctgcagaggtcggagcacctgcaccaggacccgccgcaggtggagcctccgtagctgcttcacttctacgctctttgtttcgagtttccattgtgcgatatttgccctccatcgtggactctgcttaccgatgattagggctcga

SEQ ID NO: 10406 - DNA, 838 bp, Arabidopsis thaliana landsberg
agttagatcgtctgtttagtaaagttgtgtggttcagtttctatatgcttattttaatttttgtaggaggggagcgaaagtgaaggagaagaccatgatgcttctgaggtaacgaggaaacatctgaagcgcaaacgtcctcaagttctgcctagtgattttcgagaagaagttgttccaccacattcagttgcatcagtagaaggatgtctctcattcttgaagcagacacaagcttatggtacaatcattattttctgctaaaaacaaatgattattctgcggttttatacgttttttagttcacaccctttatagggtaaccatgtctcacgaaattctgtgtcagcctaacaaattcatgtaaatgaatctggtcaagatcgtgtaatgtgctacttttttttatgtagaaaaaaggcaacgggccactgggaaacgtacacctcggtttcttgtcgcaattacacatgagagggatgatatagaagattttagtccaccaaataaaagagccaagaaacaacttgatgccgatgatgatgcatcaagaaggggaggagggtctccatacagaagaaaagaactcagtgaaatcacaccaactaggcttaggaaaacggtatttatatagctctagcaatttaaggtcattatcatttcagtgttgtcatgattgatcagtgaaaaaaacaatttctaccctttttctcttttgccagtcacaagcacaggaagcacaattcaagcaccctgatagttccatgtttgagaatggggtgagagatagatggcataaaaagggagctgctgatagagatggtgccttgttatggat

SEQ ID NO: 10407 - DNA, 1050 bp, Arabidopsis thaliana landsberg
  unsure (1)..(1050): unsure at all n locations
gaatttcttgatttggaaatcggataacgaaaatttttctttttggtctattgatgattctgatcgcggtaagtttgagagcagtttttatcaaaaaaaagaagtttgagagaactcgactttaaaactgtttgttaacacttactaaacctaacttgaaactgactaacaatttatgtaccttaattaggtccttataacagttcaaagttagctacaatacttattcattttaccatggaaatttaacacatgtaagaatacgcaacgtaaacaaactctatcaaaaccacaccaagatctaactaatttttttttgaaaaaagtctagtcaatccgaatcaaaatgattttggttataacttataattcaatcatattataatgaaaactagattagtcaaaccaacctacacaaacaatatcccaatataaaccaaaatacctacaactattttacaagaaagcgaggaaacaaggaatagaggacggaaaaatgtggtaaaccaacaaaattagctagggaaacagaaaaaagagaggagaagaggcattgaggtaacgtagagctcaacagtcacttgcatcgttacgcatgaggtaaagcacgtgccgtgcacgtagaccatacctctctagatctattcataaaatccactctcctaattcatgaaatcccacaacataaccatccgataaaacaaggaatattttctggccattaaaaatgttgtttcgcaagaaaaaacgcgagagattacgatctccaaagccgacgattaagggtgttttgatagcgttttttgcctctacagccgcagtattcctcttgttgctggccggtttatcactagttgnnnnnnnnnnnnnnnnnnnnnntccatgccgctcttccttgtattcagccctgttctcgtaccagcgggtattaccgccaccgttcttgctttaagtttaatggctggaggtactccggtctgacggctctcaccatcttaacttggctctataagtaagtaacactaacctacaaaacattcactttctata

SEQ ID NO: 10408 - DNA, 833 bp, Arabidopsis thaliana landsberg
tttacaggaatcaaattggatatcttccctgacaggataatcaatatgtgttgattagtttcttcttctgtaattattcttttttcgagaccacgatttttaatggaaaatattatgaatattttttttattgtgtacacaccaacaacacaagattaatattgtataggtcggtgaagtacaaccggaccacgattgttgggaaagaccggaagatatggacacgccacgaaccgctttcgccttagatgcaccatatccagcctccgatttagcgggagaaatcgcagcagctttagcagccgcttcaattgcattcaaacaagcaaatcctaagtattccgcaatattactcaataaagccgtacaaacgtttcagtacgcagattcacatcgaggttcttacactgataatccgggaatcaagcaagtcgtttgcccgttttattgtagtgttaatggatataaggtatatcttgaatatttctcgaatatttacaatcaatattaaatgggtttactttcatataatcatcatgttatttcatatatataggacgagttgctatggggagctgcgtggttgagacgagcaaccggcgaagattcttatctgagatacttagtggacaatggtcaagctttcggtgaaagttccaattactttgagtttggctgggacaacaaagttgggggtgttaatgttctcgttgccaaggtttggtccaatttccaaaatcagactgatgtatatatatatgataagtgtgaccgttaatcaatttggttgaacaggaagtacttcagaataatgtgaccgcgatagccgcata

SEQ ID NO: 10409 - DNA, 530 bp, Arabidopsis thaliana landsberg
aagttcagtagtaagaataacaaactcacaaactctcaccgggagtgcagtgaaagcaacaatcattattcctttcacagggtgatgcattagaatgcaagcagcagcccttaaatcttcctctgtcggttgttccattagctgcacaacaaaacaacctaccaataagatagagaatacaagcgaattctaggacatgtaagcactaaacaaccagataagtacgttttaatccaccagtggcattggaatgaggaggtttggagtcaatagactgctttaatttgtagccaaaacgaatggacaatgtactcaacaaagcacccccagcaattaagatccaatttggtccttcaccgcgaaaactctcaaaccgctgatgcctggaaacgccatttcttcgtgtagtcattgtaagagaaggtcaaaaaatgtcttctatcatccaaccttaacactgaagaggaagccacagtctcaagtttagtaacagaacagaggcctttaatcgtaacaaaccctatgcgaag

SEQ ID NO: 10410 - DNA, 1723 bp, Arabidopsis thaliana landsberg
gaaagaccatcaacaaccaaaacaaaactaagaacatagatattacagatcaccccctttaagttttgtttacccaaatgcttcctcaccttgactggtgggtccattttatcctatacccaacccaaaaaaccattaccttaaaagaacccctactaatgaaatttgaccacataagttaaaaaaaaaactcacacttaaaccaagcagccattgaacgtttattcacatcctaaacttcctctcagcagcaagaacaagaagccttgagacaccttgtgtccacatttcatattccctttggctcttgacctcgaattcaacattacctcgcataaccgtcttcaaaccgaagtatcttagatcatctcctccctctagcaaatgtcgtccaggccaggccgggacattcttgatcacatcaagcacaatgtctgtaacaaaattggaaagatagtaaaataattaatagaagagtcttcttcaagttcacattcaaaagcaagacaaaaagtaaaagattgaagggatttgatcctatagttactttagtcacatatacactgttgctttttcaattttttttccttttctcgtctcaaatccccatatctaaagcagacccacctcaaagttttgaattctctttaccaggttcacatataattgactcattgacagtagatagtgacaaaaagtaaagctttcaatatcaaactaaagaaacattctttgtttttaaacccattagaagaatcatctgaaatgtcttggaaggaattagagaaatctccaaccaaactattcagggtttaaagtggtgttatacttatagtatgtaaaaagagtaaataatcacttactctttttcttcttggtgaaggttcctccaacatgcctgctcttcatcttcaacataacctataagttcaataaatcaaaacaaattagtgattctgtaagagatgcttaagcagcaaagacaaaagtggatcccatgatttcagtatcatcatcattatcaaaacagtgctttttatttttaagctttagtattgtttctactttctcttcttttcctgccgtttgaaatttctcttttctcatctttttgtgtgtttcatataacaaagttaacatccatgtgaagtaactaaagattcccactgattcacaaataatttggctctctttaatctttttcatcagatcaacaacgatcatttcctaaagtgaaacgaaactcgaggcacaataagaaaaagaatctttacctgattcattttgttgatgtaaacagatactatcttccagtggagatctcctgcaaaagtcacacaacatcattagacaaaagattcaacaactaaaatgtaaaaactttcaaaatataataagattgaattttggttacctttgcgagtgcgtttgagaagttcacagcctctagcaagccattctctgctacaagttcccaagaaattctcctgttgtacaagttcaccactgtgactactgcttgagcttccattgctaccattaacattattattgctgcttcctcctgtagaagtgagtcctttttcccttggaatcactgatgcaatgttccacacttccttcattgccctcgccttcaatgtttgcactcctcttaaagctacacaccaaaaatacaaatcaaattacccaaaaattaacttcactttctgatttcttcata

SEQ ID NO: 10411 - DNA, 530 bp, Arabidopsis thaliana landsberg
agttttgaattaacttatggaaccgactattaaaaaaactcttgactatgattacagcagctcatattttttaggtaagaataaggattttcaaatgactaagtgagtcacgggtgctttccaaacaaaatgacatttccatcctcattgaggaacacgtatactctaataccaacttcttttttgatgtaagacccacaactaccttaaacctgaatatcaatttggcttgcacttggcattcctacgtaagacggtgtggtggtttctaagaaaagtataataaaattccggtttgttatagaacaaaaaaagaaggtcatatagagttgatcttttcgtttcaaataccattgacagaaaagcttggaggaacaatttgcgaatataatgttgagtttggtgtttctcgaagctgaacaaacccaagcaacaatatgcacaaggctagaaggtggagagtattatttcaaaaggtcaaaatgttcgttggtctcattatcaaattggtgtagtaattaacgttccat

SEQ ID NO: 10412 - DNA, 1567 bp, Arabidopsis thaliana landsberg
ggctcttcgtagagctaatctaagtcataggaatccagatttggttcaagtcattaaaaaagaacgaagctgaccgtggtgggatgatatgagaaactacgtccatggcaatatcactttatctttttctgaatcaaagtggtctgttcttgctacaactgatccatatgagagtcttgaccaacttcaaatagtgtctggtcctattgaacttaagcagtcagatggtcgtgtgtttgtcagtgctaaagactttaagattaaattgagcagtctagagagtttgattagtcgacactccttaaaagttccagtccgcgcttccggagctgcatttattgaagccccagattttaatcttgaagttacaatggactgggattgcgaatctgggaattctttgaatcattatctctatgcatttccagctgaaggaaagcctcgtgagaaggtctttgatccgttcagatcaacatcactctcgcttcggtggaatttctcccttagacccgaaaaattccatcagtctccctcaagtactgagcacccaacagatgttggaactgtctacagttcgcaagacaagcctgacagcattcctcttgcatccccaactatgaatcttggagctcatgatttggcatggatacttaagttttggggtctgaattactatcctcctcataagttgcgttctttctccagatggcctaggtttggcgtccccagagctgcaagatcaggaaacttatccctagataaagtgatgacagaatttatgctccgtgtagatgccacaccttccctgataaagtacatgccttgggactctgatgaccctgccaaaggactgacctttaacatggcaaagctaaaatacgagttatgctatagtcgcgggaagcaaaagtatacatttgaatgcaagcgggatgcacttgaccttgtatatcagggtcttgaccttcatgtacccaaagcttttattaacaaagatgagcatccttgcattccaggaagtgttcaggttttgaggaaaagtactcaggatgctttgatagacagagtaccatctgggaaggaccataaaaggtatgaaaagcatcgcgatgaagggtttctatagtcttctgattattttaccatcagaaggcaggccccaaaagctgatcctgaaagattattggcatggcaagaggctggaagaagaaatcttgagatgacatatgtacggtctgagtttgagaatggaagtgagagtgattaacacatacgatcagatcctattgatgatgacgggttcaatgttgatattgctgacaactgtcagcgggtctttgtttacggcctcaaactcctgtggacgatagagaacagggatgctgtttggtcttttgttggtggaatatcaaaagcatttgaaccttctaaaccttttccttcttgtcagtatactcagaggaagattcatgaagaaaacccaaaaggaattttgtccataaacgcattaaggagaaatgtctagatcttttgcaagcccctgaagaaacctccctttttaaccgtt

SEQ ID NO: 10413 - DNA, 1659 bp, Arabidopsis thaliana landsberg
ctgccaaattgcagaagtcacagacactagactgcagtgaaattatgggcttcaaagaatgacacgtcctcccaattattctcttttcttcattatttatttttcatacgttttctacataactcaaatatctaatattcacttcacaattcacattacagaaaaagttaaataaaataaaaaatgacgtaattgatattaaatggtttgaacaaaaccacaaagcacagatctggtacggttggtaggattagtcaggcccattgactttaaccgacgccctttagataaagtcaagctaagcaaaaaataaaaaagccttttaaaatctcgtgtaactaactcgctgtatgccggcgcgtggaaacgtactctgcaatctatatataagccgttaaactctatttagcttctctatagacaaaagtttatgttttgtttttcctctaactcaaaaaacaatctcagatattaaataaagtgttaatcaaccggagaactctccgacaaaacctcgccgacgattttccgacgatgaaagatgggctttttcgggagactgttcgggagtaaaaaaaagtctgataaagctgcttcgtcgagagataaacggaggtggagcttcaccaccagatcttcaaattccagcaagagagctccggcggtgacgtcggcttcggtggttgagcaaaatggtttggatgctgacaaacatgcgatagctgtggctgctgcgacagccgcggtggcggaagcagctcttactgctgctcatgcggcagctgaagtcgtgagactaacaagcggaaacggcgggagaaacgtggggggcggtggaaactcgtcggtgtttcaaataggaagaagtaaccgtcggtgggctcaggagaatatcgcggcgatgaagattcaatccgcttttcgtggttatctggttagtttactaatttctcaaacgttttagctgattaattcaagaatgattcaaaatgttgaattttgaaactgttcgaaaatttcataaaacaatttacataatgtgcaagaactgttgaaattcggattttttttcttctcattcacaatttcaaattttgaaaatggaaacaatgggtaaaacttgtattgttttgtgtggggtttggtcccaaaagaaactgactatagaagaagaagaagaagacaaacaaatgtgaaatgaagaaggttctttgaaacttgtacactctgccgacactatttttagtggttatcaatagttccagttttttttttatcttcttctgttagtctatcactcaaaattttgatgaaagatctgatcagaatgtcgaaatgaacttagtttaatgttggtgtgaatcatttgattttagttgtcagatgggccaagtttttttttgttccacgttatgttgtgctttataattctgaacctttattgaaattaacaagactaattagtattttacagatgggttcttttttgctttaggacagcaactttgaagttgaaatctttacccaaaaactttttcaagttggctattaatcttctctttacttacaaagattcattgtgaccatgttttttactctttttcaaattcctatctgtgaatcttggagttttttttgtttttgctaaattgcgttaaa

SEQ ID NO: 10414 - DNA, 819 bp, Arabidopsis thaliana landsberg
aataaagcagttgtgaaagattgtattacagctatattaaactgcgcaattacacaaaacatagcaattattcactgtcattgtagaaaaattcttatctcatagcataaaacgtaaagctacaaaaaattttttggccgccttgacttattgctaacatagaagaacctattatgacacgaaattctaatcatcggtattttttatcaaaaaattaaaaaacagcgttgtagtttagctattatatcattaactataatagcatactaaaaagtgttatagtatgagtgacatctatcatagctgccgagaacacatcgtttgtgaattcgttgtctataacgtaggatagcagatattttgcgctaaaaatgaacaaatttctggtactgaattaccaactacctacataacaaagcatgtatcagcttgccaaaagtcgcacacctactaaccgtcatgtggaagagagggccaaagcaagactaaagaatgtggtcaaactcctctatgccattaaaaacgttacagataaaagacaaagtatctcgtttagagtatacatttagccttcccttgggatatcgattagtggcaaaaagtcgagtagggagattagcatcccactgagaagatgattcatcggaaatcaccctgttgttagtttgagatagagtcaatgtagcgtttaattgaacaaccaaggatgattggagaagagcactaccttccatatgaagctccgaagtcgaaaacgcaaggattacgccggctacaaatttagggcatttaccgaaacagaaggatgagcgaagacga

SEQ ID NO: 10415 - DNA, 1389 bp, Arabidopsis thaliana landsberg
catgttctgttataaagttatgaagtcggtgagtgactttagagtctccctcaagagcaatcaatggatcagaattcgtacaggagaagatcgtctccgatcagaaccaccaccggcggttcaaagtccgttaatttctccgaactacttcaaatgaagtatctcagctccggtacgatgaagctcacgagaaccttcactacttgcttgatagtcttctctgtactagtagcattctcaatgatctttcaccaacacccatctgattcaaatcggattatgggtttcgccgaagctagagttctcgacgccggagttttcccaaatgttactaacatcagtatgtgttcttccaagtcaaagttttgagctttattactttagatctcgttctttacactacgcatttgcctctgtatgtccatagctcttggtcgatttcaatttgagatctatactcataaaaattgagtctttgtcagtcacaagactactatttttggtttgatgttgttttggtgaaaaagtgctcttttgttttggtctcagcttagactgttacattcgttttttccgagttttttagattttgttctgattctgttttgttttgtagattctgataagcttctcggagggctacttgcttctggttttgatgaagattcttgccttagtaggtaccaatcagttcattaccgtaaaccttcaccttacaagccatcttcttatctcatctctaagcttagaaactacgaaaagcttcacaagcgatgtggtccgggtactgaatcttacaagaaagctctaaaacaacttgatcaagaacatattgatggtgatggtgaatgcaaatatgttgtgtggatttcttttagcggcttagggaacaggatactttctctagcctcggtttttctttacgcgcttttaacggatagagtcttgcttgttgaccgagggaaagacatggatgatctcttttgcgagccgtttctcggtatgtcgtggttgctacctttagatttccctatgactgatcagtttgatggattaaatcaagaatcatctcgttgttatggatatatggtgaagaatcaggtgattgatactgacaaaactttgtctcatctttatcttcatcttgttcatgattatggagatcatgataagatgttcttctgtgaaggagaccaaacattcatcgggaaagtcccttggttgattgttaaaacagacaattactttgttccatctctgtggttaataccgggtttcgatgatgaactaaacaagctatttccacagaaagcgactgtctttcatcacttaggtaggtatctttttcacccaactaaccaagtatggggcttagtcactagatactac

SEQ ID NO: 10416 - DNA, 1330 bp, Arabidopsis thaliana landsberg
caaaatcttaagaaaaagctataatatagagattatattggatttgacagcttcatataagagataaaccaaacctggatctgaaaatttcaatgaatgtggaataatggagaatttgttgagatggtgtgaacacgaagtagtaacaactaacaaggtaattaaggatcattggcttatataataaatagatttagaaaaagtaatcagtcaatgttgatcatcatcttgacaaattcatcataattgacttggccatcaccatccaaatctgcctcctttatcatttgttcaacttcttcatctgttagcttttctcctagatttatcattacatgactcaactgcaataacaaagcttttcaaattaataaataattaacgtaattgttagtctaattattgtaaattaagttgtgcatgttaatcagacgggtctgaccctgtacagagaataataattgtttattatccatttgaatatgcaatacaatatagtaggtcaaacggcctaacttgaacaatttctaatttcggtacgaaaaatatgaataaaccaaattcatacaattgtttagttttttttttttttttttaagttgtaagcaaaatacagctggttttagcctaagttttgaccaatcgatatagaaaaccccaaattaataaattgaattgtgttgcatgcaaaaaggtgtctgcattaatgtaacttttgaggatgtaaagaaaggtatatatatttaattaaactaggtgaaacatgtgccctcctgtcaaataaaccaataaaatcaaacgcattttactctatctaactactttgtattaaattttcttttgttcctcttcgttcttctctaaagattcacaatgccagctagctctaagccctcacgatggaaaacagactttcgaaaatataaaatcaaataaataaatggccatgtcttgttaaaaaatgttttagaacataaatgagacaactatggatctctttaaattggaagatcgtctggctttgttgtctgatatttgtcattgattctacatatgtgaaagtgtgttttagctggatttctcgttttttctagttaatgcagaattaattggtccaagtggttacataaaaatactatgctcataattattgtgcttagcctgtatttgacgacactttagagatatagagcatgtaccacttaagcaaagaagacatttatgaaattggttcatgtacctaaactaaatttgacaataaccaaaatttagataaggatttctagtagatacaaaaatctaaataattatagctctaatcatttataac

SEQ ID NO: 10417 - DNA, 762 bp, Arabidopsis thaliana landsberg
acggaccggttttgatgatcaaattgcaaccattttagttggagggttgcttcctttaagactagagcctctccttctgcgactgaaaaggtggttcttttaacgtttatcctttgagagcatacatcttttctcccattttttggttttcaatatgttgaatctattcaatagtgtttaatccacatatgattttttactttttcaacactctcatcgtatgtgttcaacagttgaataatttattcaacactcccattacatatagtcttattatcaaactcatagtttgacatatctcagtcatcataactcacaactcagacatagcaaccctcaaactcatgcttacgcatattttggtcgtcgacctttaacccccccaattccatcacttatcttctccttattcccatgatcatgcaatatacattactagccatttcgttccaccattccatgtactttcgccatttttacagtttaacaaatcatgtattactttcccgattgaatatttttctataaacatttgtcccactacatatgcctcctgatgatctccaagtactctctctagaagaatcacattcactcatctttccaagctcatcatatgtctaattgggaattgcttccggacttggtacataactgaccatgctagctagttcattaagaatttgtccatgtataaagaacttgataggaggaatcaagcccatcaagacaataccatgagttaagtccggtttccacgtt

SEQ ID NO: 10418 - DNA, 1076 bp, Arabidopsis thaliana landsberg
  unsure (1)..(1076): unsure at all n locations
aaattgtattaagggagtctaaatttgtatttagtcctcggaccgagaaattgaagaaggtcgaaagatagaagaacctatatacaacaaataaaaaagaaccaacaaaagctgtagcggatgcaataagagcaatacaacatttacaaatctctctacatctttctgtatctaagagttcgacatagctcaccacaaggctgcttttaatatactagacagagtttatctgaactgtcatacctgaaacttggtaggcagcttaatatttcatgagaggaaaggcagccgaatccgaagccttttccacttgctccgagaaacggagggatgcaggcctagtatatgttccggcatgaagtcatgccgtgtcaatatacctaccactggaggtctctgcaatgcaaattaacgaatttgatatgaattggatattcgataactgacgaaccaagaaaccaaagagctatcggatatatagagaactaagtgatggttcgagacttagagttttgttattgattccccaaagaaacgaatgatacaaaattcaagagactctactgtgttcaccattttacttattattcatctataggtatcaagttcaagtatcacacgtactagtgtctacagaaactgataaggacgagggaaaaggagaaaccaaaatcacttacattggaggtttttggtataaccagtaagtgccttatgccaacctcacggaagagaataagggcctttgcaagtgacattgtctccacaacagtgtaaggcgaggcattagagaatggatgtaaatccaaatacatattcaattcttcctcgcttaattccacatcttctatcttatcactcctcccagaacctttcttagcaaactcttctgccttgaattgggcaagggtattggagtcacaagctactggactaggcatgaatactcgtttctttaacagagtcagaatatgaggccggaggattagaccgtgtagaacaggagctgcagctagtggtggcccatcaaccacggngaagccattgtgattggtcgttttgagaacgtgtacaat

SEQ ID NO: 10419 - DNA, 1807 bp, Arabidopsis thaliana landsberg
caaaaaccttgatatttgaaagttgtggtgcttaagcaaagggttgttgtttttttagttatagccgtaaataaagtaatgtggttttacgtaaattatgaaatctcaaattcgcgattccctaaaattaatttattccttccttcttccacatttatttatagtttcatacttttgtatatattattgtaacatataagaaaagtaaaatccatggtaagtcaatataggcattggtaaaatcgaaggcattgcttaaggttgctatatatgtctccaagtttgagacatgtaaaaacataatgtatacgtagaatagaaatgaagatctcgtggtaaaaaaaataaaataaaacaagatgaaccaaaaaacaattcaagatgagagaagtccaaaaaatggcctaggttttttaacccacgcaacacaagttgggaagtttggtcaatagcttttaacctaagctttctatttctctttatatgtaaaacattaaagttgtcaacaaccatcctcttggaatatctattaatgctgtgaaaatccaagtttttgctttaatgcttcgaacggtttgtgctttaaacccgatacatcaaaccatctatctccgagactaaaccctagggagcatgtatcggacatgctcgtcgtactcaaaggaagaggatgatggaggtacacttgcctctcggctggtacaacactcgctcgcaaggttcgattaatagctcctccaaagtggtctgctcaacctagaaaagagaattgaaggagacattttaatttagtgagataaaaaaagtgaattgtgaacctgaaataaagaagtggagatgtttcataaaccttgataacacttttgaaagagaccttgcacaagacaatcacattgtggtccacctaaacaaaaaaacaaagtatacatggtaagacaagagtccaacaatgaagaggaatttggaaaatcaagaagcaaacctacagttttctttttgtttcaaacttttaaaagcataattccttcatcttccactcaggcctcacatcgtttgattcactcttaggacctaaactgaatgacgtctttagcccaatgcatatttgctgttcttatcgattaacacttttggatcgcggcgtgacacccatttcccgatagaagtgctgttccctatgaatccaaactaaaatccgaatatctaggcctagatagcgatatgtttttctggtctgctcaacgcattttcatatttcaaactgctggtcaatgtttaattcatgtataaaataatcacatgtgaagttgatgtataaaactgccacaatttgaaagttggagtattaaatgacatttttctcatttcgattatggtgaaacgacgttgtattgaaaactaaaagagactagttaacggatgttatcggatctgttagcgataaataacgtcgtgtggattttggcatgatcaacaaataattttgtatgaaatggtgcccgattcaacgtatttttatatattaaatgaccatatacgaagttcacatatttaaaataattactttttaaaatttcgcgtataaaatgcaatatttcttaataaaaaaataaatatctgcttttttgggttttttcacaacaaaataacacatataaaataaataaatcatttattttctaaattactagagagggcatttcggtatttcaagtatcttcttcttcctaagctacacaaaaaaatatctaagattcttaattttatccaggtttttgccaaatcgactggtctcagagttttctcg

SEQ ID NO: 10420 - DNA, 1081 bp, Arabidopsis thaliana landsberg
tactttacgtggcttattaccaacacgaccatcatcttctttattgtccggagtgtttggcaccgtgtatgtgaaagtccccataggaatatcattatagtctttaagatcattgagtatagagacgacggcactcatacatggccggttcttgggtcgatggcttaagcattggtaagccaatgttgctgcttttcttgctcctgtctctgagtactgaccttcaagtctcgggtccatgattcgagatagtttacgtgggtcattgagcattggacgagcccagtccacaaggttttgttccctcgatgatctctttttgtctactgatctccgtccggtcaaaagctctagcaacacaactccaaagctgtatacgtcacttcttgctgttaaatgaccggtcatgatgtattcaggagctgcgtagccttgtgtgcccatcactcgagttgacacatgagtgtcgtctccttctggtccgtctttggctaacccgaagtcagagagtttcgccgtgtaatcctgaaaacaagatttggtataggagcttctttagaactttaggaattataaattggaaaataaggggccgattggtaacgactgttaatttcggttgtaaacgcttttgctgtaagaaatttgactgtaaaaactttgactgtagagactttaagagtaaaaatcgggttggattttttgttacttacggaatctaacaagatattggaggctttgaaatcccgatagataacaggattttcagcttcgtgtagaaattgaagtcctgttgcagctccatgagcgatcttcattcttgttgaccatggaagcgaggcagagtatcctgaaatattaatccaaagtcgcttagaaacacttgtcataagtttagttccaaaaaaatatttgtctgaataagaaaacatagagaaagagaatgagccctacttctgaaaagttgattctctaagcttccacgaagcatgaactcataaacaagagttctatgttctttctcacaacaataaccaatcaattcaccaaatttttgtgcttcaattgtcccaaaaacata

SEQ ID NO: 10421 - DNA, 509 bp, Arabidopsis thaliana landsberg
  unsure (1)..(509): unsure at all n locations
tccttctgatctctgtggttgggtggaaagcatgctctcggatcttgacccgacccggattcaagaaaagcctgactcagagtacgatcttagagctattcctggctctgcagtgtatccacgtgacgagcacgtgactcgtcggagcaagaggacgagaattgaatcggagttatcctctacgcgctctgtggtggttttggattctcaagaaactggagtgcgtttagtccacgcgctattagcttgtgctgaagctgttcaacagaacaatttgaagttagccgacgcgctcgtgaagcacgtggggttactcgcgtcctctcaagctggtgctatgaggaaagtcgcgacttacttcgctgaagggcttgcgagaaggatttaccgtatttaccctcgagacgatgtcgcgttgtcttcgttttcggacactcttcagattcatttctatgagtctggtccgtatctcaagcttgcgcattntacggcgaatcaagcgatacttg

SEQ ID NO: 10422 - DNA, 598 bp, Arabidopsis thaliana landsberg
cactgactacttattactaacacctttttgcagggttttctaatttcacacccacttgttagttatgcatgtcttggtaagctcatctaatataatttacaatttatttgtattacagttcaactcttctcatcttaaatcaaccgacttttagtcttttccattatattataaaggattttgttaaatttccatctaaactttgtttttcgaacccaactacgttacacgaatattccattatcttacaagtcttcaatacaatgcttcattacatttaattttacacacggaatcatattctttcttacatgagcctagaaataactattacaactatttcaaatattacactaattatacaaatttcaatcattgcaaatattacacaaattatacagaaacagaatatgcattatatcacaattaaaacttatacttaattaaatacatacaaattttcaaaataatttcacaatcttacctcaacccattacagcatctggcaaacttttcttgccaaccaccacaaatagcattcatcgcacaagatctcgtaaggcccagatgcagcagcacactccatagcacaatctgg

SEQ ID NO: 10423 - DNA, 1235 bp, Arabidopsis thaliana landsberg
acaaacagtaaagcataaagttacctttctaatcttgtctttggcgtgattggagaacgtgaacaacgaacaaagtcgccgtcgactatagatttcgaagatatatttactagttcaagcggctatggtttcgtgcttggttagggttttactcagatagctagaacttatgctgataacgtgttgtgaaaaatgggtttagggaacggtttatctctgttattgatttattcataagataaatcatatatatatgatacaacattaggttttaggtttagatatcgagtcatctgtaaccttctagatctagaatatactaatggaccgcataatgggcatccacatattatacaatattattcataataaaacttaacgtattaacaattatctattagttaatatcttaataaaattgcgagggttgcaacgttgtaagaaagtagttgcaaataagtgaccgtattagcaaaatagtcacaaaataactgtttggtgacactattttatgagacagagtatatgaattttgaagtttacaagtaaaccaaaatactacatatgattctacaatcactcatgttacaatattaaataagatctttcaatttaatgagtaaaaacctgatataaattaaatacttgaagttacatatttgttgcaaatttgagactactttgtggctaaagcttccgactaaaaacggtgtttctaattcgtcttagtttgcaactattttacgaccaaaaccatatagccaacttatagtcttataacagtcacaaatatgagacggtttaccaacaatattttttgtcatgattttgagacggttttccaactatattttgtgtagtcgttaatcagtcgcaaaaaaatcataaaatagtcacaaatatttgtgactaaaacaatggtcacaaaatatagtcctaaaatgcaggttttcttgtagtcgcactacaagaaaaccgttgtataatgactacaattatagtagtaaagaagttgttaaactggtcattactactatttgacgattaaaataggtagtcataaatcgtagctaaaacttatagtcgttattttagtcactaaatggcgactaattaacgatcatgtcgcatgaggaaattttagtcgtagattagtcgtaggtttgtaataatatttaatgactatgttacgactaatttatgattagctcagttgaacatattgttctctgatc

SEQ ID NO: 10424 - DNA, 562 bp, Arabidopsis thaliana landsberg
  unsure (1)..(562): unsure at all n locations
cctccaattgtgtaaagagacattccattgatggatttttgtaggcaacgtaaacagtcttgtcttgtaagatcaggtgtgcactgaactaacaagtacaaaggctggggtgtgatgacctttctcgtataaaactttttagaactatnnnnnnnnnnnnnnnnnnnnaggttcaacgtgcacgacaccaaatcctaaactcatctacttgattttgattacttagatgaaatattagcggtgttcaacaagatagcactttctttgtatgtaacggtcgagagaatatttcgttgagagtatctaagcatacactcatcatcgtaataaagtacgacttctttgttatacggacaccaatctaacgtctggttgacggaaaaggcaacgcattgataggataaacactctcagagacaatgaccaagagaagacataatacaaagcctcatttgctacttaacacttttttatccttttggtattctcttgtaccaaatctccgttcttttgaatcgtattttgcatatacacatggtggtcaaaatgagtatgagaaatg

SEQ ID NO: 10425 - DNA, 1357 bp, Arabidopsis thaliana landsberg
  unsure (1)..(1357): unsure at all n locations
agaaaactaatcatcaatacaatatacgtaataacaaaaaataaaaactaagctacaacaaattacgtgccattgttggctttcacgtggccatcctagcttttcattcccaccatcagcatgtctctcattatcccacgctttaatttcgaattaaaaattgatataaattgtaaagtagacactttttaataaaataatttgcaaactagatagttttgttagattgatgagaaatatacatttttttctttattctctaatataattttttttttaataaagattttaataaatgatttaaataactttattgttttgttgtctttaataaataattttagtaaatgattntagaaatttttataaagaaaagtggtctaataaatttttttattatntntcaatacaaaggacattttagcattttttctatattttgtcttgtactttattacacaaatcttttatctcacaaaaagtaaaaaaaaaaagtctatttctctaatttttttaaaaactaactcgtttacaaattatttttacaaatatgtctacttttccaaaaaaaaccttacaaataattatctaaaagcatacaaactgtgaaaataaaggagattgaaagagagataatagagagatccaaaatcacatctcatttcatttttataatctaaaaattcattcacaacaactataaaaataaaataaaacaaacatccaaaaaaaatagtcacagaattttggtttccgatcttctgaatatccacaacaatgctctgctatgtcggcaaagccaccaagattttcattttcatcgtcaccgtcgtcttcgtcattgggctcgtcgtagccttcggtgttctccgtcggcactctcaccactgttccggcgactattgctcatcttccaccgatccctcttcttcttcttcttcttcttcttcaacttctcctttcataactccattcccaaacccaaacccgaatccaaacccgaacccgcctgttctcggatcttctcctccatctccacctgattcatcatcatctactccaatttccccaaatccgccggctccgatcgtaaatccgaatccgcctcctccatccactccgaatcctccgccggaattttcacctcctccgccggatttagatacaaccaccgcacctcctccgccttcaacggatataccaatcccaccaccacctccggctccagtatcagcatctccgccgttaactccgccgagctccgtcgtccccagtcctgctcctgtgcatgccaagctagtaaacgattaaagacaaaacctttgtaaattccgacatttttcttgcgttcacattt

SEQ ID NO: 10426 - DNA, 760 bp, Arabidopsis thaliana landsberg
aaaaaaaaattagtgaaacaattttaatttattttcggaaaaagagaaaatatagaacctgatgctgcataggtttaaatagagtcgaagggttatgggccgtagtagaattataggcttgggcccattcttgaaacatgtcaccgttatgatttgacacattggattcacccataatgttgttttggttcgagcttgagctacttccttgcaataaagtttcatacattgctgaatgtgccgatgcgtcgaataaatgggcttcgttaggcccattttcagtcagccatcctccaacgacgtcgtttccaaaaggcccacccatgctttgctgttgttgtaaagcagatgcttcatatgaagataattggtcttgactcaatatatgttcctgcgtctcaagaaattatttagttactaatagatattgttgaatacattatgcttagaaaaaaataaaggggagtttaaattattgacccgtcgttgattgacacgtgttaaggtgtccatgagctgcttctcacaagtttcgtactcttccattgttgtaaacctgattggatctggttcgtatttcctaattatatatataatttggatataagtattagttacatatattttcatacattgtatcacattcactgtgtttttggttataaaaagaagaccttagttcttcctctgccatgagaagttgttgttgtaacttataaacttcatgctcaagttcctaaaattgatagttagagagtaa

SEQ ID NO: 10427 - DNA, 959 bp, Arabidopsis thaliana landsberg
gtggctgggtaatcacagagaaaacagaaacagatcccagattagaataacataatgcagataagacttctttttttgtgggcaaaccaaagctgacacagcttgattggcttctcgcccataagaactataaaacggcgttgccaaacataacggtatacaaatataccacgactactgatcgtcttcgcatggcatagacaaatcactgttttatgggagggaggaaaaaaacacgagtaaatcgtactcagggaactcatcgataagcagtacatgattggctactgaggtgaggaacctttgtttcatagtcggagactccatgattaacttgtgtctccgccgtcactgccggaatatcactctgctgagctggcatcatctcttctatactgggacccacaccttcatgctggcacattgaccaaaaaagtcaacatttttaacttaagttattaaaaacaaagaaaaagaccaaaaaaaaacctgttgctgcatagaagcgaataaggccgaggatgaatacgcctgagcccactcagggaacatttcaccattgtggttcgtcacgtggcattcactcatgttgttttggttcgagcttgagctacttccttgcaacaatggttcatacattgccgatgataattctctgccaattttacatttctttaaagtaaaaatttactgaattttcttgatcaagattataaaaaaatgtgaaaagtttacaaatcttcttgatcaaagaaaaaaaaacaattatagtacctgagttggttagaatgggccgatgcatcaaacaaatgggtttgattggtcccattttcaggtagccaaccttcaacgacgtcatttacaaaaggaccaccaatgtttggttgcatagtagatgctttatacgaagataaatggttgcttatgagatggtctcgccgttggacaacatgtggtag

SEQ ID NO: 10428 - DNA, 1878 bp, Arabidopsis thaliana landsberg
  unsure (1)..(1878): unsure at all n locations
ttttcctgaggaaagggtacatgtgatgtgttgtgagccaatcgggtctgacccatgatttgtatttctatgaattggtctcgagtttgggtttgggtttctcaatggtggatctgatggagaatgtgaatttgggttttggtgataaaagacgcgtaggttttgcagtgaagagagaagagttagaagaggaagatggagaaaagagtgaagactccattgatgacctcttttcgaagcttccgtgcagaaatatttgactctgtgtagaaacgcgaaccgttacgcgtggataaggacgacgatgcataaaacgactacgttttgttaatcaaaacttaatatgggcctcctcgtatttgggccttttaaaagcaagtagcaataatctgaaacgaatcagagaagatcgaattttctttgaaactctgtaaactctgtttctgtaaagttgttaaattttgtcgatctggtaggaagaagaagtacaagagaacaagaaanagtcaattcctttcgttagtcggcgaattctagaaacgatgttcaatttctggtatgattttgcgaattttttgccatctgattcatatgttattgatgaaattgcgtgatccagacattaggtctgttagcgattaaggaaatcttgttgatgtgtagtttgttgagctataatgatatatttgaggtttttgaggtgaattgacaagtgtagattttgctcagctactgatttagggttcatagttactgatattaggtttacaatgatgtgctgtataaatgcacctttcaagtttatgaggtgatgtattatattaacttggaagctgagatagttagttgatgatgtttcttttttttgttgtgtacgtgaaggggatcaaaagaccaacaacaagggcaatctcgtcctcaggaagcttcttcacagtcgccatggtactcgccttctttagttagctcgccaagctcatcccggcctcaaagttcaggtcagatttcagcacaagtatcaccgggtgaagcagctggcattatcgtcttcttgaaagacaaaaggtttgctctttttgtttgtttgtttgttatccttctctcgagtgtgcgttttttttgtatgtcttctttttgaatagtgtatacttttctgtagcgtggatgaactcaggaagcttctctctgacaaagatgcgtatcagcaatttctgctctctcttgaccaggtcaaagtccagaataatgtaagtctctaaaacagtcagttgtttctggatagctaagagtattactattaattgtagtcctaagaatggagcttcgttagttatgtgttgatattattcattggtgctctttcaagtatatacattgatattgtttgaggaagcctttatcatggcgtcatcttctacatgttgccagtaattagagctttctggttctttgttatagtctctaaaacagtcggttgtttctggataaccgagggtcttatctgtagctctaagaatatgtagcttctttagttctgtgttgatataattcattagtgctctttcaagtctatacattgatattgtttgataaagcctgtatcatgtcatcagctttctggttccttgttatagtctctggacgttaattttttcgtgatttgtttctgtccgtcagatcaaagatgagctccgtagagaaacattgcagctagctagtaagtactctatggttcatgtaattctacaggaaactttagttcaatccagaaatctagaactttccatttgatcaaatgtaacaggagacaacttggagaaggagccacagataatggaaaacagaaaccaagtgtgtatcaagaaccaacttttcttg

SEQ ID NO: 10429 - DNA, 1947 bp, Arabidopsis thaliana landsberg
agtgtcatcatcatctttcccaaggcctggcaggactttcgagtacatttccttcttatttaacactgagcttaacaatccaggcttgccaacttcaaggaatgatattgcaaatccaacaaatgccttccttgttgagtgtttcttaaccttttcagtcccttgcgtattatactctgctagttttgcaaaacccttaaaatcaaacttcttagctatctctgatgccattcctggaccacgtctaacaatcgaagctaacaatgaaagtgcagcagactgttgttttccctctttgctgttcaattctttgtaaatatcatccaatttttcttcaacaagtaacctaccaaactggtcaatagctcttccaatatcagttgatctatcttttccctctggatgactcaaaatcgtctggataagcgagaatatataggacaatccttgtttttcatgtcgaagcttccatgcctcaagaagctcagcaaagtttggtgagctctggaaataaagacgcaacaaatcgccaccggtttctcccttcagtaacttaacaaattcttttgcagcatcagagcatagcttaatctcatgtaagcaaatattatgcaacaattctctaagcttagcttcgtgggatggtctgaaagccatcactggaatttttcctacctcaacatctctattccctccgtccaccaccattcctgatatatcaaacaaagtattcaatcagatagtaagaaactacttctccaccagtccacactgttcaagagaattaaaagctactcaaagacaaaaactttcaaggcaattacaaataagtgatacaagtcttcattcaaaggtaaagccagacaaatttcagctaaaattttattaattgactcaaaaattccaacaattaattccaaaaaattctaatggttagttttttttttgttggaaaaaaccaaacagatattgctaaaagagtctgcacatgtcaagctattatcgtaccttgatcttccaagtctgatgatattgattccgccatcaaaagaacactacagagaactcttctctcttcgcggggttttagttttagggtttaacaggacaaaacatatcggcgacgctgagagttcgaaatcaggcatctcaatcccaaaccaatcccgaccggttcgtatcgatttttttggtcaaccctagacttacttaaccgggttgttcgagtgctcttataatgggccgagctcaaacttttatattgggccatattagaaccaacttttgactataaaaaagaaacagcgacagcgaatctttctctctctctctcttttgcccttacgtcctcgagctcaaccctttaattgcatctacgacagtcgtaccttttgctaggttatcgtcgtcatgatgcagcaaacacctccagcttccaacggtgctgcaacagggccagggcagattccttccgaccaacaagcttacctccagcagcagcagtcgtggatgatgcagcaccagcagcaacaacaaggtcagccgcctgcaggatggaatcagcagtctgcaccgtcttctggtcaaccacagcagcagcagtatggtggtggtggatctcagaatccaggatcagctggtgagatccggtccctgtggatcggtgacttgcagccatggatggatgagaactatctcatgaacgtctttggtcttactggcgaggtaattttgaaaatcctgttgatttctgtttttagtctctcgtttttcttctacaagtattgaaagtttcatcctttgtggttgcaggctacagcagctaaagttattcgcaataaacagaacggatattcagaaggttatggctctattgagtttgtgaaccatgctacagctgagaggaatttacagacttacatggtggctcgatgccgagcagtgagc

SEQ ID NO: 10430 - DNA, 757 bp, Arabidopsis thaliana landsberg
gctccaataaacttttcttacatttttaatgcaatttttacgttgatatttttttataaaatttccaccacctacaaaagattttagctttttgtgttactaattaaaatcagaacaaaagttgcaagtctttcatctctatgcacaaatggcgaaagagaacagtagtcatagccttgcagaagcaaagagaaagagactcacttggattctttgtgtaagtggactttgcatattgtcttatgttcttggatcttggcaaaccaacactgtcccaacttcttcctctgaggcttactcaagaatgggatgtgatgaaacatcaacaaccactcgggctcagactactcagactcaaacaaatccttcttctgacgatacttcttcctctttgtcttcctcagaaccagttgagttagatttcgaaagccatcacaaactcgagctgaagattacgaatcaaaccgtaaagtactttgagccatgtgacatgtctttgagtgagtacactccatgtgaagatcgagagagaggaagaagatttgataggaacatgatgaagtacagagagagacattgtccttctaaagatgagcttctttattgtctgattcctcctccaccaaactacaagattccattcaagtggcctcaaagtagagattatgcttggtacgacaacattccacacaaggagcttagtattgagaaagctatccagaactggattcaagtagaaggggaaagattcagggtc

SEQ ID NO: 10431 - DNA, 952 bp, Arabidopsis thaliana landsberg
atctaaaatgtgtatctaaaatgtgtactatcagacgaacatcttccataacctgatttacaatcactagcagagtggtacatatatttctcttttaggcatatctatgtacctaatcttgatttcacgatattaagacaattattttaaaaccaactcaacaatcaataatacatgcataagattacaacattttaaaagtttgaactatctacaagctaaagctacaattaataattcacatgctagtcactccctttcaatccgtctagtttcatagctatggatttttgtattttaacttttacaaaatctatggatttgtgatgcgtacaaagagtagtgtgatatttgataagaaaatgaattgaagatgcttgatcatacagagagtactgtccagttatatagagaagtgaaggcaaatttcaagagttacatgaaccgactaatcgatgcaacaattagatcttgataaaaaaatcaataatttagattgattcatatttttttttgataatgtaaaaaaaatataagacatgaaatgactaattaatgcaacgattagatcttggtaaaaaaaaattcattactttagattgatttatatttttctaataatgtgataactgatataagacatgaaatgactaatcaatgcaacggttagatcttgaaaagaaaaagaactatagcttagattgattcaaattaaattatttcttatgtcattaatagaacatctttctaaaaactttatgcttgattgaatatacatttcttgttgcacaaaaaaaaacaaaaacattatatacaagttcaattgctggtattcttttttttggtcatgtataaaccataacacatagaagaggaaaacaatttcacctttaaagcaacaatacagagtacatgatttagctatttcaaatacaacagttccacttagaag

SEQ ID NO: 10432 - DNA, 501 bp, Arabidopsis thaliana landsberg
  unsure (1)..(501): unsure at all n locations
atcgatcgacgtggctggggtctctatcggaatttttcggccaaaggtaatcgacgacgatctcctcgtcggtcggacagaatcttaaacccacaggagtttccatttctctgcagcgatcaaaaaagaagggaaaaggaaaagatcaaaaaaatatgcattggagagctttcgccatggttgatgttcttctgcaacttaaaatgatggagaagaaagacgtatagggttttgtatttatgcggaaattctcaaattcaaaaaaataaaaaaaataatacaacaataaaagagtaaaaatattaaannnnnnnnnnnnnnnnnnnnnnnnnnncgattacgctaagacaggacattcaaagggttaagtttcggaatggtaaatacgtggtgcgtttgtttatcacttgtcttataaattttgtaattattttttccatacgaccataccaatcttcaatccatgaaaatgaaaatattccccataacatctcttacatt

SEQ ID NO: 10433 - DNA, 893 bp, Arabidopsis thaliana landsberg
tacttaccattttatgaccgaaggcactggcagctttggcgctgaatattgcaccgatcattcctccaaacgtcgacaacgaaccaaacagcgaaaactgtaaacatagttctcaagaaattaaaattaactagtcatcactgtaacaatatgagctcgtacagtagtcaactttttctattttgttacccctaaataatttttcatttgatataaaaaaaaagcgatgtaactagtagtttcaacaaaatacgtatacgtttgcgtgtatccatccacttgtaaaattggaagaattgactgaaaaattatattaatgttgtttcccataaaaattgtgatgaaagttggacttacttgtgcgagagaaagatccaagtctgacataatggaggacattgtatctgcagtataacctatctgtgaaccataagatgatagaaataattaagttgttcttttttaactctatatacataatgaagttataaactcttactttaatacaattacttgaattttttttaacctttactgtggttagaaacttgaaatttaaaagagatgtcgagataagatatggctataggtagcacgtactatcaatccaacattttcgaggtccacaagattgaagatatgaagagataatatatagtatagaaactatattattacctttttcatcttttgtcaatatatataaacttagcttttaattcgaaattaagtattacaaatctgaggccaaaaatcatcatggttttgattatctgcgttaaaataatttctaaacaacaatcttgttgaaagacaatacagtttagtatataacattaatgctaaagaaaaaaagttggtggtttgaatctgttccttagcgcattatacct

SEQ ID NO: 10434 - DNA, 1405 bp, Arabidopsis thaliana landsberg
aaccacgtagttaccctaacaacaccggatgttgttgttattgcaacgagcaagagagagatcaacatttttcggaatgttttcatcttttgtgatgtttgttattttcttgcttttgtgtaatcttgtgttgagttccttttatagagattatggacatatataatgggttggttacaatggtatccattctttttcgtcttctttctagtccacatgttagaacttgcttcttaaagtttctaaacatttcttttctccttgctatctggatctggtttacgggtcgatctacgtcaaatctagctactagttaagaattgattaaacacacgctccacacgagctaatagtgttaagtttcataaacttccaatatatcgtgagttattgatccatgcatgatccctagctcttatatgaccctttgagatgatgataatatagctcaggaagagaatgacaaaagtgtcataaataattttacttattgacaatgagttggccacatatcccttgtataccattcaatgtattatgatcagacttcacttcagatgtaagatatttctcacatataaatggttaatgtacaaactggcatttatagagattagaaaaataatggattcaatgccactcacaaacacttcttttcccctaacaatatggagacgcacaggtggatttaggtcaatgcgacttactaattgagaaataaacacgcttcaggcaatcgagcgagtagtttggagtggactttctaattgaccaaagacaaataaatcaacaactgtgtaaatatacatgtaaagtatgaattaccttaagaaggtatacacgaataaatgcttacgtttgctctacgtaatctaagattatcatgagatgagactttgaatgataaagagcctttacactaattttgatcgtttgtagtttggcatcttgttttgtttcgaagagatcaatactgctcttctgaaaatcgaatcaatcatagatttcaattctgacaagtttaggaaagtatcttggagattaggatgactcatagctttgtctattatttcagtattttttctaattgattttggtcattccttccttcatcacgtagtttgtaacccatatcatgtttcacaacaagtttctgatataccaagagtcgattaaactttttggccttcgcatttagtaatatatatatatatagttaaagagaaagcctaaattaatttaaatccacctttattgtattgttatactaattacttacatgaatacgctatagatgatcccactttatgatctcccagtttagtttgtttgattatcatgttattccacaagtttattttgatttagaatgaaaacattttctaaaaaggttagtggaaaacag

SEQ ID NO: 10435 - DNA, 1298 bp, Arabidopsis thaliana landsberg
agaaaggtggaaaggtagatttctgtcaactttttcatgatttatgtgcttgaaaatatgacattcccaaaacagtccctttaacatcaccaatcaatatagctcaaaaccagtgataaaaccatacaattttgaaatactcttatcattgtaagtttatatgtgcatggagaaaccacatttgcttaaataaaaattgtatagaatgaagtaaaactagttaaagattagacaaagatatgggaactaaaagcaccaacaaacctcagaacctaagagaggtggccacaccactcgccgtttatgttctttgagttcatcgtttcactcaccagcaagcatcaagcagaagacaaagagaaaatctgaaagaccctgtaaaaataacattgttgcttttaagaaggtagtagctaaagcaaacaggctaaagtgaattatcttttcacgaaagtgtaagagtttaaagacaaaaccggggaagctttttgcatgaaaaagtaagccacatggcctgactcaaaaaagtacgaagatctctgcatgaacatatacgtaaagaacaggatacacaatagaataatcttgacaaaagcatcataaaaagctgtgcgaactctaaaacacatggttggggttggtaattaagtcaggtctttaaattgagttccaataaagaaaataaagctatccaggagcaaaccttataagtcacctttagatctgctctttgtcctaaaccttttgtatttattctagattagtagcacttaacattaagtaaacactaacctattcttttgagcttcacaattgtccctatctttttcagagacacggaaaaacacaaattaagaatttcatccaaaaataataataacactaaacaaatgatgatacagtttgagatgcatgattagaatctgttagtaaactgtagactgatggatgtgaacaacacaacgattgcagatgccaaccacaacttaagataattcttaccaaaaaaaaaaatcaataaaactttgcataaaagtctataaatttgacgatttccacaatataatattgtgggcagatagatctttcagaatacctttgacttataccctcagatagattatattaggtaaatcctctcatggactagatcattgctaatttgctatttcaactgtttagttttctaacaattaggatgataaaaaatctggaaaactctctcgtacatgcagcaaacatgtgaatcaacacataaacaagcaacactcaacaacaacaacaacaacaagacatca

SEQ ID NO: 10436 - DNA, 818 bp, Arabidopsis thaliana landsberg
ctctcagatcgttctcggcatcctcaactttgctggcaaacaaatactcaaccttaatggcccagattcaacatttgttctcaacacaattatcttcaactctttcgtcttttgccaggtaagaacaaacattcaccataaaaaattttaaatgaaattaaacactaatgctttgcacaaaacaggtgtttaatgaagtaaacagcagagagatagagaagataaatgtgttcgaaggaatgttcaagagttgggtgtttgttgctgtaatgactgcaacagttggattccaagtgatcattgttgagttccttggagcatttgcaagcactgttcctttgagctggcaacattggctactctgcattttgattggttccgtaagcatgattctagccgttggtcttaaatgcataccggttgagtctaaccgtcatcacgatggctatgagctgcttccttctggtccatctgactctgcctaacccaccatctagtaacgcaacgtccattttatatttgattttttttccttccttcttcaactccgggctaatgatctgatctcaaattgtataaaatcgttgctggattttttctattttgggtgtgggtttgatatattttgtcaactgagtttccacttgacccaatcttttggtttatgaagaatcttaaaatcgtattttggacttggctacaaacttctcatggtaacattcagtaaagctttataaacatcagtcgtaaacaagagcaatacagaaaggcattgatcaaactgtccgttgtggtgcacataatcatttgcttatgag

SEQ ID NO: 10437 - DNA, 712 bp, Arabidopsis thaliana landsberg
atatctatatatatatatatatatatatatgattttaattatttgcttaattactcttttcctttttctacaataattgttgaaatttatcaacgtgtacaataagtttataaacttcatgtgaatacataaacatatatagaaacttacgtgaatagctatcactagctatgtctaacttcaagagaaaacactaatttaggtatataaccatattacaatagagaaagtaagattaagaagaagtaaaacccgttttacttatccgccacgttcaacaatatcgacgtacgaccattacttagtattgataatttaatgtttctttcattataggtaaaaataatttatggattcaaggtttaatagttatatagaatttaaataagtaacacaaaacaaacaaggaagtaagaaaaaaagataacatcttgacaacattgataatttatttattgttaaagaaaaacatttcctcacattgagcttgcaaattcaagagcatcttctaccacatccatgattttagatttcgaattcaccactctacagttcaatcttatttctccttgtttccctgttaaaggtgaaagactactcatccttatcattggccttcgcgaacgcatcgaaaaatttcccttgaccatcagcgtattctcggactaaaggaagagtgtctgaagcatcagggctagagaataactcttgg

SEQ ID NO: 10438 - DNA, 484 bp, Arabidopsis thaliana landsberg
ctgggttgctttttaattccggttttggtgattcttgtcttattttgttactgtgttcttgatactgttgtctccgtactaagctctttttgtaatggatctgcagatggagactgtgagaccaatggttgttgctcctaagggtaacagactcagacgcaagtttgctaaagttcttaacattcataagctaacgggtgttgctccagaaggagaaatgatgaacataaagttcgattccaaaaccgctaagttgtctgagtcgttctacaagcttgaggaagagtatgagagaagtcaggcattgtaagctcttcttgcgaagctttttgctacggtttcttcgatcaaagcggcttatgcgcagttacagcattctcagtctccgtatgactctatcaggatgcaaaaagcagattacttggtagtcgccgagcttaagactgtgtctgagctgaaacaatgtttcatgaatgaacaagtg

SEQ ID NO: 10439 - DNA, 1376 bp, Arabidopsis thaliana landsberg
  unsure (1)..(1376): unsure at all n locations
tgaagaaggtaatgcaacaatacttacactctttgtctgtctcatcacaattctctatctccgggaaagacaacgtagacaagtcgtcgttgttgccgatccagtggctgctgacgtggcacaaccgctcgacgctgatgtggcgcaacacctcgctgcgttcccacggtaatcaattggtaatcgttttcgtcattgtaatagcagagaataatggctttttggtgtttttttttctttctaaatgtacagttaaaagttacaactttacttcgaaccaaaatgtgtgaaacagtgtatgtagggcttatatctcttatagatatggcccataacgttatattgacaaactttaaagctcactgatcttcgatgccgatgttgtctttttgtttttgaattttgaactagctgagagaagttatatttaccatcttttgtaaagtgcaacgacaaacataacttgtttgctaaaagcgtaaattttctattgaagatataaactaatattacaaacaaataaacgatgaagactacataattacacatttcgaagtgtatattagatcattactgatatagttaccgtataaaaaataggtaattagtactagtagtagaaagtgtgtagtcaatttgtttagaatagtgtgaagagaaatggcaagcattccaagaagagaatctatcggacgaagggagacgtgggacctacttttaagcgtcgacgactaagcacatccacaagatcggcgtttttgttaggatctgcgtccaaatggtaaaactaaataaattaatacaatgttctattttacatgttgttcactaatactccatgtgatacgtacctatattaatccgtaccaaattttacccctagttcttttttttatcttatttgtagccgttagtcgaatcaagtgttgcaaacctttatacgatgatacgaatatgaagagttgaaaagtgaggatgaaatggccagttacattattttgactgtgtaaaaagaaaaaagctagtactacgcactaactctggtctgacagtctcgagacgtgtggtaacatttgccattattacattccccaaattctctcattttttcaaaaaatatactactaataaatatttttcttaaaattccataaaaatcactgagaagtaacaagttgattcagtctcactcttcctcagtagagctcccatcaatggcttcaatcaacctcttcctctacgccttccttcttcttctctctcacgcttcaggtttctcttcacattccctggtagatctttaaatttctggttcttttagtctttgctcagtctcgccatgtatgaataanatgcccttttaatatgattagaga

SEQ ID NO: 10440 - DNA, 1170 bp, Arabidopsis thaliana landsberg
ttgattaaggtacgttaggattatgatgactctgaactcagttttattatcccgtgtctaattatgatatttcctaggtgtgggatttgagtgggaagaagctcttcacctttgaagggcacgaggcaccagtttattccatttgccctcaccagaaggaaaatattcaggtgcaggcatctcttgtttaaaaagacctgaaaaactttccctttcgctgtcttgtaatttatttttctctttttttactatgcagtttattttctcaaccgctcttgatggaaagatcaaggcgtggctctatgataatgttggttctcgggtagattatgacgcaccgggacagtggtgtacaacaatgctctacagtgctgatggaagcaggtacatcattgttatttgaaaagctctggagttgtataacaaaattatgtctctgccataaattgaaatcttctgaacaaaatataggctcatatcattatcaagtaaatatctgctatgatttcagactattttcttgtgggacgagtaaagaaggagactctttcctcgtcgagtggaatgagagtgaaggtgccctaaagaggacatatttaggctttaggaagaaatcagctggagttgttcagtttgatacaacccgtaaccgtttcttggctgttggtgaagacaatcaaataaaattctggaacatggacaatacaaatcttttgacagttgttgaggctgaaggtggacttccggtatgacattcttgcccaaaatactcctcttggctacttgtatataaaatcttttgtattctcgagcctgttactttactgatgctatgtaccgtttatttcagaatctaccccgattgagattcaacaaggatgggaatcttcttgcagttactacagcagataatggattcaagatccttgcaaatactgatggtctcagaaccttaagagcatttgaagcgcggtcttttgaagcatctaaagcatccattgatatgaaggtcttggaataattactctttatgttatccatgaaatatttttattactcatgccttatgtccagtttaactcgagtgtcaataccggtgattcaggtatccacctccgcaatggcttcaagcatcagccccgctattggtaaaattgacacatggacgca

SEQ ID NO: 10441 - DNA, 1540 bp, Arabidopsis thaliana landsberg
tttttaggagttttacagattctttaaggaatgtcctcatccagatgataagcaacgaaaagagttgagccgtgatctcaatttagagcctcttcaagttaagttttggttccaaaacaaacgcacacagatgaaggtttgtaaccattaactagtatatatattcttcttaaagccaatatcaatattttaagtaatctagtttcatattagtcaaagatttctcagtacaatacattgtgtgtaatatatataggcacaaagtgagaggcatgagaaccagattctaaagtcagacaatgacaagctcagagcagagaacaatagatacaaagaagctctaagcaatgctacatgccctaactgtggcggtccagctgctattggagaaatgtcttttgacgaacaacatctcaggatcgaaaatgctcggctccgcgaagaggtatatacatacatctgtctatattacttttgtttgatgaacttgaactctaaatctgttacctcttcattctacagattgataggatctctgctattgctgcgaaatacgttgggaagccgttaggatcgtctttcgctccactagcgatccacgcgccttctcgttcgcttgatcttgaagttggaaactttgggaaccagacaggctttgtaggagaaatgtatggaacaggggacattttgaggtcagtttcgattccttctgagactgataagcctataatcgtggagctagcggttgcagctatggaggaactcgtgagaatggctcaaactggagatcctttatggctttcaaccgataattcagtcgagattctcaacgaagaagagtatttcagaacgtttccgagaggaattggaccaaagccattaggattaagatcagaggcgtcaagacaatctgcagttgttataatgaatcacatcaatctcgttgagattctcatggatgtggtaattacttgttcttcaagtaacttaagggctaaaatgattgaaaaaactaactaaagttttaatcttttgatgtgggttcaagaatcaatggtcttgtgttttctctgggattgtgtcaagagccttgacacttgaagttctttcaactggagttgctgggaactacaacggtgctttacaagtggtatgtacatgtgtttaattacttgcttctcaagaaacctatacattgaatactatgataatcggtttctgaatgttattttgggtatgtgaagatgacagctgagtttcaagttccatcacccctagtcccaacgcgtgagaactactttgtgagatactgcaaacaacacagtgacggctcttgggctgtggttgatgtctctttggacagccttagaccaagttctccaatcttaagaactaagagaaggccttcaggttgtctgatttaagaattgcctaatggttattctaaggtatatagggttttaaattgagtatttattaaagtttatgggtagaaatttaaatttttatgaaactgaatggtgtgaagattgattactct

SEQ ID NO: 10442 - DNA, 716 bp, Arabidopsis thaliana landsberg
  unsure (1)..(716): unsure at all n locations
gaattggcttggaagaatctgtaaaagatttttttaattttatctagttactaattagaatcaagacagaaagtaagctacctttgaagaaagagtcgtttgatgaacttactagtatacagtctnnnnnnnnnnnnnnnnnnnatgtcacaaatcgattttggattgctgaagacgagtctctcctctcctctctgttgctcctggctttcctgttcttttttcctttgctaggtactgcagagatcgactctttctcgctatgttttgagcactctcttttctggcttttatgacttgtggactgtgtactcaccaaactgagcataggagttccattctccaaaattagctccagcgtgaacgacttgccactcttcaagccgttggatatagataaatctttccagccatttccgagacacatcaatcctctgttttcccgtcgaagagttgcctccaactttgtaccatctttgccaaccaaagttattatcgccaggttccaagccatttgctcttggggtgtcggtttattcggtttggcctcggttaagtgtttttttttcattagttaaatcatcccaattcaaatggattaaaatttgaaagattccgtgtttccactggttttccagacaaaaggaacaagccacagaagcaccagtgctcaaacaactaatttggtgccatgaatgagtaattgtttggtgtgt

SEQ ID NO: 10443 - DNA, 1043 bp, Arabidopsis thaliana landsberg
ctgttaatttcctttccagggcagaaaaataaacacttctttttgttattcttttcaggcattgagttttagtgttagcaattttaggaaaattcgaaaactcggcgcgtatccttagtaatggacagttcaatttgattgatcatttcgtttgtgccttttgtaaattgtttattggggaattttgatcgaccaaattaaatgtatatgtgaagttgaaccggataaagaatttgagttggtttggcctcggtttagttctttttttccttctcttttttttttattttaggaattaagatttttttgactaagtttaggcctaggtttaaacaaggaacaagagttgtaattacagtaatgatgcttacacagacatatggcaacaccaatgatctaaatcaacaagcacaatacaagttcattacttcccttaagtatgtgaaggatttgttggatacaagtggcagagagtggatactggattcactctcagattttgttccctgaggaagtcataaaatagatcattccacttagaccggagagaagcaaaacttctgacagatttgcctgggaatacaccatagaaacaaacttgtgcacgtccctgaggttacagaataacaaaatcacaagttcaaaatcatatagccattagaagatacatactgtatttaacttcacaaacaagtaggcttttaattaaacttttatggtctttactctacggacttggaacagaatttaagcacatgagctgtttcttgttcatcaatgtattccaacgtgaatgcctcccctgtattaacgccattagcctcacagatgcccttccaaccagatcccagagccaaacttccatcttttgacattgacagtagatatgcaaaccacttcattctgttttgacccaacaaagttatctccccgaggttgttgatgccattagctttgatgaattggacttggaagaatctgtaaaagattttagtaaacatatctagttactaattagaatcaagacagaaactaagctacct

SEQ ID NO: 10444 - DNA, 1231 bp, Arabidopsis thaliana landsberg
aattaggccaaaatgtcagagaagtagacaaacaatattaccagaggaaacaagaataaaaaaaggattagcttacagaagaatgtgttgaagggaaacctccagcttgaaagacacttctaaagtccagatttttcccatacaaaacgacagaagtgaatggctttgagagctgcccaatcacagcagaagtcccagcagctatgagtaccttcacgccggtgaaatcaaaagcctaagtgacgatgaccctccaaaaaaaggaatgaaagaagagaaaaaggcgaaaccttgttgtggatgacctcagcgatatcttggaatccaacattgacaacgcaggtgagacgaggtggcttctttgggcagcttgcaagattgaatttggagttggagaaagagaaacagagatcattggcgttatgagacacaaaacagtgcttcatcaacatctctgtgcagaagatggaactttggtcggaggatgacgataagaataaggcagcgagaaatttggaaccaatggttctgacgctctgttatgtcgagaagagtgttgtctcttgggacattttaattgactcagagaagcttttgtggattttttcattgacaaattgttatctcacacacaaaatctgctttaactcttttagtaaaactcatggatcattgtctcttaaaccaagtcatctgttcttcttttataaatcacaatttgtattcgccaaaattaaagaatatgaacaaaaacaaacatatcgaaactttcagcttgtggagttttaagtctaaaagtactcgaaatctatatacgccgtatcatccgtgggaccagcagcacaggcgaccagaggctccggcttcattgagttacagtgatcaccacctccatggctcttggtcttacctctagcggccgcgtacggtcccaagtccacggggtctggaatgtgaggtggggcagcactacgaactagagcccaattcactccttcaaagaaagggtgttgctttatctctgtggcccccctcgtgtaagcgatccttctgtgtggatccttcactagtagtccgcggatgagatcacgtgccgctgagctcacatgcggggtatccgggaacttcagcggctgacccaccacattgtgcaacgtggctctgtttccctgccccttgaacggggtggtcccatggaggagcctataaaggaagatcccgaatgtccacc

SEQ ID NO: 10445 - DNA, 1375 bp, Arabidopsis thaliana landsberg
tatatagtcggaaatattatttcgtattcttggattatgtcttgtctttaattatcggatcataatattagttgcatcaatgatcgtcatatattcttgtactaatctcctcagctaatggcgtaaacataattaccatctaaacgataagagagaacaattcccaaatctaaattaacaataaaatccaaaatattagatgttcatctagatttcagtttggttttggttatggtttcggttcgggtttccgattttaatcaaacatattattgacttgttataaaaataggttttcgatcgagttttctaaatcaattattttcgttttggtttggatcgggtcaaatcggattgtccggagtggtcaacaaaaacttagttaatttatcagtttaaccagaggtggtgggctagtggttctagtctggtggaagagttgtcttgtttggtctaggctaggtatcaattctcctaagatgcataattgcttagccatgtccctttggcacatgggaatggacctattgcttaaggcctatttgaaaacatggggagaccttacccataagataccctctcctctggaattagtccataggttcaaggatttactctaagttaacaaaaaaaaaaattatccgtttgagccatgtttaaattatacaaattttaagttaaaaacacgttacatagatagaaacttaacattaaattttcctaagaacaaagatttgcattacaaaaaagaaaaaaaaacaagaaacggagaaaggaaaagtttgatattttcaagagtttacacactaatctgcttatcgaagatccaactaaagcaaacctcatgggtcttcttaagcttcttagctctctcgtctgcacgctcttgaaggcgtctaatcctctgagctaacccacacacaaactcctgtgcacgttggccctcacccgtcaatccttctagcttctccaatctccaccgtccaaccaaaaactccaagatgtcagcgtaatcatccgccgtgtaaacctctagccgctgagccacggcggagaaatgttcgaatagcatcgggtctcgaccgtctgtcattagatgagccggcattgtgatcttcttccgcatcatgtcggccacggttgagactgcaccgttagggtcgatctcgaggagcttctcaacgatgcgtacgtaagcgttttcatggcgcttctcgtcagctgcaatggtgccgcagattcgagcgaggacaggatctcctgcggacttggctagccgcgccgtgttgccgtgagacacaaatgtggctcgctcttggaatgacgtgtacacgaaacctaagtatggatcgttctcagttcctggatccctgaa

SEQ ID NO: 10446 - DNA, 941 bp, Arabidopsis thaliana landsberg
  unsure (1)..(941): unsure at all n locations
gaagccaatgtgtaatgcaaaggttactccatgaacaaggaagagactgacaagacaattgatgaacaaggttggcttcacacaggagatataggttacatcgatgatgatggagatatcttcatcgttgatcgtatcaaagaacttatcaaatacaaaggttttcaggtaaaatgttacgttataccaaaaataaaacataatttttcctttgtttcatattggccccattttcaaagttttggtgtaatattccaataggttgctccggccgagcttgaagctattctactcactcatccatccgttgaagacgttgccgtcgtgccgtgagtatctatataaatatattgccctaatgatttcttgaaactgatatattaaaacatgaaatgaaaaggttaccggacgaggaagccggggagattccggcggcttgcgtggtgataaatccgaaagcgacagaaaaggaagaagacattctcaactttgttgcagcaaatgtggctcattacaagaaggtcagagccgtccattttgtggattcaatccctaaatctctctctggtaaaatcatgaggaggcttcttagagacaagatcctcagcatcaacaagaagtagaagaaagaaaactcttacaagcttttaattaatctactttggttaaagaaattgtccttaaacaataaatactctttgtggtttcattattgctccttgattaggaaattctacagttcaattctgcaccgcgcaacaactagaaagattaaactatctcctcggaagattctaatcaaaacattgatataactcacagaatagcgatttaaaccgcaagaacacactgcttctcaagctgtaaaatgttatctgtagaattagatattgacntgcttgctttcattaatcacaaacaatgagtatttatcacaatga

SEQ ID NO: 10447 - DNA, 1737 bp, Arabidopsis thaliana landsberg
agaactcttgtctcaggctctcctctggtgactttcggagacaataaccaagaaactggttttgtgatcgatagtccaagaattggagatcaggtaaaaaaaagactacaaactttaatgctgtcccttgtgtgtcctttttcagtgaagtttcattgttgtgcttctttgatttcagattcaatgttctggtgttgaaaatggcaacattgagtcagtttggttccatcagcggaatagaagctccgagtttaatgaatctgtgtgctctaggactaaccgctcaagaagttccagacgaaacaccaaaaagagacaatcaggagacatctgtccaaaacaccacaggcatggtttcgcacaagatccattcactgagttactagataacagacagcagctgcagcagtacagtgaaacctcatcatcatcatcgatatatgatacctctggtactactactccaaccaacacaacagaagatatctgtgagaaaccgaagtcagatttggattctgagaccaaacttaagtcagtggagactgaactagacccgcgtctgggacggagcaagggtgtgttaaaattgggattgagtgtcttctctattgtagttgcagggtttgcttctttcatatggatgtatctccaggatgatatgatgcctcctcatcttgttcctacttaaaagcctatgggatgaacattataaagcttagaacttacataggttcaaattctagcttagttctcttgttcttttgtcaatgtgtggatcatgttcaaatactagtttgtttgttttctttttcctaatgaagttgtcacttctccaaaagtcgaatcaaatgtaaaccaaactcatatttacataggtgcaatttctagcttggttctcctgttcttttgtcaatgcgtggatcattttcttttccatgaatgattttgtcacttgtccaaaagtcgaatcaaatataaaccaaattgacattaattcagaattaaggcaaaaaccggattcaagtctaaactgagaaaatcctagtaataatttcactagctaaagcggaaaatttcagtgttgagacgggccaaaaaaggcaaaacacttaagttggtggtgtgttatacaaagatcacaaatcttaaactgagacataccaaaattttcccagaattgaaagaacagaaggttacaaaagaagagagtttcactacgaggtatttgttctccggcttagtcttcctccgcaccagcacctgcagcttgagctgcatctctccttggtccacctgctggtttcgccattataatctgcacgttttacacatattagcgtataaacatgcatgctttagtagattagatctatcaatggaactgaatattgaatctaagagttttcacgaacaagggacttaatcctgaagatattgcattcaccgaacaatatctttttacttcatgtgataaatcaacaccttacaatataataaaaaaattgcttcgttcacaaaagattaaatcaagtcagtttgtgcatacctggtctacacgaagtacagtgcatgcagcatctgaagcatatttaagggcaaatagcctgcacagacacttaagcgtcttagttatcaattaaagtgaatggtgatctttgtaaccagtcagaaaattctactccagtttttatatgttcaagaacaactgctaagcaagtatagagacgtctgatagaa

SEQ ID NO: 10448 - DNA, 1555 bp, Arabidopsis thaliana landsberg
taatccatttatttccatctctgcagatcgcattgtcttttccaataataccggttgtaataatcgcatcggatttcgattcgttgattcgaatctgtagttccgaatcagctgctgatgctagagctattcggagtgtgtagcgtccgatacggttcacgttttttaggttgaatatgatttgccatgttgttggttggtatgtatcgttaccaacgtttctataggattgaatcattaagatagttagatatatactttgaatagaagcatctaaaaataagaaattaaatagttatgtatgtttttacctcgccacatgtgcaaagatccaatcacttctataatcacttacaccgattgtgtagacaagatcgttttgagggtataaatctgcgtaacgatcccataatccatattgcctaaatctgcaataattaggagttttgaatttggtcaaactgaaaaaggaaaaaaagtttaaacaaaaaatcaaccaaattaaatttctgaacttatacgaagatatatcaaaactagttttacatgcgaagattatatatagtaccaacctgtcttggagtgggttgacataaagcttattcatcagtgtagggtaaggatccggtatatagaattcacctgcggttcgatccggtacaccgatttcccacaatgttggaccgtttctcggcggttcatacactataggccctacattcatctcgctacctgcacaccccaaaataaatataagtatccatatgttttccaaaagagagttgaattgaatatttagtgaacagtgagatcaagcatgcttctctaggctctagctatgatctaaaatgggtttataatggataagtgtaaatatatacctggcgtgatggtaatgttttgctcatacttatagtctccaataaaaccagacccccatgcgtagagactataattgcctgccctcacattctctattatgaatctccctctcctgtcagctttcgtccaaaattgataaccctttttgtcccaaaaagaagaaaaaaaataatacacactaacaattaattacagtagaaagaataatttatactacatttgtatagagtatgagttttattattatcatacctttgattcggtttgccatgaaccagcttcaccaattggggccaaaccaacaaaagcaaattttccatatatctttaaccttgacacgtaactacaacattgtataatccaaatcaaaataagattaaaacaatgaataacgtaaatatgtaagaaaaaacaaaaattgacaaaaattcatgagggttgtttatttacctgtctttgattaagaattgaccttcgagagttcctctttgatggcgaagaggataatcttctgaagttataaaatcataaggccagcttttgacttctgcagccatctgcgacaattagtaaccattttatagaaacataaaatgaaaacatgttaatataaggaactatatatataatcgttcatgtgttttaaatgatattagaaagttaagaaggatct

SEQ ID NO: 10449 - DNA, 227 bp, Arabidopsis thaliana landsberg
cattgctcatttaagagtgttgttagcattaaggtccttgttccgcaatgaaatattcgtcaccgtttatgtatctttctgtcttagcccttcctctttagcttcccgatcgtacgagtacccatccgcattcacgcactgctcgatcattactccctgttgccaactcctaatataatcaggttaaaatcaatgaggaaacacggtttcttgtgtaacacgtaact

SEQ ID NO: 10450 - DNA, 1408 bp, Arabidopsis thaliana landsberg
taaacgaacattaccgtggttctaaaccggttcttcactctattatccgaatcaaaaggtatccgaaccggaaacaaaccaaattttgttcggttcttatatgaatcctaaacatcttatccaaatcataaaactgaaccagaacggaaccaaagatctagatctacacattagttcataagctggaccagactcataaacaaactaacaaaacacaggtttggtcggagaaggctttattaatccacttgtcctcctctcagactctacaaagtcaaagttgttcactttacctataaaaacgctctctcactttcttttcaatggcttcttcttcttgtttccttcgctcgattctcttctcttctcctactaaccttcgttcaaatcaccatctccccactttcttccccaagaatcatctcatttgctctcattccacttcttctcgcttcgaatcgctctcggtttcatcgatcggaactggatctaccaagaaatcatccgatactcggagaaaggtaaagagcatggctaggacaaatataggaaaggaggagaagaaaagagtcgagatttatgatctcgaagagaatttagcgattgatttggctaaattcacagcagatctctccgataagttttgtaaaaagagaggtgctttcactgtcgttgtttccggtggctctctcatcaaatctctccggtgtgttgttcttatctctcttttgagtttttgattcgaaaccatgagatttaagggtttgcaaagttttgatttagggtttagtatctgcgaatttgagatttgaatttagcttgtgtatggatagatccatttctttggtagttatggctgatcaagaacatagctttttcacattttgaacacactttcttgataatgtttcaggaaattagtagaatctccttacgttgatgctatagattgggcaagatggcattttttctgggttgacgagagagttgttcccaagaatcacgatgatagcaactataaactcgcttatgatagttttctatccaaggtattgaacacgttctcttcaggttaagagtcagctacaacttcttcacagtctaatcatttctctttaggtaccaattccgcctggaaatgtatatgcaatcaacgaagccctctccgctgaggctgcagcggatgattacgagacctgcctcaaacatttggtcaacaccaacattctccgtgtatctgaatcaactggctttcccaaatttgatctcatgcttctaggtatgggacctgatggtcatgtggcatcattattccctgggcatggtctctgcaacgaaagaaagaaatgggtagtttcaatctctgactctccaaaaccaccgtctgagagaatcaccttcacgtgcc

SEQ ID NO: 10451 - DNA, 2089 bp, Arabidopsis thaliana landsberg
gacttcataaatggctcatgagcatcacgagtcatcttagcatccccaccagcggattctagattgttacctgtaacaccggcgaccgctcccataacggttgttgcggcggctgctgtgactgcagcttgtcttttagtggcagagtattgttgaatgactaataccgaagcatgcattgtgaaattcgacgaagctaatgtgtcccctattgtgcctagctcaggactactgctccaatcgtttaaaccggcagtcaccggagaatctgagttatatcctcttcccacaacgtaaagatcataagaattgttgtcttccatttctctgatcgtagctatcgtgtcttgaccatcgttgaccactttctctatatatttaacggaagaatcattcattgtcttgaaattaaattcgtagatgcattcatcgtcgacttgtttctccctctcgtactccgctgcgactttcccggatgagattagagcttcgcgtcctgggacgaatcttaccacagtgagtttaatcacgtgttgtccgaccattcgccaagcgtatgataacgcctcgcggtcgtctggaccaccgacgaagagcatggcgacttctcttttcattgattcaccacggaacgactcagaccggaccatggccatgccacggtccaccaaaatcccgaccgagcaaggggcgtggctcaaaacgttttggttaatttctgcgtgagaagagtttccttctcccatccgaccgtccggtgtcaagtgtttgtggtaaggcaatatgatgaaacaaactcgcttgtcctcggctaacacgcagatgtcttcgtgcatggttgcgtaaggagagaccgcggtgatggtctgaaccgtcattgcgtcgttgttgacttccatagcttcgaaggtctcagcgatttgatcggactctgctctgactctgtccgagaagttagcttttggtttgcattcgtcgttcatgattagcagagaggccgtggttcgaccggtgagctccacgaggtgaatggcgaaaacgctgagaggtgattgtttggttgcgtttgagacttgtaagagatttgtgatcccagagacattggggagtacatggacgcaagctaagacgcgcaactctgtttctcctttgatcttttgaaccgtacggtgcttgtaatgagcaagttttttcttgggcttgtatgcaaatgcgagaagaggctcgacgactagtgacatcactagaagcgcgatcgtcatatgagtatacatcggactatccagcgcctgcaaatggtttttttagttggagaaattaaataaaattgaataacgctgaaattttactatttgaaaaaaaacaatgaaaattattgctgacaaaaacaaacatactttgttctatgagtaaaataatgtttagaagaataatgattccttgacaaaaaaaaaaaagaataatgattaatgaaatatttctctaatgttttcactcattcgtatgttattcaactttatacttccctagactcgaaaagtgtcatatgcaataaaagaacgttgattgattgattagtaccttagtatcgcgaccagcattaagaacgacgagcgataaagttcccttggtgttcataagggctcctatagcgaatgcgtcacgcataggtatatgcataaataaagaggtgattacggtagtcacgatctttactaagaaggaagagcagatgactacaaccatcatgaacttgtcagtaaactggagcatgaaaccaatatctgctcgcaacccacaaatgatgtagaagagaggcataaggatcccggaaaggaagtcatggagcttctcctcgatcatgttacgtatgatgtggtcgtgcggaatggagagaccgaacaggaacgccccggttatggagtggaccccgcatgcgtccgtaatcaggccgcataggaccacacctcctaaaatgaaccaaacgtgagtgtctccgacgtgacctgccttcacggtcttcgcgaagatccatgcaattcccggacggatcacaaagatgcagaggaggacgaagattgcggtggtg

SEQ ID NO: 10452 - DNA, 1495 bp, Arabidopsis thaliana landsberg
tttctctagcacgaagaaaaggtctttttatttcacaaaagtttctgtgatggttaatgtaggtaagatcttgtagtgcatggtttgctttaattaatgctaccttgttctaactgcactgttatcaagaaaatagaaaccaaaaagagcgatcgttgcaactagagtgttctttgcaaattatgcttgatgcaatgtctctgtttattggagttttgtttttgactgtttaaggatcaaaactagccgaaatgacagaaaattctcatttcaggttgtggagctaaaagtgaatttgcattgtgatgaatgcatcaggaaaatacttaaagccatcaagaaaattgaaggtaacaattctgtaaattttctccttatacatatatagccttgtaagattatgattatggtttatatttctaaataagagtatttgatgaaattacagatatagaagcatacgatgtggacacacagctcaacaaagtgacagtcacagggaatgtaacagaggaacaagtgattagggttcttcaaaaggtgaggaaagctgctgttaaatgggaccaagacaatcaaaccctctttaccaactagagtctttttgctttcctcttgatctatatgttctccttagcaatagttaggtctatatgtatgtctgctcaactgaccttatgcatcagttgcagaatacacgaggattttgtatacacgacaataaaatgcgatatagattctggaaatagagatcaatataatccacaaatttattcaacaaaaaatgcaaggaagcaacttttccgcttctattttgagtataaaattacaaaactgtcaataaaccacattttggagaatgaaaaatgaggaaagaattggaatcaagatatctccatgcttagaacctgtgctccagcttctcttgttctttgaagtactgagcatacctgcgttcatttgaaagagaaaaggttcagagagtattggaaacaattataacaattgagactcgatagtgacaaaatgaatgtcaacgtacaaaaacaattcttcatctagtcatctaaagtatcctgaataattgctatgagagtaatgataatcaaagatagggcaggtgaatataatttaaccccttgcgcaaatatctaaattcaatgaatcacataaactcatctgtttcaagtaaaagagcatcatcaagctaaaacactactagctcaacaattttttcaacaatcagaactcagaagtaacagaaacgttttgatagttaatggctatctttttatcatcatcatcatcatgaattcactatccctatcttataatgttgtcaagctagctacttctatcattctgcatattagttcctatagtattggtccagcagaaacatgagcatcgaaatcgacaccaatctatgcgaatttgtcacagacaattgccctaaacaatttttgctgtcatatcaataaactatagctaattg

SEQ ID NO: 10453 - DNA, 1637 bp, Arabidopsis thaliana landsberg
gttgcttatctctctctagacctaggcgcaggttccatgtctctcctcgccatctgggcctgtttcttgatctgaaactaacaaacaaacaaaccaaatgccggtcttttttctcaaatctgtaatggtgtttctaatctcagaatcaatactattctatcttgaacacaatgactgcctttgatagatacaaacaatagttaaaggcagagaggccagctaataatccgcattcattgattcgagggactgctttttgggagaaaaagagaaaaggtaatgagcatgataggaagcatcaatcattctatgtaatgagcatattccaactgtaacatcatacatacatttcacatctatattaaaaaaaaaaagatcatcactttcaattttggatcaaattacaaccagagataagtagatttatatacgcagatgatgcagtcatctgtttaacgacctccaggaattctgttccacgacaagtaggtaggatcaccgagtcgcctgcacaaaccccataccacaccaaatcaacacctatctacgtgaacatgagtaatacatttaaaaggccaaggataagctactaacctgggtttcacaagatacatgacggtaaatgcaagtgccaagacgaaacagattcccccaacggtgaggtaagcaatgccgaggaagtcgttctttccaccaagccaacttgttgttgacagaacaagcttcttcttcccactgaaactgtatgtgttgtagttgttctgcagagtcacttgtatgttctcacccttctccaagtcactctctatcttcccgtataattttctaaatgttggcaacgcagcagtcctcatccacacgatcagatcctcttgatcactcaactgaaagagatagagagaaagggagactaagttaagcgttttgcaaaggatatgactgggtctaagactgtactgtggtattaaacgcttactggtttatttggatctagactggcaccaccagtgagattgcccttctgaaagttcttgggaaacacatttttcccaaacttgtgttccttgtcgctcttccatgcaattcctttcttgtttaccgttaaaccctggttatttcttgatagaacgtatgtgtcattaaagagactccaagcaattagaccacatggcacaattggctgcccaccaaaatcatcctcaggcttgcatgcgtctatttgattctcatctttcacacttctcaattgcgaatcacttcggcttttcacatacctatgatatcaaatgccagaaatatgtaaggaatctaagtcacatctaattttaaatgcgaacatttctttccttgcacccaaccactttgtgatatcaatgtagcggttcaacaatacctgcggtgattctggtagaagttctcaagctggtaatatacgtagataggctgcttcatacgcttaggcacctaaaaatacccaaagagaacagagaaagtaaacaaaagcattcagaggctaataaaatctccaagaacaaagcacatgcatagggaactcacacttagcgtccgggtacaagatttatttccaaaaccaaaaatgtatgcaaccttgttagccctatcagatagagggatgc

SEQ ID NO: 10454 - DNA, 1291 bp, Arabidopsis thaliana landsberg
tttttcaagtaagaaaaaaaaaagaagaagaatatttagtgaataatgataaaatgatcaatgtatggccttatcaacacatcgattaactagagccaacgcgttactagtcatctttttgacgtcatcgacccgtgcgcatatgtcatccttcctcggctcatcgtgaatgtctttaaatccgtccgtacaagtctcctcatcagttaaagccgcactgagccacgtctgcacgttactcatttggaacctgaaggactcgagcgagccagtcgagaccagttccctcatctgtttcatcgagcctttcatttcttcgaccgcgtctttaagattgtcgaagcagtcatgaaaaacagcggctgcggttgggtggtgggcaccatcgtcttggctctccggctggagagtggtgatattggcgaggtatgaggctaagtcgagagtcttggtgagagtgatggagatggcggctcgagccaagagggctggatcgttgtggacagagctagagaaggaggaaagagaggagaagcataggtcagggtataatgtggtgttgcagctagtacggatgaaatctgagtcgtctgattgagaatggacggtcaggattaatgggaggacggtggctaagaagaagaagaagaaaagtggttgatgaagagaaggtttcatggtttcttgtgacacggaagtgactctttttgggttatggatgattttggttgttgtgacctcaagtttatatttatactgccgagaaagcatatagattagctaggattaatccaaacagccaacaattttgatgggttgggggaaaatgttgaactggaaaccattcgtctaatgggccgatctgggcctgaatattgtatataaataataatgctttatacgtatggcgaaatcaaatttaagagatctcgttaatatcatggcataaaaatattgcatcagaccttacttttttttttttttttactatacccgactgatacccatactaaatggtcgtttatgttatctttgccaaatgccatctcccatatctttctgtctgttttaactttttaaatcaattttgctttcatgctcaccattaacatcatcccacttactaaatttcaccactttttcttggttccttggccactcccaacttaattctctgttcagctaacctagcaaaaccaggcacatctcccgatttataaagtggtctccaactctcaaccgaaccaaaacacattttttctaattttaaacaaagactttaatgaaaaaa

SEQ ID NO: 10455 - DNA, 1100 bp, Arabidopsis thaliana landsberg
cttggtcacacaaattgtaagattctaatccgatcatgcataaaaaagttgcaaatacatatataaaacatgtgcggatgtaccatattctttagcatctgcaacaaagaaacatattgtcctgttcaactcaaaatgctcactttggtatctaggaggaaaaaagggtaggtgaattgtgattatgcaacttttgttggtccttccttactaatataatatgaattaaagaggaaaacaaaatattaacaaagtcactttaatgtacttggggaacctttagctagatctcctgtgatctctctttttttggtctctaacattcttttcttctttctttctttgcttataaatagcatatggttcaagaaactcaagtctcaggcaacactgagcttaatactgtagtacacacacacacacacaaaaccctcttttcttcaaacaggaaccccaaaagcgaggtttaatctcatgcgttttcagttctaaatctctttcaatccacaagagaaggaagattttgtttcttcttctccaagaaacaatccctagattgatcgagacctccttcaagaaaccatggacaaagttgtgagaatgtcgtcagagaaaggagtggttattttcagcaagagctcgtgttgcatgtcctatgcggtccaagtacttttccaagaccttggggttcacccaacagtccatgagatcgataaagaccctgaatgtcgtgagatcgagaaagccctaatgaggttagggtgttccacgccggtcccagccatctttgtgggtgggaagctcattggttcgaccaatgaagtcatgtcgcttcacttaagcggctcgctggttccgctagttaagccgtttcaagccaatctatgttaaaaaggtgttctaattttctatactacaaaaatgtatttcaataagaaacacaaatcttatagcctatgcaacctttgtaatgtagctttatatatatattgtttgttctgtaatttcaggtaatatccaataataattgactaatttctactcaccagttcaacttttagctttcatggtactgtttcagggaaataatagaacattct

SEQ ID NO: 10456 - DNA, 1184 bp, Arabidopsis thaliana landsberg
ttcaccatgtactgtatattatacagattccctctcctgtgtggatatggagattctatttctgaaatcttgctgattttcccacccaatggctcgaagatcatcaatggagtatcttgctcaagaaatctcttggtcacttcttcgaaaacgttttcaggaacggggttttgaacataatctgattttgctttgaaatactgatcctcgaatcttaggtctctgttgagcaaaatctctaacggttgtcctgatctccagttgaagaacattatcgattcgatccagctcatttcggagcagtcttgagatcgtaagccgagttccggaaacttttggttcatcagaggaatcaatctatcgattccaccaagaaatagagtttgaaatgttgatttcactcttctttgattcccttcaagactgttgtcaataatgactctgatgaataaatcttcgtctagctctgatcctatggattgccatctatgaacaagcttgttcatgctaggtcccatcggatgttgacttatgaaacaagttaccttttcaggaaccctagcaagcttaaccttccatgacaagacaacgccaaaactcgcagctccaccgcctctaagcgcccaaaacaaatcctctcccatcgttttccggtcaagagttttcccatttacatccatcaaacgtgcgtccacaacgttatcagacgctaaaccgtatttcctcattattgtaccgaatcctcctccgctaatatgtccaccaacaccaacacttggacatatccctgcggcaaaggcatggatcttgctggttttggcgatcttgtagtagacttcgccgagtgttgcgcccgattggatccaagcggtctcgtctgtgaggttgatgctgattgatctgaggttaacgaggtcgacgattatgaaaggtgatagtgagaggtaagatagaccttcgtagtcatgaccaccactcattgttcttacttgcactccaagtttcctgctgcataaaatcgattgttttatttcggattcggattttggcttaacgatgagaatcggcttcaagcttgtgaaattcaagttgaggaaactagaatttggagatgaagactcggaaaagtcggtgtggactcgggaatctagtgtatgagtggtgagattatagggtttttgagg

SEQ ID NO: 10457 - DNA, 1421 bp, Arabidopsis thaliana landsberg
gcaagtaaggttcaagcagttgaaggatataagtgcggttatcaaaagcagaaagccttgttaggttttttagcaaacttatccttgaattatcaatcatcaagatctttgtatccattaaaagaacctgcaagtcatgtagatacttttagatggacaatttcatggtattctgttgttaatgaatattaaaatcatggacgaaccttttgggtgaccactgatttcagaaggtctatggcctgcaacactttatcgtcactgagacttttgtgctcacgtataaaattcaagcaatcttctaaatcgaggaaatcaagtgttggatgcaatgctccttcgaaaacatctcttactgcacgcacgaataatttttgtagtaagggaatttttggggactctctcttcacacacatcgcatagaagagatgcatatctgctccattgatcttccggcagattctttctcctttcattttcgctcacacacatgttctcgacatcagtaagagctgcatcatagtccacgacctgtactttctttgcatatttgtttcccagagtcctacaggtgaactgaacagctttcaaaacagccaaccagatatcaagattgtgttccctgataggtctgggaaaggtcttatctactgaattgtagtcagttaaccaggatatgatatcatctccatgaactggtgccttggcgtagtgagcactgggatccaaaacattgatcgtcccttcatcatcatcgaattgaacatcattgattttcagcagtcttttatctaaaagcagaaatgaaaactgagggtcaaagtcgatctttactttgacttgaatacgacctaagacactatctactgctgtgcaaacctgatctgtaccatcgttccttttacacttgatggttttcagaaagtctaggattcgagtgagttcatgacattccagaaaacagatactctgaggtgtttctgataggtgagaatcgataagcccttgtttggaaacttcaagttttgcaagatacttaactggaaaatgcatcacccagtctcgcatgctaccagagagtattttcagctcgcaaaaagagacaaggagcaatttgatttcctggagtaactgcttgcgctcttcatcgacagctaaaggccattcgtaggaccatccattcttagatttagatgcaaacgctttaacatctgcgagctgattcttgatcatttcaacggcagctaccgcatccacaggttcccaacctccaagcgatatcttacgagcccagttatttcctatccgcttgactatatccttttctgaagaaggtttgaaatctgcatcgtgttgttgttcaaaatgcttcctacattcttcaacactagagcacctcttggaacatttagttctacaca

SEQ ID NO: 10458 - DNA, 1531 bp, Arabidopsis thaliana landsberg
tgattcgataaacccttgttaattatttgattctctttctacctaatttgtactgttgttgtgaagctccattaattctcctttattaagaacaataagcgtgaccacgaaagaagaaacttcgtaagacgtctctgttatgtcgtaatcactaaagttacatgaatacaataacgtttttttttaatgcggtttttatgaaggaaaatattaatttcctatatcaaaatatcttcattagaacaataagcgtgaccacgaaagaatataactttctgagacgtctctgtaatcacaaatgttacatgaattcgaggaaatataacttcaaattctcctaaaacaaatttttgtcaacatggttaaatacttttttctggacataattttataggattatgatgaaaattaaatgaaaatttgtaatactttatgcaaaatttctttacatatctttttacaatcaaactacttggatctcaaataaaaaacgttaaagacaaaataataattaatctatctacgaatttgtaacaacgacttcaagagaggaagaagagagacgagagatttggtccatgagaaagactatacgagagtgatagtcacgcgcctgatctaaagactcgacctctagctccgccagttgcgagcagagtctctcctcggcctcctccgccaccaccgtacgccgccacagctgaaccatctctttcttcatctcctccatttctctctccaactctccgttcctcctccgtaactcctccacttcttccgccgccaccgtcacataacctcctccttttcccattatgattatgtttcttgtatatagacaacaatttgagttaggtggttttgctgcttcttgtgttaaactgttaaattctcttctatgtgttgatggtccttttaataggcatattttgagttttggtatttgggattgcaaagtgtctaggttcaatgtatctcgtgttctcttctttttttttttgtcgacatcattgtctgtctactgccttagaaaagtaacaacacgtggtacatatcatgcaagactatcacaataatttattccttttgaatatctgcatctagaattatcttcaagcaatatttaacattacatctcaaaaaaatttagattaaaatataaattaggtatcgttatcagaaaatatataatttagatatgaactagtattatactaatatgtaaacacacaaaagtagataattatttatacaaaatcaaatacacaaagatataccacactaatgatgacgaatattaattagatatatatactagtaacctaataggtttaaaatgttttttgggggctgttttattacattaatctagaaaatgcaacatcagtacatacatatccatgcatgatagtataagtatatctggcctattgtagatatgtatcctatatcccaaatttgacacatttaagagaaaatctcatattctatcaaaattttcatataatttgctcatagtgattaggcaaaa

SEQ ID NO: 10459 - DNA, 961 bp, Arabidopsis thaliana landsberg
tgctaacccgtcagtagacggttagcttccctatacacgtgtgacactcggactagccagtcccttgtgaaaaagccttggcacaaccgtaccaggaaggacagcggatgagccttgctgatccctgtgcttagaaaccccaccaccaattctgaatccaaatttaactccacccatcgaaagcccttatcccaagcaatgagcaacccatagtaggcaccccataactcagctaacggcgcatcacaatacccgatattaagtgcaaacccaccgagccattccccctgcagattaaggattgccccacttgccgcaactaatccctggtgtcccctcgatgctccatctgtcgtcagtttgacccacctgtcgcttggtgccttccatcttatcatcctttctacccgtgctctcttcacatggttatttaacgttcccacctgagctttccgaacctcctctgctatatccttgatgaacttcaatctatcctgacataacttgcgttacccaaatacatcgccacatcgccacttccatgcccaccatatccccatactaaatagcgtaagcaatctcccttcgccggatccagatttgtaaacaaccattcaaattgactgaaaaactcgttctgccttctttgtggcagcagcctttgccaaataggtgtcatcgccggacagtccctcaacacatgtaagatcgattcatcagctccattacaaaccgaacaagttgcaatgtcacttaagtgtctcctcacacgctccacattagtcataataaccatatgactcaccaaccagatgaaaactcgtaccctctccggcgctaccagcttccaaatttgctttaaaaaactccctatgagtggcctctcctcagcctcaggttttagcagctcataagcggaccgaaccgtgaagtcccattttgcgtcccttccaagataact

SEQ ID NO: 10460 - DNA, 863 bp, Arabidopsis thaliana landsberg
tggtaaatcaagaaagacgattttaatgttggttttctttctctaaatttgttgtatgattgattatgaaacacaaagccgtaacgtttcgtcgtatgttttctacaactacagtcttcggacagataaatcaaaggaatagagtcttgcttaggaaaaaaagaatttcttttcaagattcccagttgggaatattagcagtagcttcgtttatcattgtcaccaatgtcacctgcattgtgttatacccacttagtgattaggactgtgcaagaaaaccaaaaggaaacaaatgagagaagttttgtttgaagctatatatatataccacgctctcgggaacacctcggggaggcagtgtgagatttcttgggggcggtttatccccgtaagaccgtttatcgaatctccattctccaatcttccctaccatcatcttcccctgtgaattatataaccaatatagacaatataaaaccatgcttatctaatagtatcttttattaactttcttatattgcttgttgtttcatgattgacataccttcatgtcgaaatcacagccgtaagtgtaatgtattatgaacgtcttctttgtttcagtgtcccaaggaggctacaccaatagataaaacatgagttgttatgatccgaaattggtgaaacttgttggtatactaaataaagttttattaatcaaaacctgaatcatgaagtccttgtgtagaatgttgctcacgccgtgtaacgcagaagaaacagcatatgcataccttatagtgtaaatcaaacatagatcaattaattaaacactatatatctggaactagagggccggggtcacattagagtaggagagaagg

SEQ ID NO: 10461 - DNA, 1527 bp, Arabidopsis thaliana landsberg
ttaatatttacaacatttaaaataaataatgttaagtgtttatattaattataataacttataaaataatactaaattagttcttatgaaacaaatatctttattaattaatattaagcgaacacttaaatttagttgggatagtaactttacactctttggacaccatctaaaaccagaatcactatatataaaaaaattatggaggtttttttttcttctgtgggagatatgtggtatgtaaacaaattgaataaacaattatatcagttagtgcaactgatgctaaatctttaattagcatcggttattattgatttaaattttgtatcactttctaaatgatttaaattcacatatttgtatcaatattgtgaaagtgaggcaaatagacctagatttgcattaattttaatgaactgatgtcacacaaactaatacgacatcaattattgcaatcgatgttaaattataatttttgtatcgattgtaaataagtaattcaaattagtattttttaaatttttgttgcaagttaattgatacaactaaccttttttgtagtgagattcttgagacataatatccctgcctcttcttcttcttcaattgttggggttgttctcccaatcataaacattctggtggatgtaaacataaagagcaagtgattttaactcttgtatagaaaactaggagtcttgaatgcattggagaaaccactttgcatcggatatgcttaactaatttacctagttccaagaattataaatgtggaattccacgattatctattactaaaaattatctacatttattgtatcatactagaacgtactatttgtaatatgtccatctcactcgttggactttgtttcaacatgtaaccaacccaacaattttatttattgacaaacaaacaaatccttactcaaataactacaaattttgacgaaacatttatttgacattgacattctctcactttttttccgaaaaccacttcatttttaaattacaaaatcgaacatttattctgtaatcaaaattagaatttaatgttcatatcgtgcgaaccaataacctttctttgaaccaaaaataaaaataaaatctttcttttctcaaaaccccatcacgtaataacacacaaaatacaagggtaatttggtctttctacttttctgtaaaccccccactggtaaatgaaattggaaaggaatggcttgcgatattggcaatgtcaatgtctctctctctcacagtctctttccctctctgcctccaaaatttccctctctgtttttgagcagttaagctgcctcatcaatctcactcaccagaaacccatcaacaatcattaacctttttctcgttttcatcaaaacccattttctcaatttcttcaaaaaaaaaccttttgattctttctcctaatccttttcccagctctcccaatgctttagccacaaaactttttgtaaaaaatgtgtgacagttttgtaccttttaagagaaaaaatgcca

SEQ ID NO: 10462 - DNA, 1280 bp, Arabidopsis thaliana landsberg
  unsure (1)..(1280): unsure at all n locations
acacttttgatcaaacatctctcttattaaatgaaggtctctcctcgtttaaagtcagcccttctcctattgttcatgatccttgccacaggttattaattcataccatcatgatacatctaaataaaaactcacgtcaacatgtaatcatctacatccctaatatatttgcaagtcaacataatatgatacatatcttggtatccgtctttttattttggttaacatatttgatgtatgattatgatttatgcataagcttgtggataagcccatgttaatttcatgttcgaataacgtttaaccaatgtcttgtagtgatgggtccggtcagggtagaggcacggacgtgtgaaacgagtagcaacttgttcaatggaccatgtctgagctcaagcaattgcgctaatgtttgccacaatgaaggtttttcagatggtgactgccgtggattccgtcgtcgctgtttgtgcaccagaccctgttgatagatgatctatttatatataatgaatatatattatcaaaaactaaatgatcttttctatgttttctatctctttgatcattttctgacttttatcctatcgtttgcctttgaaacaacgataaggagatctaaaatctttaagcccttttggcttgagctttctattatctaccaaggttaaacaatagtaccttttatagttaccattttcaaatcttatgactttttatgtatcaaaatagattggacttacacatccaatctaaataaaacatgattatccaatctaaaaaaaaaaaaaaaaaaatgattatgtataatatcgcatttttctttgaataaccaatggtccatgagattttatcccgatattattgttagctaaaaaagtttatagtgactcatatagtgaaatttcttaccaccaaaagttgatttaccaactaaatataattttctcttataatttcatttagcaataatcaaaataatattcgaaaagacaaaagagcatgtaaaaagcgtgcgaatggagaacaaaaaattaataacacgtgtcctcttcgttcacaagtttcctctttccttagcacagtatgttttttgacttcttcgcgtcggcgatattatccagaaacagtagtgtagaagaagaagaagaagaagaaggagagattctgagtttagggttttgtttgtgttgcttcnaattgagcagctatggcttccgtgttgctacttcttctggggggcgngtttgatctcattgcttttggacttgctgtcgctg

SEQ ID NO: 10463 - DNA, 1353 bp, Arabidopsis thaliana landsberg
aacatcatcaacaaatctccacaagctgtgaattatcctaggccttcaattatgtaacaatcctaggcgagctatttaccgggttttagagatgtatagactctttaccttctgtctgtttagatattatgttgtttggtagtaacaaaagagctggcaatgtaagggagagaaggaaacttactagttgtaaacttaggttctcttacaacgttcacatgttatctcacatacaaaatgttatcaggataagaaaaccacaaaaaaaagaggcaaagaagtgagatgatcctagcagagaatcaatctctagttcatcgtcctaacaaagcaacacgatctgactgtacagcttgagtaaggttgatgtcgaaaagctcgcaacggataggcatttcaatctcatagaaaggattcttcaagacgtaatcagtgtagagttcataaatgtatctaaggaggctctccatgttaggagtcccaggttcacaaaccacaaagaactttgttcctgagatatgatcagttatagagccaagtcagtaatcaagagaatgtgacggtatcttcttgcaaatggcgatgtatgattacctgggagagactggaaacaatggagatcgaaagtgtcggcttcgagaagctcgatgccagaacagccattgacaggtgaaagctgctgagaaatggcgtgcattgaatgccataaactagctactctcaagctatcattcgtatccattcttccctttgttccacaatcctgaatttttcccaaatccaaacacacacagaacagatcaaaattcaaatccaatttctttagtagctattcacaacccctagattaataccgaaaacactccttctactaaacctagtgatctcaaaaatttcatcttttggtctatccctcgaaattaacatcaattagctcgtgattctctagacatggaaagtccacaagctgcgagatcgagaacaagaggaagatggagagatcgcaccttgtagaatatcaaaccaccagatttgttaattatgtaaagactgtaaatcgctgccatttttttcccccgataatcttcaaagatccaaatccgagaaatcagcgaaacgatgaagaacaacagtacagaccttattaatgatttttctttttctcagaacggcatcgttattatatcgatggtctctactcgcgccacgtcgcctaattaatttaacgacgtcgacttttaaagaactagcgtctcttaaagcgccacgtgagctaatgtttaaaaacttcaccaaaaacggtgtcgtttaaaaacttttctttaccactaccaaaaacgttgagaagaaaaa

SEQ ID NO: 10464 - DNA, 1506 bp, Arabidopsis thaliana landsberg
ttgttcaattggagtcaccaaaattatacaaatcttgtaatatcattaacataatagcaaactaattaaatatatgttttgaggtcaaatgttcggtttagtgttgaaactgaaaaaaattattggttaataaaatttcaaataaaaggacaggtctttctcaccaaaacaaatttcaagtatagataagaaaaatataataagataaacaattcatgctggtttggttcgacttcaactagttagttgtataagaatatatttttttaatacatttttttagcaacttttgtttttgatacatataaacaaatattcacaataaaaccaaactacaaatagcaactaaaataattttttgaaaacgaaattagtggggacgaccttgaattgactgaactacattcctacgttccacaactactcccatttcattcccaaaccataatcaatcactcgtataaacatttttgtctccaaaaagtctcaccaaccgcaaaacgcttattagttattaccttctcaattcctcagccaccagccacgaccaccttttcgatgcttgaggttgatatttgacggaacacacaaatttaaccaaaccaaaccaaaaccaaacgcgttttaaatctaaaaactaattgacaaactctttttgcgactcaaaccaaattcacgttttccattatccaccattagatcaccaatcttcatccaacggtcatcattaaactctcacccacccctcatacttcactttttttctccaaaaaatcaaaacttgtgttctctcttctcttgtccttacctaacaacaacactaacattgtccttcttatttaaacgtctcttctctcttcttcctcctcagaaaaccaaaaaccaccaacaattcaaactctctctttctcctttcaccaaacaatacaagagatctgatctcattcacctaaacacaacttcttgaaaaccaatggatcaaatcgaagcaatgttgtgcggcggaggagagaagacaaaagtggcggttactacgaagactttggcagatccattgaattggggtttagcagcggatcaaatgaaaggaagtcatttagatgaagtgaagaagatggtcgaagagtatcgtagaccagtcgtgaatcttggcggagaaacactgacgatcggacaagttgctgccatctccaccgtaggaggcagcgttaaggttgagttagcggagacttcaagagccggtgtgaaagctagcagtgattgggttatggagagcatgaacaaaggtactgacagttacggagtcaccaccggctttggtgctacttctcaccggagaaccaaaaacggcaccgcattacaaacagaactcattaggtaattaattaaatcctatacctttatattatataactaattaataattagagaactcattaggaatgtgatcagagaaaaaaataaattagtggcttaagtggataacgcatactcacgagtatacaa

SEQ ID NO: 10465 - DNA, 1649 bp, Arabidopsis thaliana landsberg
ccctttcggtttaacttcgttcaacttcctcttctgatcatattcaattttcttaaccttatcagataacaaacaccaagcaggtaacacaagcttaaacgcaccctctgcgccttcacaattgttcttgtcaggatgaagcaaaagagctagcctcttatactgtttcttcactacttcctcatcagccaaaggatcaacaccaagaattccataccaatcagattctcctccactaattgtatctcctgctgagatatacacatcgatcaacatcatcacttgtcttaaaccatcaagtttcggataaaaatcctgagccttgttagcaaaaagcttagccccgttgtaatcattctctgcaactttcctcttagcaatatccattgctcttatagcttcctccttgttgcattccatatctttgttgaacaaagaatccttcaaacgattttgcaccttgtctctatggaaaaccaattggaggagccaaaagaaaaaggattaagaaggatgaaaaacagaagcaaaaccgtaaatgaaaatcactaagttagaaaaacaagtccttagccacagatctctgaatctgaagttactctatccaaagccactacataattacacataatcaatcacaatttcacaaacaacaatcgaagaatggatacaaacaattcataaaaagaagaatctcgtgtaaactagtaagtaacatcttaattataggcaaaaccatacatgcaaatcaccaagtcaaaagaacaagccctagatttctcaagttactgtatataaagcaacaaagtaatcatacgaattacaaaatagatttgaagattccgacactacacaaaacccatagaaggaagaaacttttgggattcttgtgcaaagcaaaatcatcttaccaataagtgtaaaagcccagtttttgatggagacccacttcttaaccaagcaacattgtgcgattgaataacagaatgccctaaacggtggagaagcgaaaaattaaagaagaaggatccagtgtgtaaaaattgtaatttttgactagaaacaaaagggttattttcgagtttgttaaaaacaattggggcaaacataaaaataattttagactttagggacggaaaagggaaactattagtgtagtagttattttcctctctccctttcccgccttcttttctcttttccctctctctgactttcgtcattcttttagtagtttcagttcttctcataaaccatttgtcttttgttttactaacttttgagttctcataaacctttcttcttcgaaagtagagtttttcatcggtttcttggaaagtctctcttctccaaatgtagcagagtttgcatttcctctagcagcagcagcagcaatagcagcatcaagcttttttcgtgaatcctcaaactatgttttttattgtttcttgtgcttgtttttcagcctatgccctatcagatgctgaagttgtagaagaagcatcactttctctttttcttgtaaactgaaaattagtactgagtctgatgtcttgcctcccattgaccatctctggagtgataaacggtcgaaacgaaatcttggccgcagttttgacacggcaaggtcttgttaaagatataatatc

SEQ ID NO: 10466 - DNA, 1501 bp, Arabidopsis thaliana landsberg
gtgcgttctcgtagacgcgcttttagtttatgattttgaaggaagattctacatagtaacgtatgtgtgaaactaaagccatctcaataacacgtgggtgcttgttactgattcttgattttgtctctctttttttttaatgaaactttttggttgacctgatgtaatcttaacgttttgcgatatttcattgtctacagcttgatacatgtctattattgatctttgatatatatagctaggaaaggtccttcgaaattaatttatagaataatttgaacatgtccaaagtttcatgaaactttcatctaattaaaaatcatttatctcgtcgtatgaggattcagtaaagacatagtaataatccatatatataacaagcaatgataaataatatatatctatatatatttcatatcaactgttttatacgatttgatataataccatggtttatacgattttcaaaagaatcggggtttcttaaattcagtttcattttttttttctataggttaaaaaaatccatgtaaaaatacctatagtccaattttcatatcgatttatctggactgtactctttaacttccaccgtagcaaatatatcttgaacaatagctttgggtggaaataaaatatgtcggcaaatactaaatattgtgtacaaacaggccagacaaggtattctgtattactgtatatatttgcacttctccactctgagttaagtgctcttcatgtactacggaagcgtgatacaatacagtctatattcgtttcatgttgaaacggattgcacaaagttagtaaaagccatagatgatgaagaaccatggcatgcatttgccacagaacttgattcttttaatcttatacgtttccgttttagattcttttcgatttatcatatctctaggaacaataatgttcacgccgactgtttctctcttgaacttctatattttcccatctaagctcaggtttgagagtggtttgcatatgagaccaacctattcaaacatgcttagtgatatatgaagttttttgttgctaagaaaaaggtgtaaaattaggtggtctcagggcggatccagaagaaatatttaatgggggcaaaatgttgctaaaagggtttgaagctatgacctcttggttttagtgggggcattccttaccactttcctaccttacatacaatatttctatacaaatatcatcaactatttatattttgctggtggcagttgcccccaccaatcacaacgtgagtccgcccctgggtggtcgtggtctaatgctttcttgaacatttattactttgaatttcagctctatgtaaaaagaattcatctttgaatgaaaaacagtttccggaaggaaaaaaagaaggaatattacatagttcaaacttaacataaatgtatctaaataattgatgcgaaattcggtggtgtggtgctttcttttcttgaacattgattaccgaagattttttatcaaa

SEQ ID NO: 10467 - DNA, 822 bp, Arabidopsis thaliana landsberg
gactactcacaacagcggttacaaaacccaatccaaatattaattcccaccgtttcctccatttgtcttagtcgtatactcctcggtccaagctccaggcatgtgcgggtgtggcgcgtgtattcctaaaccgtaacaaaccggagttcctatcaccgttcccggcggcagttattcattgttaagatctggcacagccacatgatcagcaacatcgtccacaggatcagcagcggcgacaacgggctctccctcgtccttagggacatcatcacgcaagaaatcaaagatgacggtttgagacactacggcatcaacatcagatttccgtatcgtgagtcggttgctctcttgagcatggagccatgaacgcatcgtgaggtccatgacaaacatttcacaagccttagataagagatttggagcctcagcagcgatcatactcacatccggatcaaacttcattatcctcttgatacgagagattgggaactcgtgattcttgacattcaagtcaccttccatctcctttgaccagaaactctttagttgctcgttatctttcggtggctgttggtggttgttgttgttgttctccattttttttttgtttgaagtgtttggttttgagatatttttatgtggaggtttgcatatataaaggaaaattaagcgtatataagatatggtaggataagattaagaagtgatctctttacatatatgaatctcaacctatttagtagttcgctaagaatatctaatgttaataactggctgtgtgtgactgacagactttgtggttgtctcataagaagaaaa

SEQ ID NO: 10468 - DNA, 1663 bp, Arabidopsis thaliana landsberg
tcagctacctctgctaggagtgacctctgtcgcctcaataccttcctcgatcttgctgaaaaggcggtgctctttgatctcaagatagttcaaagcaagagctttgaaagtacttggtgtgcaatacgacatgtggatgtgcatatccatacgtcctggtctcagcaaggccgcgtcgagtttctctttgtaattggttgtgaagattatgatcctttcgtcaccgcagcttgaccatagaccatctatgaaattcaacagtccagagagtgtcacttttttataccgtggatcttctatatcgtcagattcccgaggaggttcatcgctagtcctatctttcaattctagtgaacaatcgatatcttctacgataagaatcgaacgattagcagtggcaatcaataatcgccggagctcagaattgttgttaaccgcggtcaactctaggtcgtatatatcaaagttgagatgattggccatggctgcgatcaagcttgacttccctgtgcctggtggaccgtacagcaagtaacctctcttccaagctttaccaacccttttatagaagtctcttcgctttacgaatttgtctagatcttccatcacacttgtcttgacatctgaatccattgctagagttttgaaggtagaaggatggtcaagagtaacagaggtccacgcgtcagagtagttcccatacatgttttctggggagagagtgaagatcttgagtgttttcttctcttgcttcatcaacgtggctcttttcaccatgaatggcaagtaagattcaagagctacgtctttgaatttcttgtggaagttgagctcgaatgatcggacctcagatctcagtgtggagtttagatcccgtgggttgtggaagtgcttggactcgacatgacgacaatggaggatccactggaatttgacgccattgtaggtgtcaacaacttcttcgtcacgctccacggtgacattgtagttgttttctttctcatgtttactcacattgatacttttgttagaaggagagatcttggtggctagataggcctctgcagcttcaaagacttcattgtgagcaaaaccttcaaattcatcgatgattaacgtcatttgggatgagaagtaaccaaagatggaacggaatccataggcaatgtagtgatgcacctcgtcaggcaaataatcttggactaaagatcgagctagcattgcggttgcagccaccgaagccgcggtggtgagaaccgtcttagccgtggctagacgggattcggcggaagaagagtcagaggagctcatcttgttttgggtgtatttgtgttttttgagttttgttaaacccaaaaactcataatttatatataattggtgggaggtgggaaccggagacttatggacgcaaggaagtagcttggatccttccatcgctacaacgtggaagttgctaactaatatatagaataacaaaaagaaagaagaagaatagaaaagtagagtttaagtgggctccaatgacttgttcatgaggtttatttgactaatcgaaaagaatattagtaaagaaagactgacttaacgtgtgggtcacgcttcttgtaatttaaagtcatttcctttcaataaatccaagaacagttaatatttgtatgta

SEQ ID NO: 10469 - DNA, 1085 bp, Arabidopsis thaliana landsberg
accgcaaataatatggttaactaacagtgatatgtttacggttaatgtacaacactaaaaccaaaaattataaaataatgtgaagagagtacaaaggctaatctttgtatgaaccgagcaaaattttatatcaataccttaatacctttctcctaaaattgagtcttttttttttttcctcaacctaaaattgagtctacgagtaaaactttgtatgaaccgtttcattgtaatctattttaccgttaatggttattttttttattttatttttatcgtcaacttttattcattaaaccaaacaagggcatataacgatacaatatcaacagtccaaaaggcccactaactgtctgactatatagacaaagataagaaataaaccaaaacaacacgtctacaaacgtggaagcctccggaagctgcatcgaaaactttttctccagcaccgcctgaattatcatcgcaaatttcgtcaagcggttgctgatgtacggttataattattaacacagcagctgcgtaaatcgatttgaaaaaaaaattgtttgttttatgatctatctgcaatagctgaattaaccctcaaaccgacggttaattgttctagggagcgacaataaaccgaatttcaaacaagaaaaccgaatctttgtccggttatttatcaaattgtaccggaaataaccgaatgaagcccttccttaaacgacgtcttcttcttctttctcgaaaattcgccaaagcttcgatccgaaaacttcttcgccaatcttccgtttcttctcacgaatttctccttcaagctccgttcccagcaatgtcatggtacagaagaacaaaactcgtattcgattccctgcgacgcaacataaacccgaagattctacctcgatctcatgttacttcgagaatcaacaatccaattgggtcttctaatccctcagctaagttctcttcaatctcttcgcgagaagtaggattaagatcatggacatctctcggccgaaacacgaacagaatcgcgtataatccgtttctgagtcaacccaagagatattactacgttgatcgataccaagttc

SEQ ID NO: 10470 - DNA, 656 bp, Arabidopsis thaliana landsberg
tatagtgaactaaaacataattcataccacagaatataacagataataatccacagacatacgacatagagttaatagatcaaaccaagttccaaatgcataagacataaactaaaacgacacgaaaaagataaaatgcatatgcatggtcttagtgtccacatagaaccaccaactcccccaccaactccccctgaaggagacgcctgacaacttctcatcacttctctccccctttggcatcaattgccacaaaggagaggccttactgatcactcggcggaggatgcatgttgtaataatgagtgctgaaggtgtcaaacagggaggagaactggccaaaatcctgttgaagctgctgctgcctctgacttatatcatgcatgttgtcagttgtagaaagattgtcaaactgactggagagagcacccatgttatcttgaaaactctgttgcatattattcagccttgacatgatgggatcagtgacattagtgtgaatttgatcacgaaactcagaaaattcagagttgagtgcatcccagttactgtcaaagcgagactgcatgtcatcaaggcggtgatccacatgtgacatcaggccatcaaagcgagcatcaatatgagtctccagcccttgctgcatattgtgaaag

SEQ ID NO: 10471 - DNA, 611 bp, Arabidopsis thaliana landsberg
taattactcctcgattaaccacacacagagtaatttgaactaaaacatagttcaacccacagaatattacagataattgtccacagacatacgacatagagttaacagttcaagccagttccaaatgcataaaacataaactaatgcatgtgacataaaaaggtaaatatgcatatgcatggtcttaatgtccacatagaccaacaactccccctgaaagtgacacctgacaacttctcttctcatcacttctctccccctttggcatcaattgccacaaaggagaggcctcactgatcactgggcggaggatgcaggtatgagtagtgagtgctgaatgtgtcaaatagagaggagaactggccaaaatcttgctggagttgctgctgcctctgactgatctcatgcatgctgtcattggtagaaagattgtcaaactggctggagagagccccaggttatcttgaaaactctactgcatattattcagcctggtcatgataggatcagtgacattagtctgaatgtgatcgcgacgttagaaaactcagagttgacccacccagttatctcaaaacgagattgtatgacactaggcggtgatcatatgt

SEQ ID NO: 10472 - DNA, 448 bp, Arabidopsis thaliana landsberg
  unsure (1)..(448): unsure at all n locations
tgccacaaaggagaggctnnnnnnnnnnnnnnnnnnnnnnnnnnnnnnnnnnnnnnnnnnnnnnnnnnnnncaaagagagaggagaactgtccaaagtcttgttggagttgttgctacctctgactgatctcttgcatgctgccattggtagagagattgtcaaattgactagacagagctcccatgttgtcctgaaaactctgctgcatgttgttgaatctgttcatggtaggatcagtgacatgattttgaatgtgactgccaaattcagaatactcaatgtttagcgcatcccagttattatcaaaactagattgcatggcatccaggcgctggtccatatgtgtcaacattccctagaagcggctatccatgtgggtctgaagcccttgctgcatgttttgaaaatatgggtcaaaatagcctggaccaggctgccaatactac

SEQ ID NO: 10473 - DNA, 648 bp, Arabidopsis thaliana landsberg
  unsure (1)..(648): unsure at all n locations
gttttcaagataacatgggtgctctctccagtcagtttgacaatctttctacaactgacaacctgcatgatataagtcagagnnnnnnnnnnnnnnnnnnnnnnnnnnnnnnnttctcctccttgtttgacaccttcagcactcattattacaacatgcatcctccgccgagtgatcagtaaggcctctcctttgtggcaattgatgccaaagggggagagaagaagtgatgagaagttgtcaggcgtctccttcagggggagttggtggttctatgtggacattaagatcatgcacatgcattttattttttcatgccgctttagtttatgtcttatgcatttggaacttggtttgatctattaactctatgtcgtatgtctgtggactattatctgtaatattctgtgggatgaactatgttttagttcaaattactctgtgtgtggtttatcgagatgtgattataattactgcgctcattctacgaatcatctcttgtatgcctcgataaccatgattgtaggaaagtctccacaagctcaaatatattatgtgtgttatacttcaacttcaaataatcatgcacacacttagggggagctgtcttgcaactgagttttattgggattatctacttttggcaga

SEQ ID NO: 10474 - DNA, 605 bp, Arabidopsis thaliana landsberg
gcttgctggtcgcctctggaggcttatttctcatccattgattacataaataggtcggttggccgcccctatctagctagagatccttatctcctaaaaactctcaacaaactactaactgataaccttcctagataatctcaattaatctcctaaataatctcaactaatcttttaatcttatctctaactatccttatctaatcccccttgagggcccatggctgctgctgccgcagcccctccgtggtcctccttaggccctgacataactctagtagcataggtagccaatctggaacttggccaacttttgaaaacacagaacaagacatcaggcatccgatactgagtggtgggtttctctttcaattctttgtcagtttaatgtcttcctaagtatcttggacacacttcacattatcagtgcagattggtttcacccccaccccggtggtaaagggtggtccgtgtgggccacggaccacctagcctaaaaaccattaaactataggtattattagatataaaaatattactcttaaacaactttgttttatttatttaatgcatctataagggagagcaacacatacgacaaatat

SEQ ID NO: 10475 - DNA, 1215 bp, Arabidopsis thaliana landsberg
tcaggctatgggcccatgcaaatccaatttggtatctcatggataaaaccccaatcaatatgtggtgctgcctttgctgttccattagaagacaagactttacggtcatgaaacgaagacaatggtttcacttctccctattctaacaaagtcgggaagacagtttcatacaactgttacacatcattggttataacaaaccaaattgtacttaatcatccgttataatcattggttcttagcatttgtttcgttatttgtttgttttttcaggatccatgttatgacataattactatgctcaaaacaaaaattactatattaactatattatgcctcatatgagtcagagaacctctgtttgactctgtctccgggcaatctccaacctataaactaccaaactataaattacaatccatatgcctccggcaacttattcatgtctaagttctcaaccatcctattctctaaccgcaactctgcgtcgactttagctcccacctcagccgccttcttccgtatcaacgtcggagacatatctcctcctaagccttcaccgccgtttccatccttaaagacctcttcagggaaattgagtctcgccgaagaccacgtaagtaaaacacagcggtatcgtaggcccgtgccgcggcaacggcggttttgtatgaaccaagccagatccgtgatcgtttattaggctctcttatctcagccacccacttgccccacttcctcatccttattcctttgtatcgcttctcattagagcttatgagattcctctttggcttctcggtcatgaccattccttctttcaccataggaaactcttgttttcgtttgtattgaatcaccatcaaaccctaaccaaacgtgacatgtctacgtgtgtaatatataaagagaggattacatgagggagaagatatgtgtcacgttaggcggctagagatatgcgttatgtgtgcgccgtcacttttttctttcccaaatggggtatgttaatgaaaattgaaatatagccgacatagacaagaaccgcctctctttccagttttactattgaacctaagaactcttgtttgacttttagtgttgaagacatctgactgtttggcagtgcggtttaatgaacggctgagaaagtctctgtgaaggctgtcgacatttggacacccgacgtggcagcacattctttaggttaccaca

SEQ ID NO: 10476 - DNA, 651 bp, Arabidopsis thaliana landsberg
gtggcggctgagagatggtcctcttcttgcaagagaagatcagggaagttgagacgtgcggaggggccacggaggtagaagacggccacgtcgtaggctctagcggcggcgatatcggttgtgtaagagccaagccaaagccgtgagcgtttgttaggctcacgaatctcagccacccacttgccccacttcctcctccgtatccctctgtacggcttccttgtagccacgtggttaggcacttcttcttgaggtggctgccttctctttctcatcgtagactcttcttgttctctttccattgataaaagacaaacttttggggcgcaatggaagtttataaagtatggtgacaatatttaatatagaactatggccgacataaatattggttttgtagaaatagccaagtaacctcgtacgtctcacttgttatctatttactatattatcactgaatttgtcatggatggttaggagaccgactgaaattgaatactgaagattcatcgagatcagatggctaacaaaaattataaaaacaatcacgaaaactcagtttatatacaaatcaagaaaatatagaaaatgatcaacctttgtaaatatttgattcaataattcaaactcttgatgaattttaattttcaa

SEQ ID NO: 10477 - DNA, 1177 bp, Arabidopsis thaliana landsberg
caaaattattgcagaacatattggcactagagatttagtgcaggaattcctggccttcagggtttttccaactatgaaagagtggacaatgccaaagcttaaaggggaaaagaagaagggggaactcgtccgactgccctaccattataaattcaagaaatactttaaagtaccctgccaagaatggcttgatacaattgaaataatgagcaatgaaattcttgggaattactctaagaaagaggaccaactgatgacagcggccttcggcactcggccgaaacgaaggctgaacagggtgcttgatgccataggatttgaatatgctgactacggtcgactaggcggaaatgctgggggcccgaagcgataaaggattgctagcaccactgacgaagaagtcatcaagacagcaaaaaagaaaaagaaagattctgataacattagtgttgaagagttaaatcctgagccgaagtggctacggcaaaaaagagaaaaagtgcatccccagagccggaaacgccggttcaagaagaagatactcctgcttctccttctgctgttgaagtagaagagattatgaaggtaatgactgaacctttcgctttcaggctaagtccgctggcactggaactgacgaagttttttcagaaggacaaggctgctccggcagtagaaagtcctgcgaagccgaaaaagcggagaattattcaagtaacagatgtgatccatcagacgccgcaccggcaactgtgtcaaaaattgtttttgctgaaactgccgaagccgaagctactggaatgaaaactactgaagctgaaaccggtgaagccgaagctaccgggaccgaagccagggccaccgaagagttgaacctgggaaccacgctagaggttattgacaatatactcctaaaaatggctgaagaggaagctactgtggctgtagtggatacagcaactgagaaggggaaagagcaaattgatgaaatttcagaagaagaagattttaactttcaagatttgctcggacaagaattaatagacgccgaaaaagaggagttgaaaaaatatgccatatcttgcggatacaaatcaggggctatgctatttggtggggtcaacgaagggaaactaagatgcttcggaaccgcacggggatcctctagagtcgactg

SEQ ID NO: 10478 - DNA, 377 bp, Arabidopsis thaliana landsberg
attcttggaatactctaaaaagaggccagctgtgacagcacctttgcactcggccgaagcaaaggctgaacatggtgcttgatgctataggatttgaatatgctgattatggtcgactgggcggagatgctggtggcccgaagtgaaaaagaattgccagcgctgctgacgaagaggtcgccaaggtagccaaaaagaaaagggaagattctgaaaaacttagccctgaagagttgaaccctgagccgaaggtggccactgcaagaaagaggaaaactgcaactccagaaccagaaacgttggttcaagaagaaagtactcctgcaacgccttctgctgttgaagtagaagagattatgaaggtaatgactgaaccc

SEQ ID NO: 10479 - DNA, 597 bp, Arabidopsis thaliana landsberg
  unsure (1)..(597): unsure at all n locations
ggatccctcttttcccttatcagttgccgtgtttaccgcagccacaacatcttcttcttcagccattttcaggagaatattgtcaataacttcaagagtggtttccagattcgaaccttctgtggtcccggcttcggccccagcagcttcggcttcgccggtttcagcttcagtggtttccactctgctagcttcggctgtggcgccttcggcttcagcggtctcgacaaaaacaatttttgacactgtcgccggtgcgcgtctgatgaatcacatctactatttgaataattcttcgttttttcggcagtgcaggactttctgctgccgaagcttctttgtccttctgaaaaaacttcgtcatttccggcgccacgggacttagcttgacaggcaagggttcagtcattaccttcagaatctcttctacttcggcagcagaatgtgtagcaggagtgtcttcttctcgaaccagcgtttttggttctgnnnnnnnnnnnnnnnnnnnnnnnncagcagccacattcggctcagggctcagcttttcagggctcagcttttcagaaatctcctttttctttttgggcactttggtgc

SEQ ID NO: 10480 - DNA, 378 bp, Arabidopsis thaliana landsberg
tatcacactgggtatggcttggtactctcctatgtgcacagtgtgtttaatcaaacactatgctctgtaatggcggcggattagagtctatatctgtcaatatggatggagtctttgtttaatgagcgaactggacttggacctggcgttcatcttacggtgcatgagacattgctgtatcatctggctctaagaggaaacgcgccaagcttgcctctcctcatgacaacatccaatatgacccgtgtgcgttcagaccacgcagtgcttttcaaagactgctcatagcacaggaaaggaatgattactactctgcacgaattgatgatatcttacacgttgccgttctaacactatactgaaatcataagatgaggg

SEQ ID NO: 10481 - DNA, 1971 bp, Arabidopsis thaliana landsberg
ttttattgctgctctactcaccttgacgtgtgtttcttttgaattgagaggtacgtaacgtctctggtggctcatcaacaagtctacgacgtgggatgcttaggatgagagcagcttgatcggttgtggctgctgttgatgtgattctgaatccaccatcccaacgcctgtggatgccttcacttggatacagaaaatcaagttccacaacctgtagaggagatataagcgaaaacaggagaattagaaatcaacgcgacagatccaaaactgaaggaaacggaagaaattcatctatatcggtgaagtctaacctgttcactgtagccagaattgcgggacataacaacaccccatcgatttccagctgttgccattgaggttacatggaagccttctctccatttcttgtttatccacttgaacgggaatgaatcgcttactttgtaagactgctgtgtatactgcgtaccttcataattcatttgaaaaccaaacataggataagccacaaattcagagactagtaaaataccataatgacgaaagtgttcaaaagtattcatgaaaagtgtagataccttttgacatgacaactaaggagcttccattgcttgcaccagcaatagaactaatgtagtagttcttctcccactgctccataatccattcctgattcgaaacagaattcactctcaggtaagatcatcttgacagaacacagatataaaaataactaacagagaaacatcagacaaccttgtgcaagaatacaggagagagttcatagacttggtgcgtgaagccagttccagcatccattatcaatgcccagagattcgaacatgatgatacacagcttatcaacaaaccatctgcaatacctctctcaatatgctgtgccagtcttatatcagccacattataatgatacctggttaaacacataaattgtgagtccaaaaatagttttagacacattaaggccaaaaatccaagattataatataaccaagagaaaaaatgagacacaaacgcagtcccagcagttaactgactgtataaataattaaccatgaatttttttacctctgcttcattggttgcctggcattgtaaatcgatatccattgcgttgcagggactcctagacggacctttttcctaggggcatcttcttcttcctccccaatgctcaacctacctcgcttctggccaacttggaatatgatctagcacaaaagaaaacaaatacaagatgttaaacaacaactcctagatatccaaataggaacgaaagggaaagatatacagcatgaaaatgtcaccttttgagcaccctctgtgtttataggcctaattgccggattttcgcccaagaggtcttgaaacagagatactaactttccatagttgggttcttcatcaaatttcatatttaccacgatctcaagaaattgtttgaaaggagggggacaaaaacaacaaagcatatccggcgatgtgccatctttctttttgcaaccaaggaatgacttgttatctccctgaaaattgagtaagagacaggattagcagagaaagaatcatgcaacaacatgattctacaaaacaaaatgataggtctgcagtacctgatatccttgccatggcaatctacctcggtgaagaaagatcagtgtatatgctaatgattccagatcatcccttctgctagcagttctccctaaatgagcatgtgcacttgcgtatctaactgtccctctataaaaattaagaagagagagattcaacaaaaggtaagagcgagtataaaacaaattatattaggtaacagtagaaaatatattacctaaacatatcagaacgttgatcatattcaacatgttgtccgctaccaccttctctccactttgtagctgaaaaaatggataaaaaatgagaaaggtaaagaagaacctagcaagaata

SEQ ID NO: 10482 - DNA, 1506 bp, Arabidopsis thaliana landsberg
gctccggtggattgatctttcttcctcatgtcttattcctcgctacttaaacctctttcatgttcttgtctacaaggttagttttttaagtcttatttgatctcaaaatgccatcttttaatggggatatcgatgtcttgactataagctttttttctttggtggctgaaatttctcaatttgttgtcatatttgcttgaataggtccagtctgatggacaacctaagcttaccacgcacggaaggaaagcaacgattagtgagttctatggtaagcaaacccgtaacaatcgatcactaatgttataatattcatgtttttggctaaagctttttgtggacatggtcattcctttaaaaggttttcgattgagacattgcgggtatttacaatgggaatgatgttgaatgattaatatgagtctgtttgtgtctccatctttgtccttaatgttttgtgttttataggtgtgatactaccatcactgcagctattacacagcaacttagatgagttggaaaccacagacatcgggtttgaccttaaaagactcagtaagaagataacaaaagaggctcgtagtagtagattcagcaatgccggtttagagcgtgaagaagaatgcggtatctgtttagaaacttgcaccaaaatggtgttgcctaattgttgccattctatgtgcatcaaatgctatcgcaattggtatatacacacacacactttagtttttagacctttttgacctgatgcatttactgaatctcgttgattctcaaatctgcaggaacttgaagtctcagtcatgcccgttttgtcgaggcagcatgaagagagtgaactcagaggacttgtgggtgcttgcgggtgataacgatgtggtggatacaaggacggcttctagggaagatttgttcagattctatctatacatcaatagccttcccaaggattacccagaagctctctttgcggtttactatgacgtctcaaatcgtgtatagaatctggacaaacaaagctttgtacagattcttagatggtaaatgtgttgtatagaatgtaaaactgtgttaaggcttttggatgatatgatgcaaatgccaaagctctcagtttttacatacttaataattgtcaaattgcgagaaaaaaaaaaagcttgaatgcagcaaagaataaagatctcatttcatcttaaccaaacgacattctagaagctgtaatgattgacaataacaaatagaaccatcaataaaacaaaacatagtttacatatatatatgctagtctccaaagactgactatcagtaaataaagtatagagaaacattgtatccaatattttgatgatataaagagatagatatagtagagagtaacttaaaatggcatctaaagagacgaagaacatgggaggttctttctcagtcacctcgtatcctctttccatagtctgcatctcttgacctggatctatgatcatctttggacattcttgatct

SEQ ID NO: 10483 - DNA, 980 bp, Arabidopsis thaliana landsberg
atttatgacaaaggcgaaaaaaaggtttttaggtgtttgaccggaagtttttaagctggtcaaacatctctttctctttttcattaaggcttttgaacaatttgatttttggacatatcaatatatcatattatataacatatatcatctatcttcttctatatattatgaccctcctaacaattattggaatagagagatcgattgattattactacgactcatatcaatagttttctttaggtgtaggagcgcaatttagcaaggtaggcggacaattgctaacatgagccattagatgagggatgatctctttgttctggaacttttgtatcagcgagcaagtgagtctctcgagccacataacctaatcgatatattgtggaaagaaaaagaaaaaaaacctaaccgatataagtgaaataagcatctttaaaacaataggtatgcaactagaggtaataaagatttggacgttgacaggttttgagagaatctacaatccaccaacactaacactaaaacactatatcatgaagaagctaaggtgtagcaggaggtggaggaagaacagttccatctttctctttaacactatccaaactctctgcaggcttatcaacactttcatcttcttcttcttcttcggattcggattcagattcgactatatgcaaattaccaaattcaggtttaaccttctcgtaaaagatatgacacagagtccaatcagtatccacaactgtcaatgggaggctgatttcatccaagaaccaattgcattgtggaggttcttcttcatcgccgatcttattattggattgttcttcttcttccgtctcaatgaaagtaaacgaatgtttgataccgactaattcgccgccattcttttttggatctaacacatcagtttttttactgttgtatccagaggttattagatatccgactagtaacttgaatcttggatttcttgcaga

SEQ ID NO: 10484 - DNA, 965 bp, Arabidopsis thaliana landsberg
aaggcccatcctatgtaagtccactcggtgttggtccagtcattgcatcttcacctggtgaaggtccactcgatgcaggcccgcttggtgcaggaagtctcggtataagtcctctcaatattcgtcgtctcagtataagtccttttggtataagtccatccagtattgattcgcccgttgcaggtacatctattggaggtccacctgatgaaggtgcatctgatggaggtccacccgatgtaggcccatttggtataagtccaccaatcatagatccacctggtgaagatgcatccgatggagatccacccggaaaaattccacttgatatatctccactaggtaaatgtccatctggtgtaagtccactcggtgttggtcctcccggtgttggtccagtcattgcatctccacctggtgaaggtccacttgatgcaggcccacttggtgcaggaagtctcggtataagtcctctcaatattcgtcgtctcggtataagtccttttggtataagtccacccaatatcgatttgcccgttgcaggtacatctattggaggtccacttgatgaaggtgcatctgatggaggtccacccgatgtaggcccatttggtataagtccaccaatcatagatccacctggtgaaggtgcattcgatggagatccacctggaaaacttccacttgatatatctccagtaggtaaaggtccatctggtgtaagtccacccggtgctggtccacccggtgctggtccagtcattgcatctccacctggtgaaagtccactcgatgcaggcccacttggtgcaggaagtctcggtataagtccttttggtataagtccacccaatatcgattggcccgttgcaggtacatcttttggaggtccacctggtgagggtgcatctaatgggggtccactcgttgtaggcccattcgatatgcccgttgtaggtgcttct

SEQ ID NO: 10485 - DNA, 521 bp, Arabidopsis thaliana landsberg
atacgtcctctcggtataagtcctttcggaaaattccatccttatcgatccatcaagtgcacttgcatctgagggaggtccacctgatgaacctgcatctgctgaaggttcacccgatgtaggcatatttggtataagtccaccaatcatagatccacctgttgaaggtgcatccgatggagatccacccgaaaaactttcacttgatatatctccactaggtaaaggtccatctggtgtaagtctactcggtgctggtccacccggtgttggtccagtcattgcatctccacctggtaaaggtccactcgatgcaggcccacttggtgcaggaagtctcggtataagtcctctcaatattcgtcgtctcggtataagtccttctggtataagtccacccaatatcgatttgcctgttgcaggtacatctattgcaggtccacctgatgaaggtgcatctgatggaggtccacccgatgtaggcccatttggtataagtccaccaatcatatatccacctg

SEQ ID NO: 10486 - DNA, 1228 bp, Arabidopsis thaliana landsberg
gtactcatgttgattcacctggtcacgtctatgacaagtattacgatgctggctttgatgttgactcgcttgatcttcaagtcctcaatggtatgatctacaaatccatttttttttttttcatttttgtattatttctcaatttggtgaaggatttggattttgcttgtaggtcttgcgttgttggttgatgttccaaaggataagaacattactggtaagttgcgactttgattgattagattgattgacttcatagttttgtgtgaggtagtgattagaagacagtgatgagtgctaataagaagtttgtgtttaggcgatgatcttgttctttgtattgatttgattgtgtagctgaagtgatgaaatctcttcacattccaaaaggagttagtcgtgtgcttttcagaacattgaacactgacaggtagtattgattctagaacttaccagtaataagcttttgagtttctgaaatgagtgaaaacgtttcaggcgtcttatgttcaagaaagaatttgatacaagctatgtcggattcatgaaggatggtgcgcaatggttggtagacaacacagacatcaaacttgttggtaatgaagatttctgttctccttgtttatatgaagatttgattttttgacttagaattgttggttgtgtattggtgaagtgatctctaagctgagttttggtgtatcaatgtcaaaatatagggattgattatctatcagtagctgcatatgatgatcttattccatcccacctagtattcctaaaagaccgggtaagcaagcattattgtccttaagtcttgctaactagatgaatccaaaacagtgtagatttgatattgatggttgagaaaatcataaaaccttgacaggagactatactcgtggaggggttgaagctggatggtgtgaaggcaggactctactctgtccattgcttacctctaagactggttggagcagaagggtctccaattcgttgcatcctcatcgattgattctctcccatcacaaacctgccaaatccgaaattgtccgtaatcaaaagtttgcttagcttatgaactgatatcagtttgtgctagatttatgcaaccaatatggagattgaagtaggaagaaataagagagatgcacagaagaccaagttgatgataatgaagcaccgaagaaaaaagattcttcatttctatgtatatggcaataaataa

SEQ ID NO: 10487 - DNA, 935 bp, Arabidopsis thaliana landsberg
gaaaacaacaaaataagcattcggtgaaagaacattaaaaagattcgtttatgagttttagctcaaacatggacacgagcctactaagccaaactttccaaatatagaaagtatccatggatttgatataatctatcaaaaaaaaatatcggaaggtggagttcacgcgcttaaatccagcttatagggacgggacacattacgcttacgagaacggcccaatacaaaggctcattatttaggcccattattaaaatgtaaacacaatgaacaacagcccaataagatccatgacaaagacacccacaaagatttagatttcaattagtaaagttagtgatcgtagcgccgggctgagtcgcctgagcttcagccgccggtttcacttccttcgacggctcaacatgttttccggtaagctccacaggtaaatcagcagcaacacctttcaagtagaaagtgtaaaacagcttcgtaggatacacaagctgacgaagcttgacctgtccataagctccttcaaacacgccggagccaccagtaatagcaagaaacgtgtcctcgtaagtgagataaggtccttgaactgatatgtgaccataatctccgaagtagaaactgtaagaagcttcaaagcgatcacctttcttctctggaacatgttggatcaaaacgcagagacctgcggtgattcctatgcgttttgtgagatctcctgtgtagagtttgtttgtgaaggggacaagatctccgagacaaagctgatctggttttttccctagttttaaaaccgctgggctgtttcgatcaccttcgttgaactcgtagacgttaagctcttggatcttagctgagatttttcacaaaataaaaatcagtttttgtgaaatgggtacttgattttgagcacaaaggcaaattcttttttttgttct

SEQ ID NO: 10488 - DNA, 627 bp, Arabidopsis thaliana landsberg
ggtgcactgtcaagagaagagacatgggactttttgatcctagaccctcctaagctagctccgcggaaaaaggtggcgtacagtacctttctttcgttccttgaaaatagtgattgtcatagtttgttgttacataaatgagattgcatcaatgtgggttgccaggttttgcacaacgcttcaggaatgtacagaaatctcaactcgttggcaatgcgattgacaaggagtggctggtcttatgatgacatgctcatgttcaggggcaatgacacagagcgggaagttcttggggatacttcagagtgctgcagcaatgtcaggaaggaagatcacagtggtgcgggaggcaggagctgcgtctgaccacccactcgacccatcttaccctcaaggccaatatctctccaaccttctgcttcgggtgctgtgagcgcacggaagtttggtttgttagttcaacttttttttgtccgtagtttgtaaccatacatagaagacttataaaaggcagatttggggacaaaagtaatatattagactggtttggaacaacaacaacaaagtattatgtgggatttaagctctcaccgaagaaaccattccgcaagcaaggattacatagta

SEQ ID NO: 10489 - DNA, 954 bp, Arabidopsis thaliana landsberg
  unsure (1)..(954): unsure at all n locations
cttaatactggagccagtccttttgccttgacatcacatggatgctgctttcattttgaccgctgacatctttcttccttgttatgtgtgcagcttagtgaacaagaagatctcattgtgtggatgagaaccgcagcattgccaacatttagaaaactttacggaaagatagagtctgacctcgagatgggtgacaccatacacgttaagctgaacaacaactacaacacgtacagcttcaatggaaagaagaaacttgttttgtcaaccactagttggctgggtgggaagaacgatttccttggcattgcttacctgacagttggcgggatctgtttcattttggccctcgcatttaccatcatgtaccttgtgaaacccaggtacgcaaatccttcaaatgtagttgttgtcgtgatggtaaccttctatgcaagacttgtatttcggctaaaccctggttgttttggttgttaaactgtcttatatatcccaatataataataataaaatattcgtgtacatatagccgcagtgtgttatgctgagtaacaaatgtgtacattgtttcaggcgtcttggagatccgtcctacttgtcatggaatagaaatcctggaggtcggtaacaagcttggaaagggagagagagagctctaatctgcgtgtgtaaatcttatccatccatgtacacatacaatgtaatttttgcttacatactatgtnnnnnnnnnnnnnnnnnnnnnnnnnnnnntgagagcttaaatcccacataatactttgttgttgttgtccaaaccagtctaatatattacttttgccccaaatctgccttttataagtcttctatgtatggtacaaactacggacaaaaaaagttgaactacaaccaaacttcgtgcgctacagcaccgaacagaaggttgagagatatggcttgagggagatggcgagt

SEQ ID NO: 10490 - DNA, 1017 bp, Arabidopsis thaliana landsberg
cgaatgtttatatgattaaatcattacaatgtataagacatatcatcaaacttattgcaaatgttgaatatgattaaaccattacaatgtattagatatatatgttatctacttattatgatatagttaaaataatattctcctagtatgttctaaataatttgtaacaaaacttcactaatttatctaataatcaattgtcatatgtttcacatattaaaatggttagttgtacatgtgattttatcccatagacaaagatttatttctatgattgctatactaagacataaattttaagaaaatgttgaaagttgaccaaaaaaaatattaattagttttgtaatccacatacatgtaattacattattttattagattgtaaatttatttcaatacaagaattaatttggatacataataagaaataatttaaaaagtcagcaaaattaaagtatatttatattttttatctgttaagagaaattaaattcattgtaattgcaagattggcttgtttcaaactcttttagagttcagacacattattgattatgattgccataaaattattggcgctagagagaataatataaattgaacaacactgatcttacgaagaaaagccatgtataatatatatttatatcttttaacaaatcatgtttgtttcttacttaccaataatttctgaaacaaagatggataaaagatgatccaactgtgaacctggcgggcggcaaaatgcagacagtcacttcctcttgctgttcccaatactgaggagctcaaggctctggagggtaatgtcacgagcggctctcgttggtgcagcttttgtggctactgaggaggacgaaggagcgaactgggtcctcagagttgtagaagaccgatcattgtttgggatgagtctgcttaatcgattctctgtgaaatcagctgaggaagtggctcgaacacttgacccagcaattgcttttcttgacgaactcaggttcctagataaagagtttg

SEQ ID NO: 10491 - DNA, 1276 bp, Arabidopsis thaliana landsberg
  unsure (1)..(1276): unsure at all n locations
ccctctcctctctttgctttgtgattcttatgatgtatatcctttattcccaggagaatgacttgttatgatctcgatggtctgactttccccgagctgctatcacttaaaagccatctacagactgccttgctcattgtgaaggaccaaacggtgagtaaccaaaatttaaaatcggggaaaaaataagaaataatgcatcttacttctttcttctatcattcaaagcgttaaacaaaccacctttttttttatttattttttaaactgttacagaagaagatagagcagctgcttaaagaagatgatgggtggatgcttatacgggtaaacatttcctaggcacttcatctgccctatgaaattattgtttgtgaatctgctaggagctgctgttcatgttgattcttgtaatatcttccatgtttgaagctttcttacattttttgtagaggaaggacgcagaggatggtatggggagagaggtttctgttccctgcaaattctctaccagcaggttgtctcctccttcctagcttaagtaggaatttttggttctaagttgtagttgtctggtgccccattaaagcctgatttggtcttggtatatctacagcacgggtgagagacaaggtgatgaagcaccagcaccaccgctggtatgtatattaatattctttcacagtcctgcatgcctctctctttaccccacattgtcttgttatacttgtgcatcttttattgcagtcgcaactgcagctacaattcgagagacgaaatgctgaacccatgatgatcgaatacgggagattatggctgttgaaggagtaaatgcgtcgccatcccacttgttgctctctacagagtcgatgtcagtttcactttgtttctgatggtttgtttctttttccttcttttcgtgaaaactgacaggagaatgaacggtagacagctcgacggtatgaacaatgccgagctggccttacttcaagctaagatagtacatggattgcaggagttgcacgagcatatgtatgcaccaacaatggaaaaaatcgctaagaagcgcagatatctgttaagagaggttcccggccggagctgagcgcgagggacgatgaaagctcagaaggccacacccggccatcaaatctttctatgagactcttaagtgacttctggtttctctatttctattntagtttatcgtcaatcctgactttcctcatgtcgggcctctcttagtngatttaatatgtcttaagaaattactatc

SEQ ID NO: 10492 - DNA, 779 bp, Arabidopsis thaliana landsberg
ttttccccggagagagagggaatggcaaaagtgttgttccctctcttttgtttcgaaaaagtgtgaatgaaaagatctttgttatttcaagtgtttttactttgatgaattactaattgcaaagtaacaaaacaatggtgaaaatgcaccaagttatggtcatatgacgttcttttaattaatgaatcatctagtccagcccattgattgtgaactagatggcttattgttatactgtcggtcagattgtgcttttgtgattttatctattggagcgtggagaaacagtttaaagtgggagacaatcttgttttagaatacaacatcgaagacaacgtcgatgtcttagaaatcagcggtcatcgtgaattcagatattgcgaccccacttctccagtagccgtgcacaagacaggcctcgatctcgtcaggctcaccaaaccccggagtccattatttcataagctcaaagccgggtcactgtgcgaacgggcttaagctttgagtagtggtttcaccaatactcagtgttccaaagttgtcacaaggtggtaagtggtaacacactttcagaccccatcatcaaaagcataatgctaccttggtccttggttttcgatttggtttgagatccaatgaaggagtttgtctactaatttacgtactagtttagtaccttgtctcttttctttcattgttaatttgtttagaatatttttagttcttattgtcactaatgtacataattaattcaatagagacgaatattttcttcttag

SEQ ID NO: 10493 - DNA, 703 bp, Arabidopsis thaliana landsberg
ccaaacgggagtgcaccgatacaaactcctccaaaagctgctgttgtttgtatgtatctgttcagttccttctgtaaggttgatgctctgtgtcctggcatcaccatttgccgttcctgtgacatttaattttcagagtcagagatccaacaccatgttaacattcaggttatatacatcaagctgttatgattttattacctttagctgcttagctacatccctagcagaagatccagagacttcaatccatgtctttgagaaaagagcacaagcagtgagcatgaagacgatgtagaacagtgcatggaacgggtgagctgccatgtcagagaaactgcaaccacatagtaacatatattcatcaagctcagttgatgcatgccaattttgaattgattaaaacgaataatgaaagacactgctgcattaccttgctggagctgtgatgaggtaagccagaccactaactggaatagattgtccactgtactcagattctttccattgtcccaaaaggtttacaaagaaatttccgctgaacttccggtagagaagctgttgaccacgaggaaaattcaatgtcaacaatatgttattgtggagatacgtcccatacagtgaagtggaaagaatggctgtacctgagaaatgaagtaaagatttgagacgagggcggattggaggatgataggcatggtag

SEQ ID NO: 10494 - DNA, 2618 bp, Arabidopsis thaliana landsberg
ctttccatgtatttagagatcgtcctttgagtgaaacacccactacttcaattacgattgggaatccattgcaacgtttcaatatctgcaatactcaccatgtgaaaaaagaaaaagatgaatctattgatatagttacagatttcgtagatcacaaatgtatagaggttcatctagatgaatgaaacaacaaccttctggaggagatcttcgtactcatcaggagacgtgttacaaggtcgcgatgcccaatgaatgagaagggctctagcatcatcatcttccaaaggtttcaaacgataattggaatcaaaactcggaaagtcaaaccgagaagtcaccaaaatcttataatttggtaacttaatttgaaatttctgaaggaaagaatccgctccccgccacacatcatccaacaccaacaatataggaccattttctttaagttcctccagcagttttcttaagccaacttctgcttgagaatcattctcaaatgtaagtgcattgtaaccgttgtgctggagtaaattctgtactattaccctgaagttaggagtatttgacacaacattaaagaagatatgcttgaacttccctgccaaaggaaactacatgagaaaccagctcaactattcacgagtaaaaattgaaactttaagacttaatgtggatcaacaatacatacctttgatatctggatcgtcacaaagccgactaaccagcgtggttttcccgcaaccaggaggagcagaaaccacaagagtaaccacagaatcgtcaaggagtctcttctttaactcccccaatggccaatccaatccaacaataaccttatcaagcttgggaaccgaacaaagatccctaaaaacaggcgcaggaacactcaaaaggtccattcttttacttaaaccatcaaccgaattcacaaggtttcccgtcaaacccaacaacgtcaactgattcctatgctgaagaagctgaagatcaatctgacagaacttaagcatatccttattgattctctcaatttttctagtatatttagatttctcgtaccacttgactcttggaaactttctaacagctacatcagctctttcgatcgtatccctaagttcctttagttcctttacaccaaagtcaagctctttttgcatcgaatcaatcttttgagttaacggaaacaatatctccattgttgatacgagatccttggacaagggtttgaaagctttgaacttttttgcttcatcaatcacaactttcaggagcttggaaaacacagctcccccaatagaacctattcccaaactagcccaatcgttcattctttcacttctcagacaaaacccagaatccaaaaaaaaaaaaaaaacttgtttgtagaatcgctgaaaatcgaaaaaggggatcactgaaatatcaatgtgtggttcataaaaatgtagatagacgaaggagacgaattgcataattgcatagcaaagctgtcgcctttgacttctcagactcggtcccttgccgcgcaatgaccaagaaaaaacgactgcgtttgcgtttggtcttttacgttaaccacacgttgttcgatagacggaacgccctctcctcgtacgtgcgagagtatgcctttcttagattgggcctttttcaaagcggcttattcaaattaagcctttatgtttctacggcccaatataacatgcgtatttgaaaagctcataatttaaaatcactagtacactacaatgatacagcgtggttagtaatttcattacagagcgataaactagtatcaaacccgagacatagcatgttgactcttgtaatattattactcgtttagtctagattgtgatcattaaagagtcaataagaatacacaagctacgaaaatgttttttttttcactcaaaacttaaaacgttagaagcaacttcaggttatgctctgtttcctccgtgtgaactctcaaatttctcatttctggcatcaacctttcccacaacaatccagttacttcatcgcatttgacctccagattctctagatacctcactgaatccggcaactcgcatcccgaacacttcctcatcgagatattctccagtttctgtagtttgccaatctcttgaggcaactttctcaatcctaagcaatgagaaatatccagagaccgcaagttgctgagtctctcagttgcttcaggcagctcagagagattcatacaagaacacatcctcaacacttctagtctactcaagttccctatagcttctggaagttgagagagcttgttacagtttgtgatgctaagtgtcttcaatgaaacaacttcggggatccaatatggtaactcatcaagatcatagcagtagtctatgtcaatctcttgtaaattcgatagagctttagagacatctatatcttctgtgtcgtagaaaacctcaccgaaactacacatgaaaaatgatagcttcttgagactgccgagttgcaattgaggaatgtccagcaaagtgactgaaaccttttcaaatctaatccgtttcaggtttggtaatgagctgagacacgagaaattactcaatcttgctggataaaaaccgtgattt

SEQ ID NO: 10495 - DNA, 1176 bp, Arabidopsis thaliana landsberg
gtgttaccacgtgtgatgccaatgccatggggagccgccattgaagagggcttcgactgcattgtcgccagttagtctataagggacttgaccaccaaagatcaacaaaggggccagaccaggaaagttttcaggacctgaactgatggttcttcctctgatttctctgtcgtggctcctttcagctaagcggttcctcataaacacagagaaagcatccatgagatcaaaagtctgatcacgttctacaacacccctgtgggatctaaacatatcaaaggggctggcttgagccatatcaagttcttcaacaaatccacctccgcaataagagcatacaggctcttggccgtgaaggcggacagcacgctgacatctgtgacaccagtgggtatttcgactgcttgacatcctgagcttctcactcttctttccttctgtggacacaaacaagaccacaacaatgcaatgctttccttgaagctcttagaagaagctttagcttatttgacaggtctcagttaaaaacctgcaaaagtgggtataagttagtaatcagttatctacagttttttccaagtaagcaaaccaaagactccaggaaatcccgcttgcctcagtttagtgcacatcagaagattcaattataggtcatacttcaatatatagagaaaaaaatttctaaaacataggttccaactttctttttctaatacattaatagaaagttattgtggtgttttccccaaaacacaaaatattgtttctacaaactcagaacttataatagtacataaagcatatccctcaatcatgaattttcaggcaatacaaagtctagctgctaataaacacacagagactgaacccaaagttttaatctttcgacggaacttgcttatataagccaacacaaaccaacgaaggttcaaataatgatgcaatcaatcaccttgtagctactacaatttctaactgaaaccaatttatggagtgggaaaataaatgagagggtaatgtaacaactcacaactcacaagtaactcaaaattcggaatggcttaatccaaacgaatttcagatgcacgcaagtatcaatttagataggagaagctaaagtccgatcaatgaaacgcttcacaaagcagagcaaaattacctgagaagaaatctaaa

SEQ ID NO: 10496 - DNA, 550 bp, Arabidopsis thaliana landsberg
  unsure (1)..(550): unsure at all n locations
tcaaagaaagttttacctgaacggtggagcttccttggtcatcctggcgcaccttgcgcagcgctgacggaatcagctccccctctggccgatccccatatccactgagatcccttccccagtcccaagccttgctgcgatcaccactgcgtaccctaggcgcccacgacatatcagaaaaccacatgacttattccatcattctccccctaagtcttgtgcgtcgccttgtgggaaagttgagccatcccggacctggaacaaagctcaaagaacttgattctcccaaggggctttgtgagcaggtccgcaagctgatccttggtgttgatgtagcgcgccttgatgctcccttctgtcaaacagtcacggatgaagtggtacctcacccggatgtgcttacttcattcatggaacacggggttcttggccaacgctagggcggactggatgtccaccggagttctattgctcaacgtctctnnnnnnnnnnnnnnnnnnnnnnnnnnnntgccagagcgccatgagttgaattggtggaggccgctat

SEQ ID NO: 10497 - DNA, 1315 bp, Arabidopsis thaliana landsberg
tcggaccgctacgagctatgggaccgtgtggctggttttcagtggcaagacccagcaatccccaccgttgattatcttctctccgatacacgttgcgtcaagaaacagattcgccgtcgagcgatgatctaacccctggtcaaacaataaataaaccaccggttcaacattttgagaaccggacattacatcaaaaaaaatcaataaccggattggtacctgtaaaaaccggcggagaggtcttggcgttccggtagacgccggagtttgctggttagaggaatgtcgccatgaaagccgaccgttgcttccacatatcactttgcaaccggagacgacgagctccaaacaccaaagatctggatccttttgccataaaacgaaaccacccatttcgtcgttgctctttagattaacgcccgaatcatctccttgatgaaactccgacgccgtcatcttcacttgtcccgtgacgcacatgctgttcacggcgtttaacgcctgtggtcctcccgtcgctgctatgtactgctgtacaatgtatttcgccgttgaagcttgctgcaatcgtaattcataagcaaaaaaacaatgaaactgaagttgatgactctgtgtacgatgaataatgtaatgcagacttgcagagtacaacacatggattaacaactttatgttgaatacttacgaagcagggtaatgacttttttgggttttgatcataaaagaaaaaaaaaaaaaaaaaaaagaggaatcatattttcaacatcttcgttatgttttcataaggattgattttgaatgacttacaatggagcaatctttgacgggcttatgaacagagtgaccgacttgaacctggagaggtataagaggcgagccaacgaggtagagaaggaaccggagctcgttgatacgagcggcgataagcggttgcgaccatttatcagacgtttgagctttcatccacgtcatcatattttgccacctaagtgcaacgttgttgcccataccggaaaacatctcctccggtatcggaacttccaacaccgtctccagaccatcgtctttgtctatgttcggacacaggttcctcatacacttcccactccttctattctttctgttcctctgtttctcttttgatctattggtgatcgattgtatgaaacccacaaatggttcgaagattgtcagcactactgtgattcatgaaacctcttttttctttcttctttttttcgtataattgaagattccaaaatttgtttcgtcctcgtttaattttttttaaaggtctttcaatttatatttg

SEQ ID NO: 10498 - DNA, 1155 bp, Arabidopsis thaliana landsberg
tattagttagtttatttaataagacattgtatttttctaatagttagttttaaaatgtatatctgtagtttgttataaagttatataatcttggataaaatataaattatttaatataaagaacaaactcatgtaatacattaatcaagttaaaaatttgaaaacaaaacacaataaaacaatcactttatatacttaaaatttatcgataacacaattaaataattaaaataatgaatacaaaatttatttaaaaaacaaactccgccttacgggcgagccttcttctagtttagaaatatatagaaggttttatgagttgtagataatttatagctattttaactatactgtaaatccgaaaatttgtaaattgatcgtaaactgtttcgcactaaaatagataattacataaaacggattagctcatttgacacttttaacatgatgaattgatgatcctatcaatcggttgttttattaaattttgatgtcgagataacgagaaaaatggttgtggcgtagacgtcttgagactattcaattgtgagatatgaagaaagagcattgacttgatcaaagggacgacaagtttgatccacgtgattagacctttttcttttcttttggaaacaaaaattgagtcacaacgattttgacagcccggtttcttatagtctgactggtgaccggtcgcgccgtcgtttgttcttacttccttggttggccaggcccactcatgtattaatttattattgaaaccattttaagctacgcaccagttttattatataaagctgtatgcatgtcacctcggattaacacgtagtgaaattatgattcaacaaaaaggagacacatgtttatcgattcacacaattttgatggtatgtgttttctttttcttttaaaaatcttacgaccatgacaatgttttttacgaacgattccacgactaacagaaatttacgatagatagttctagctaggtagaccacgtttacatataacaaaattatttttaacatacgaaatcacgagaaacgactttacatgcactatgctataaatttctgataacagtgtctccaaaattacaattctttcacattttctagaattaatcgaacataatggatatatgcatgtaacccc

SEQ ID NO: 10499 - DNA, 659 bp, Arabidopsis thaliana landsberg
acatccccattatataaaaataatgtttttttaatttacagtgtctaaagtttatttcaagagatttttcttttttaagattatgaatcagattagtattttttgttattaacatatatataatttttacaccaattattttgccaaataaataataaagtttttttactccgatgaaaaggataaaattttatcatgaaacgagtcaaaacataattttagataaaagaatagggttttataagctaactcactataaatagcttataaatagttttaactacaagtatgttataaaaccaaaaatttgtaaattgatcgtaaactatgccactgtaaaacggattagctcatttgacacttgtaacatgatgaccaatcaatcagttccttttattaaattttgatgtcgaaatcacgagaaaatggttatgtggcgtaatcgtcttgagactattaaattgtgatatgaagaaagagcattgactagttctcttctgtttgatcaaagggacgaaaagtttgatccaccgctccgtttactgcggcgcgttccacgtgattataccttttctcttttctttttttttcagcttatttattagtattaatttatttttaacaaaatacaaaaacagttggaaacaaaagccgagtca

SEQ ID NO: 10500 - DNA, 1226 bp, Arabidopsis thaliana landsberg
ttattttcattccattggaccagtaatatttgggtggcaatattggtttatttatgtctctccgttttgaaccgttgttttcgattgtgttttaatactttcaaattgtttaaaagagttggactgaagcttgttttttctctcgttatatctcatgcatttttggttttcaagaaatatcaaactttgataagttcttgtatctaatattttcacgctttataagtttatatgttttatgcatctaggtattcgccttgtacattgggtatttccagtaatatctcatctaattatgaaatgaggtttcgctttgtccaaaagaaacatagagtatataattcgtatcttgacagaaaaaattaatgaattgaaaaatataaattacttggtacgacaagaaagaaaacgaatgcggtaaagttaaagaaaaaagtacacttcattagggggcaaaacaaatatcattttctgcttatttcaaaagtttgaaaaattgaaatataagactagattacataagctttattaaataaagtagaggaacgtagaaaaatgaattcaactaacaaggattagctgattcatcgtttagaagaagaagaagaaaaactcaaggaataaacatacatacatttcagttcatgtacatatgaataacaatatcgttttaagtcaaattaataacttgaatgaaataattaaaagacccaaaaaaacataatccgttcggttccaaattggtctcaacaaaagaaaaaccaaactctttttttttttttttttgtgataaataatttcaaagaaagcaaattaagctccggcataagggttaaccttaggcttgcccttgacaagaccacattgaaggcttgtctccggcatgttgtattcgtcccggagagatttttctggtgacaagacgcttgcgtacagttgctgtcccaagtagcgtctttctgcgttctccgacctaatgttccacattccacagttgtcgaatgtgagcaagattgcagcccaacacttggggtagacctggactgtgtgtcggctcactgcatctagaaggttgtagttcttcctcttctctggtgtccatgtccctggctcaacccttttgtacgatgaaagataattaaaattagggtttagagattggttactttttgtacaagcaaaatgatgtaaagtgtgttacttacgctacagcgaagaaggaatag

SEQ ID NO: 10501 - DNA, 1309 bp, Arabidopsis thaliana landsberg
taacaaaggtagtattacaacattttacttcattttcagttacttgttttaaattttttttaccttacaagcaatattgtaagactgacttgcaatctattctctgtttcctccaggctggtgttagtggaggtggtagtttacctatgcatgttgacaagttttttgaggttagaccgccaatattgtttcttgaaattaaaaataaatgtttttttttgcattcaaacaaagtagtctgtccatatgtaaacaggttagttctttatgcaggccatcggtgtgaatgtacaaaatgggtatggtttgacagaaacctcaccggttgtctctgcgcgaaggcttaggtgtaacgtaagtttaaactcacacctcaataacctctccttttgtgacctctgcacagaaaaactgtttagatcctttttgtaccatttattgtggggagcgaactgtttagatcttattcatcaattttcctaactttttttatgaaggttcttggctcagttgggcatcctattaaagatacagagttcaaaattgtagatcatgagactggtactgttcttccacctggttcaaagggcattgtcaaagtcagaggcccaccggtgatgaaaggttactacaaggtgatacacactttctgctcttagtttgattacattttgacgacaaagttgtgaaaggatgacacagctgtttttagctatcaaattttctgtccatgagtgggtttgtttgtgaatactgcccttatatataactagattatgtgaactcttttccttcttggtctcatcattaaagcatctcttggaatctacatttcttgcaatctatttcccttttgatacatatgtagactccttgaataatctctgtgttttcgatgaatgcttttagtttggtgattagatcagattaactcatctttctgttgattatctcagaatccactggccaccaagcaggttatagatgacgatggatggttcaatactggagatatgggttggattactcctcagcactcaacaggacggagtcgtagctgtggaggtgtcatcgttcttgaagggcgtgccaaggacactatcgtgctttccacaggtatatcacatttgtactgtttgttgtcagcgtccacataaaccagttcctcggaaacctgaaacaaaattatgtttcctactgtctgtatgataagcatacattttaaacactacaagtcttaacaacaaaatgtgcctctcaagttaaagatgaatccaagtgaattgtaaccgcctttgctgcacaaata

SEQ ID NO: 10502 - DNA, 1245 bp, Arabidopsis thaliana landsberg
cccctcgccaatgcctaccgtgtttgttgatcgatccttttctcacaattcgatctgatactctatgaactgttgcgttatctgaattcgattctagaagaaacggtgcccaatagaactcaatcgttgcattgtaatcctacataaacataccacatgaatctataagaatcctaaccaagccaacagttttcacatctaagcttaatctttgtcatcctcatactcagatctctatgaattgtaacatcagattctacaaagcaacttcaatggcttccgcaagactttctaaatctgaaccaaacttaccttgagagagaagacggtgagtgatccgaaagtatccatggatttggagttctctgggatttgtgaatgaagaagacagatgagagaaacatacattcctctgttcaacgaatctccaacgaacatcatcttcttccctcttaagctctccaacatcaccgtcgcattaaacctattaacacattcaacaaccacagagcaaatccgatctgaagatcaatcaccgaatcgcattcaaaatcgaacggagagagagactaacgaaggaagtgagcaggaatcaggtcgccatctccatgactgataatcactatcgggacggccatgcgtgcggcaagtgagctgcggctgaatgtacggacactcggattctctgtaaagtggacgcgttgaccagtctttgacccaattccctttgaagacatcgcatccttccggcgttttacctactgcaaaagcaggtggcggaggagatggcggtggaggagatggtggtggaggagacggtggtggaggagaaggcggaggaggagatgttggtggaggcggaggaggttcgtcaactacaacgacgattgcggattggtggacgatcgtcggagagtgaagagatcgacgagagaaagagatgaaatcgtggccgtagatgaaggcggcgagtaagatgaaagcgagtacggtgaagaagaagtgtgtgagacggcgttttctacggttagacggtgaaaacaacgccgttgtcatatttttttttttcttttattataacgtttacctttttttttctttttcctttttacgcctttctctttttatggtgtagtaatgacaaaatttggtttgattaaaactttaatttggagtatactgaattattatagtatatgattttaatgtttataagcaaagctataatttattgtactatgcgcg

SEQ ID NO: 10503 - DNA, 616 bp, Arabidopsis thaliana landsberg
  unsure (1)..(616): unsure at all n locations
gcatggatattcgattcttttgcagatgtttccgaagtcgacacatgaaacatttgctcagaagctgtatcaatcgttcaaaaacaataagcggttcaccaaaccaaagctatctcggaccagctttgcaatatcgcattatgctggagaggtataacatctttcacatgcttatgataagtttagatatgttcctgttaacattctctcttttctgctgaaacaggtaacatatcaggctgacttgttccttgataagaataaagattacgtggtggcagaacatcaggatcttttgattgcttccagtgatacttttgtagctggtctatttcctcgcctaccagaagaaacatcaagtaaaaccaaattttcttccatcgggtcacgctttaaggtatgcttttttttcttccttagactgctatgctattattctcctttacaatgaatatttaaggaactaggattttcctcttagacagataatgatggatagtctgtatacagtggcctcatctcttacatttgggtcnnnnnnnnnnnnnnnnnnnnnnnnnnnnnnnnnnnnnnnnnnnnnngacatcattaacttggttctttattcacattgact

SEQ ID NO: 10504 - DNA, 162 bp, Arabidopsis thaliana landsberg
gactctctgacatcatggatgctagaataagagatgatagcaaaccggaacaagtgatggcagtagcaaatctggcaatgaagtgtttgagttctagaggaaggaatcgtcctaatattatagacctttttctttcttctatttttatcttttcctcttctc

SEQ ID NO: 10505 - DNA, 1449 bp, Arabidopsis thaliana landsberg
acaagagtcaaggttctggaacaaccacacctgcattgtatagtgctcaatatgaataaccaagttcagaccaagaaatcaacccatatcgatgaattgaatcagaaactgagaaccaattgctaaattacatacgtttaatgccaaaatgcccaattcaattccaatcaattagagaaactaatgctacactgagaaactgaataaaaaattgtactttaacacgagatgtgaacttaagagagaaactgtgcaattagggattctaccttacccaataagaacctaaaccggaattcgttttcaacaattctagtttcttgtctatacaacagtaatcagaaaaaaggggaaaacttttaaaccactagatagcgaaatcgaaagaatcaataagaacacaagagagtttacaagttgggtttaccaccatggatggtctggatcaaagccgccatttttaaactggtaacgaatttgcctctgtttttctttgccgtaaatccttatccaccatcactcattatccattcgttatgactcatccgaacacactagaccgcatcgccgaataccggacttcggttaaataatttggtaccggttaagcaatttggattagtgtgacgactaattaatggtacagctctgtcatcgtcaaattcaagttcagaaattctagaatttcaaaagattgatttactgtgataaccaaagatgaatttacaaagtaaatttgttcttaccgtaagtgtcgcaaattgttttggagataacatgagttggaatctccgacgaacatcattctttggtgaaaaaagattacaaagaacggttctctaatgtacagacgtcaagctagtgaaaagcttagaatcgataaaaacataaacatgtgattcaagttgtagtctctctattcttaattctatgtcagagagattaacctccgtaagaccgtttaaccatagcatctccaatcttcttcaactttggattatacatatgtttttcaagattgggatgatgtttctccaatatgatcttcagcacgctgagacagtaaatgtttcgcatattagcaatgagcaaaatttagtgtgactaacatacaacgaaacgcagaatggcagtaaggcaaaatatggatttgactgttcaaccatcatcaaaagtcatgaaactgaccagaaacccaatgcatgttaagagaatatggcaaatatgaaagatgttgattgattgatacaacgaatatgtcacagagtttccatagccacaagatgcaattgcaaggtagtgtatacacaactataaacaaacaatcctaaacaaatggtatttcaggtgttaacagattaaaaactactgaccgcatgagaagttatccaaggaggtggaggccaaaacagcttagcatattcagggagtttttgcactagctctatt

SEQ ID NO: 10506 - DNA, 432 bp, Arabidopsis thaliana landsberg
  unsure (1)..(432): unsure at all n locations
tggtcaggggaagaagccgcggctttagctcgtttcctcgacgtcctctccgtcttgcccggctgattcttcggctcagctaatatggcttctagtttggcgtctacggcagcttgaataggaccatattcgccggtatcagacggagatgaaccggtttggtaccggagggcggggaagttaagccgagccgagtcaccacgaagcttgaacgcggcacgatcataagccaacgcggcttcttcagccgtgtcgaatgttccgagccaaagtcgggttcgattcctgggtaaacggatctccgcgacccattttccccnnnnnnnnnnnnnnnnnnnnnnnnnnnnnnnngcccgttttgaaaccgaaccccgaactcgacccggntgggtcataaaacccgggtggctcggctcaatgaagttaagcatg

SEQ ID NO: 10507 - DNA, 1453 bp, Arabidopsis thaliana landsberg
  unsure (1)..(1453): unsure at all n locations
atattagtgtatgacgaaaattcagagaaaatctttgggatattacacacagacataagacataactctggctctaagataatttatgtcatttctaaatcaactgcaagtatattcacaccgaagtccctaactttaaaatcattactcgttcctgcattgctctccaaagggtggcagaagaagagccaatcttgccttgtacctcgcgattctctttaaccgttcttctctcaatctgcaaacaaaacaaaccacacaattttgttcaaaacaaaaaatattcaatcttcaaccatcgaacttagctttgatgatatgttgtgggactcaccgagcgcggaccttcttagctcggtctatatgtcttttcaaaagatcagattctgacaaatgtttcacagattcctcgtcctgaagctcatcaagagagttgaagtaaataatcaaacttagctttacccttcacaattaccattttagaaagaaatcagagaaacacgagacctctttgtcttcttcgcaaattgcttcttcaactaaatcttttggcaaacttgtctccgtcttgtccacaggtaaaggctttggcaaacatgtcatcatatcaattcgctgcggctgtaaacaacgtcattaatcttccaaagatatcaagaatagatatacaaaaatccaagtgttgcattatactacaaagcagaaataagaaatggatacgaaccttaattccctcatgagcaccatttctcaaccaagatcgacacagcgagtataaagaagctccctcggttattctaacctgcagaacaaataaaaagtatttaaaattcctcaaatggcgaagcaagcggtttcgaacgataatgcaaaaccaaaaaacaaggataaaactatacctttctttttctaacgaggaccagagcatcatcccggctcctaaacaccatggaaacgaaacagagacattattaagtttctagagtagtttctaattaacaaagcataatggcaaagaagataaagtacctggccttcttatgcccactgttgtctagaattgaagttggagaaggagtagcctaacaatcaaaaatccaaaatttacaaaatgtaacctcacacaaatatctaacagaagtttcaacctttcctaattcattagagattgctattcgaattctacaatcaccaaagcaaataatcttcacttcaacatacacattttcactaactagcacaagctacaagcaaaaacacttgacaaaactatggaattaaacaaaaagattcaaacttgttttggtaacgaaaacgataactaacccgaggttgcaaaaaatgaagaactcctttcatatgacccggaccaagttgaggagattgttgattctgaggatgtgcagctctcatgaactgatncattggatccaaattcgacacgaaatgggca

SEQ ID NO: 10508 - DNA, 1311 bp, Arabidopsis thaliana landsberg
  unsure (1)..(1311): unsure at all n locations
gagctagagattgctcaagagcttggggagattatatctttggactttcatgatgccacttctacacagattgcttatatccgagttagagttcgttttggtnnnnnnnnnnnnnnnnnnttctttcagagaatcacctttgagtcaggagaaacggctttaattcggtttcagtatgagagactcaggcgcatctgtagttgttttaggtttacccataacttgaactattatccttatcgccaacgttttcagagcattgacagggaaagagctgttttcagagatagtgttttgaggtcaagctttaactctcaatctcagatgactgatagctctcttcaggttcctttacatccacctccacgagtgccaacacctccactgaatccacaagaattggcagcagctactccatactttcccattttaagatatttagctttccaagctttcacaattccgactacttaagttgatattggacgtcaacagattttccctgactctaacatcagtccatcctctggagatgcgattacttctggaataatgcgagtccttgaggtgggtgaatcatcaagaggtgttcaagatggggaatctcacaataacatgaatcttggggagtcatctaagaggaagaacttggtcattcttcagcgtgataaggagtcaagacaacacaaacaacaagaaactgagcaaagaatgggaggtattctgaaacctcctaagaaacgttaatcactatgctcattctgtcacattttttggtttaaggctgctatggtttcatggctgcagcctcagtttcaggtttgaataacaactcagatatggtctctgcatcactttttggagttcggaatgacatatctgttttggtctgctgttttactttcaccttttgttccatcttttgttctacaacatggatacttatgtgttaactttggtctatccatagttgttagttagtagtttaaaagttctgttatgatttaagtttcacatgttgttgtctgaaggttgtaagtggatgtttccacacatgtactttgatagactatcgtttcaaagaatgaccacactttcttttactcattaccgttgcttttcaattataactgacttagccaaagatacaatagtggaacaatccacctttatgcttcagtctgcactttaaacataaaacaacattgtaaaacccaacaagccgattccatgttgcagatcttaatttttgaaactgaaactggaactaccaaacactgcccatgtgtccagttccaaaaaggagcacat

SEQ ID NO: 10509 - DNA, 565 bp, Arabidopsis thaliana landsberg
cgtaaaagaagatttatcgaaaataatgccacattcaagtattatttgatacacttctagtaaatttttttttttctcataagtgttgtcattcattgaaactaaagtatgtcaaagtacatgtgtggaaacatccacttacaatcttcagacaacaacatgtgaaacttaaaacataacagaacttttaaactgcagactaacaactatggataaaccaaagttaacacagaggtatccatgttgcagaacaaaagctgaaataaaagctgaaactaaaacaacataccaaagcagatatgtcatttcgaactccaaaaagtgatacagagaccatatatgagttgttattcaaacctgaaactgaggctgccaacatgaaatcatggcaaccttaaaccaaaaaatgtgacaaaatgagcagagttcttaacgtttcttacgaggtttgagaataccttccattctttgctcagtttcttggtggttgtgttgtcttgatttcttatctcgctgaagaatgatcaagttcttcctcttagaagactccccaagatgcatgtta

SEQ ID NO: 10510 - DNA, 1102 bp, Arabidopsis thaliana landsberg
ccataaaagacatctttatgcttttccttaaaaaaaaaaaggacttcccaccaacaaccaaaaaaaagaataaaaagatttggatcggagatccggagctgtgacttgtgagctaactaccacgggccacgtgattacacctttaatataatactgtcttctctatctggcagtggtagctgagctcatcttatttgtttcttccctcccatttaatggtttcctcttaaaccattcccttcccttcctcctaactgcaatctactctccacctaacattgctccgttttgactcgctcgactcggctaagtgaccacaggttcgttttcctatttctctaacttttcattggagatttccatgactcagatccgtgttttttttcgaatccgatccggttaatctcaaacaaaacttgtcgatccggtttgggttttagggcctatagaggggatagtgatgagtcgatagtggaatgatttcgtttctacaaagactgagatcttaagtaatatggaattctgtaatgcagtggttgagatttgcagtagtgggtccctggtttcgatcccaaatcgttatcttttaatccagaacaactggaataaagaaacaaagcttcttcttgtttgattcagttctcgatcatggtttgattaaatgaatcaactttattaaagttgtgttagcttgaaaagggagaaactttttgttggtgtgtaaccgatgatctgtttgatctgtttcagtgtttgcttttttcatgtcaatattttattcacgacttctaaatttcacctttttctgattctcagttcctttcgagccaataaaatggctacgggacagctattttcacgcaacacacaagcgttgttctacaattataagcagcttcccattcagcgtatgcttgattttgatttcctctgtggtgagtgtatcttcttttgtatctttcttaatgtcttaatcagttattctctggatttacttcactattaaatttggtttctttaattatcttaactctttacagggcgagaaactccttctgttgctggtatcataaacccaggttccgagggattccaaaagcta

SEQ ID NO: 10511 - DNA, 516 bp, Arabidopsis thaliana landsberg
  unsure (1)..(516): unsure at all n locations
cattcactagacaaaaatttcaaatgaataatgatgtgatttgatgtgtgattaaccctagggtagagtgcttaaccctaaataagggcttatggatataagtgaagcccaaataagttaaaatctcaaaagacatgagaaatgatcataaggtatcacatttgatggactttagtggcacataaaccctagagaactcaaaaccctaaaaagaaccctagaaaatcctaaattggaaccctaggggggtaactgtaaattctaggcacttttggaccaaagtgaaaatatcaaagtaaaagagcacctcaaacccactatttttcatattgaagggtttacaagtggaatagtggaatttggacctatttgcaaaaagcaccacataaaccatatatccctaagtctgaaatctagtgaatatggtcaactntggagctttatatctccaaatctacaagagttntgcttgaggtcaatacatcacatctgtagagctaaaataggagtacaact

SEQ ID NO: 10512 - DNA, 1731 bp, Arabidopsis thaliana landsberg
gtgaagcctgctgaaaggccaaacctccccatagaatgagactaagacattcatttacataccaacacattcacacttaataattaagaaagcagagttgagaacagtaccgatattttgtcactaatcttgtccctttctgcatcagtcatctcacggaatgattttccttcaatgagagtaggctcggagagatctgcatctgaacttagtattccacattccaaggcaatagccctggcagtttggacgttgtcaccagtaaccatacggacctgaacatcaacaaatatcatgaagtaatcatgcagcattaattagcaggctaaacaataaatttctgtcacttgtcttttctgtttttctgtaaaaaaaataaatcgaacaaaagaagtaccttgacaccagcattttgacacaacacaactgaatctttgactcctggtctacatggatcctgtgcacatttcaaacatttcgataaaaaaatataccaagaatattgcaggacatgacatgcgggttaatgtctgatctataagaaaaatgtgtctatagtggagtactatgcaatgtgaaacggtaaattgaaagtgatctcataagacgagagacacaataaaactaaagcaaaatgccaaaatgtacataaacgaacaaaccaaatcgatcctcacctttatgcccactatagctaataatataagatcatcctctgggagtacccactttgagagctcttcgcctgttgggaccttttcagcctcataggttctaaaggcgagtgcaacacatcgtaaggttcttccagccatatcattaatgccattcttgaaaaacgatgcctggtaaaatcaaagaaaatcgagtgagctgagggtaaaatcaaagaaaatcgagtgagctgagcatcatgacagcccaaaggctaatcacagattcgaacaaatacagctgagtttagaggttaataaattagacttttcacaaaccttgtcgtcagtcattggtgccacattaccatcctcatcgatgtagcttcggcatgatgccaggacaatttcagaagctcctttccagtgaacatgaacttcaccatcagcctgaaagaaatatgggggggaaaacgtcaaaaaaaaagaaaagaaactgaactgtgcttatagagtctgcatagatattatttcgactatagtagaccttcacgcttatatctttcatgcaaccttaaaaaatagagtataaaaattcgtaagcaaatacagggctcaagaaactggtttatttaccgtttttacagcaacaccaccacgtttcttctctgagttaaatggaaaagcatgaagaatagaagactgcgatcgggctgtctcgaaattcattcccagctgaaagagaaaaatcattctttaactcaaacgtataaaatttcgaactagaaaacgagaaagagtcaaaaattaaaccttaactccccagccaagaatggccttttctgttggtgaaccagagtactctaaatcacctccaccctgtcagcaaataaaatgcgatgagtcttgtcttctcaaccaagaagcaatgttaaggaacttatctagaaagtctgatccttcagtcagaattgcaaagcttaaaaacttacctctgggacaaaaatactaccagttgtgttttgagatattccttcaactactagcgaagtgatagttgctggcaattgttcagtat

SEQ ID NO: 10513 - DNA, 1320 bp, Arabidopsis thaliana landsberg
catcaccactaacaaataaaaaattctcaggcttaagatcacggggcattacacctaaagaatgacaagctcctataacaccaacaatgatcctagcaagctcagcagctaaggtctcagtataatgccctctctgtataatcctatcaaataactctccacctgcacaaatctccatcacaacatgaacagctactgcatcttcatacgcaccaacgatctgaatcacgttcggatgaccagacaaatgatgcattatctgaatctctcttctcacatcttcaacatcctcaggtgttgttaatttcctcttagctatcgtataacaagcgaactctttacctgtcttcttatccacgcaaagaaacgttgttccaaattgtccttgacctaattttctcccaacactgtatatatctttgagattctctgtttttctcccaagaactgagtctatttgtagacctgcgcttgccatacgtttcatgtgcgcttctttcttctgcggtttcgaattcggatcttctttgttctctgtgataggttttggtggtggttcttcgttggccattttcaccgaaggtggtggtgtgctcggtgttggcaacgtggatggtgctggatccacggtggaggaaacgtgaccgttactgtcgtcgccattaacgcttttatcgttcttttttcgactgctctcgtccttgctgctcttaatgctatcgtctggtttctgattccgccacacggcagcactaacggattgaaggaatccattagggttcagattcggacccacgcatgtgtttcccattcaaaaaatttaacctaaaatcacaaaacctaattttgcttctttttttttcttctctctgtttgagattatctattacttctccgacaatgaaaacacgaaccactcattagcgtcatcaacgtgaatgatgaatccatatagaatattgctgtgtcttcaaaatcgacacagctcggtgaaaacctgagataatgaattgaccacctaagtcgctcgcaagcaaccttgttctgcacgttttccggatacaaaatggtcgagaaacgtcttggaattgtaaaatgtggctaaatgatttgattcggagaagatctgatgagctgatgatcagaggaggggaagaaggaacgagagagaacaaggaaaggactatgccattgccgtccatttttacgagaaaatatggaaagtttttttacagagcccaattttagactaggactcacttttatcaaaaacaatttctttttgtcttttaatttttaacaattaattaatttttttga

SEQ ID NO: 10514 - DNA, 999 bp, Arabidopsis thaliana landsberg
tattggatagacaaagaatggatttaggggggttttgctctttttaccggattgcaattgtattttggtttgtcaaacattttttgttttaaatagttgttgaaatctagtttaaattttggagaaatctgcgtgacatataagattagaatatatttgaaatattttttgtttgttaatcaatttattactaaaaaaaacaataattaaaagtcagtgacagccattgtaaataagtgccaactacaagatttatttcataaaatatctgcaaaaatatatatgcagattttatacaaaaataattgacaaaaggcaataaaatagaattgatcagctgtaaaagaaaataatcagaaaacagaaaacacataaaaatcaaacctaaaatatgacttataaagtttcatttttaatcaactataaaaccaagtatgttctgacaactccttagtaaaaacttataatttcgtaaaaacaataaaaccgtaccgaaatctggcttaaatattttaaaattttattcaaccaaatcaacatattgtaaatatagtaaaagaaacaaggagaaatggatataaatttattaaaataaaaagcagcactacgtggaacgtacggctgttattttatataccatcggaaaaagtcacatttgagaatgtcgtaagtcccgacacgtgactagcacggcaggtctaccgtagataagcgtagacctcagcacaccgtaccacataataaaccacactcaaactcagtccgaggttgacccatttaccaaacaaaacagagaatcgcagagcaaactatagactacacaaaacacttccgtcaccggcgaatttactcaggcggtaatctcaccggacatgtaattctctctttccctttctcgcaatttattattctgtttgtcaccgagagagtctacgcaaagtcttctgcggaggatttgcttacgggatttagagttttcctgtagtctgattcatgtac

SEQ ID NO: 10515 - DNA, 1251 bp, Arabidopsis thaliana landsberg
tcaatctcatgctagtggaccgcatgtttcatcaatgatgcctgagtattgaagcgcttctctccttcttacccaaagagaacatatgggatgttgaaggaagagttcaaggtgtctctctgaatgattctcggtttcagtttttctttgagactgaagcggatctaaagaaggtcctgaataaacgcccatgtcatttcggtaaatggtcttttgctcatgagagatgggaacctaatcttggagatgctttcccaaactcaatgacgttttggaccagaacggaaggaatacctccagaattttgggaagagcagatcttaacaataaagtggccactctagaagatctgtttctccagctagtgatagaagaataaaggggaatatctaattcattccgagatactcgttacgctggtaatagacagtaccatcagaggtcccctccccctcctctccgttatcaagttccccgtaactaacatttctctcgggccaccaacggtacaagacgtccttctggatccggtaatgttaaagagagaattgttgaggatgggagaaaacgtcgatttgaggaatccttttcccaagataagaatggtgaaccctctaataaagatcgttattaccattcccgttttaaacctacctcttcacatcgttccagagagaaacaaggaatggaactgaacagttcacacttatctgactctcaacttacaacctcgaagcctcttgttgcttcctcaagagccaagcaaggaaattcatcccctgctcttgtgcgagaaagactgtttcgcttgaacttgtcaaaaaaggccattctctcggatgaagacaagggcaaggagattgatttacatagtcatccccagtgatttcttctgaaacttgaagctctgcaaataaatccttgacttttgacagccttaatccacgagaggatgacccatctctgcaacacatctcggctctgtggctctgtgttctcaattgcaggagagaaagagttcgtacgagacgaacttggtcgatgaagcagcagatctagacgaagatgaggacactcctgaagaaaaccctgaatctgagtctgcaaattctctggcggtgaagtctctctaaatcaataaactttactagtcctgcaaatctttctaacctcccagtgacgataacggcgactcacgacgctgaggatggttgggttgataaccaccatttgatgtcggaggcccttaat

SEQ ID NO: 10516 - DNA, 250 bp, Arabidopsis thaliana landsberg
gggagccctggaccatggtcagagatccgggtcatgagtacaggggtccggcgcttcttgaggaggtctggtcctactgatggtatcctggagtataccaccttttccggccacgcggcggccccggagctgcccatgcggaaaggttgggtgctgtttaccgcgcgactagagttagctgcgcgggcaccgtgtctttaatgctgtagtaaggggtacccctgattcaaggtaccgacagtggcccccg

SEQ ID NO: 10517 - DNA, 794 bp, Arabidopsis thaliana landsberg
ttctttgttttgcagaatttttgaaatctaggattaatttgttgatagatcgggaaattaccagaaggtttgaatccaccgtcttggaacatgcttcagtttcacggtagtcatctcgcactcgtcgccaaaaccggactcgtcaccggaatcgtctccctcacggtatagtttttttattcttttcaaacgcaacttttacgtgagaaataaatttatcacattttcgtaatacaaaacagcttttatttttccataaaaaacctttttattgtctatgcaaaaaaaaaagaaaaaaaaagtagagattgaaataatcctcacacctaactagctattacttgaacaggaaggaatcgcagtgggaagaacatttgcagcgctaaagaactaccacgtagatggaaacaaagagatgatcgccattggtctgatgaacgtagtaggctctgccacatcttgctacgtcacaaccggagcattctctagatcagcggtcaacaacaacgcgggagctaaaaccgcggtttcaaacattgttatgtcggtcactgttatggttacgcttctcttcctaatgccgcttttcgaatacactcccaatgtggtcctcggtgccatcattgtgaccgcggtcattggtctcatcgaccttcccgcggcctgtcacatatggaagatcgataaatttgatttcttggtgatgctttgcgcgttctttggtgtcattttcctatccgttcaaaacggtctagccattgcggtggggctatcgttgttcaagatattgatgc

SEQ ID NO: 10518 - DNA, 1056 bp, Arabidopsis thaliana landsberg
cgccggacagtccggatatgttgcggaccatccgccatcttacgtcggaccgtccggatacatgaaccgaccgatgtattacgccggaccatctgactctacacgagtccacgcgcagactgcccaagtcgcgccatacatgaccgatccgtccgggtacagccctggaccatttggcccgatcgcggaccgtccagttctttacgactgatggtctgggtacgagactacccacgtagcaccatatacggctggacaatccggatataccttcggaccgtttggctaggtcgcggaccattcgacctcttacgccggaccgtccggatatgcgtatgcagagccaagagctacgcaatacgcacagtttccacattcatcgcagcaacattatggtgccccaccagcaacacattataatcatgccataccacctcatggacatagggctgaatactattcggccacaagagagcctgaggggtatagggcaggagctggtgacattaataggacacctaacgcacacctcaaacatacctaggaggaaagccgacagagtaatgtcaggcaacctgaaatctccacccacaaactcaatggatggtcgccagacatggcagagagggtcagagacgaggtagccgggatgttcagggacaaactcggtgttagtgtgtcaggtacagggcaatcgtatcggaagccttatagccaccgattcgacaccgtgccatacccacagggaactagaataccagacttctctaagttttctggtgaaagtgggaaaagcacacacgaacatataagccaattcatagcacacttgggagaattggctgatggggaagcttactgcgttcgtttattctcgttgtcccttactgatactgcatttgcatggtacgcagctttgccaccaaactctattaactcttgggaagaattagagcagaaatttcatgaacacttcttctcaggagaacatgagttagaattggctgacttagcttcagtcagacaggggccatgaagaatcggttaatgactata

SEQ ID NO: 10519 - DNA, 1043 bp, Arabidopsis thaliana landsberg
tcggctataaatgggtcaccctggacccagccatcatatggtatgccgatgcacgctttcgtgtcaccatcacagccgcaaccactaggcatgcgacaggtactggacgcgatcggaccgtccaagcatcatctcagacagtcggttataccgcggaccgtccggcgtatttcgccggaccgtccgaccagatgtaggcccgcacacaaaacactcaggtcgcaccgtacatggccggaccatcagggtacaaccctgaacacttcggccccatcacggaccgtccggtacatcacgccggaccgtccggatatgttgcggactgtccgccgtcgtacgccggaccgtccagatatggcatgaaccgaccaacgtattacgctggaccatccgactctacacgagtccacgcgcagactgcccaagtcgcgccatatatggtcgatccgtccgggtacagccctggaccattcggcccgatcacggaccgtccagttctttatgacagacggtctgggtatgagactacccaggtagcaccatatacggctggacaatctggatatacttcggaccatttggccaggtcacggaccatccgccttttacgccggaccgtctggatatgcgtacgcagagccgagacgtgcgcagtacgcacaatttccacattcatcgcaacaacattatgtgccccaccagcaacacattataatcataccataccacctcatggacatagggctgaatactgttcggccacaagagagcctgagaggtatagggcaggagctggtgacattaataggacacctaacacacacatcaaacatccctgggaggaaagtcgacagagtgatgtcaggcaacctgagatttccacccacaaactcaatggatggtcgccagacatggcggagaggatcagagacgaggtagccgggatgttcagggacaaactcggtgttagtgtgtcaggtacaggacaatcgtatcggaagccttatagccaccgattcgacaccgtgtcgtatccacaggga

SEQ ID NO: 10520 - DNA, 431 bp, Arabidopsis thaliana landsberg
tcgggtatagccatggaccattcggcctgatcgcggaccgtctagccctttacgacggacggtccgggtacaagactacctaggcagcaccatatacggctggacagtcctgatataccttagaaccgttcggcccggtcgcgaaccgtccgaccccttactgcgggaccgtctgggtatgcatatgcagaaccaagagctgcacaatacacacagtccccacactcaccacaacaacattatggtgccccaccagcaacacattataaccatgccataccacctcatggacacagggcttaatactgttcgggcactagagagcctgagaggtatagggcaggagctgatgacattaataggacacctaacacacacctcagacgtccctgggatgaaagcggacagagtgatgtcaggcaacatgagat

SEQ ID NO: 10521 - DNA, 1078 bp, Arabidopsis thaliana landsberg
tgagattagagacagtttaacttcttctttttggcagtcacattaactattattactttttaattacttaagctagttaaccttaggcggatcagctcctagccttagctcaagatccaactcctcatgatggccgttgatctcggaaattccaatgaccaaccctaacatcattggaaatcttgacacatccgtctttgccctcttccatgacgaagatgatccgttgattagttgcttcttccgaggatcaaactcagtactcagtagaccgaccgataagtcagtcttgacttcaccattgtcatgttcatatcttttcatagaactttctaaaacgttgttattacaaacatcacttatctccctcttggttccgttaggctttcttgtttcttcttgaacaagaacctttgatcccacatcaagaacttgttgttgacgatcacattcaggaggtgtggcttggtcagttgatgaaggtgataatgattgttgtttgagtcgagctcggtctcttcgatgaacgttcatatgaccgcctagtgcttgcgccgacttgaactctctcccgcaaaagctgcatgagtaagacctcggtggccacatgcaaccacctccgccgccatactcctcagctgacgcaaacgctctctcttccctaaacggccaaaataaagtcccatccgaagatggcctcgtcaccatcggtctaagcttcatcgacatcaagcattctcctctatccatcatatgtaagatttttctatgcagtagaagaagttaaggtgagtgttttttttgtgtttatttatgtgggagtagtgaagtatgtagatttagacgcacgtagacttatataaagagagacgcatatagatagaggtatgtgtgtgtgtgtgtgtatatgactatatggttaaagcattgaatgtgagaaagcaacgtggagaaccatgagtaaatagggagaggctttgatggggaaaggtctcttttacttaagttactcggatggcttcactctatacatggtaaatgtttagatataaatattaggtggtgtgagctttggttt

SEQ ID NO: 10522 - DNA, 282 bp, Arabidopsis thaliana landsberg
  unsure (1)..(282): unsure at all n locations
aggcctgtctcttattactcttccatgatttttctctatattcctcacacaaaacattcattctttttcttggtatcnnnnnnnnnnnnnnnnnnnnnnnnnnnnnnnnnnnnngtttatgggttgatttgatttggttcggtgtggtttatttttggttattaaaactggtccaaccaaaccaattttaaagttagccaaaccgctttactttccaaaaccctaaattttcgtttgggtttttctcccaagttaccttaaagttaacccgaacagatttac

SEQ ID NO: 10523 - DNA, 1263 bp, Arabidopsis thaliana landsberg
agaagaagcatatattcatatgtattttcatatacttaatatttaatactattattgcatatgcgtgcgtgtggtgttgtcactgtagaccttttgttagagcaaatggggtttagccggttaggtatgtatgggtttggtatggtcaaatatgcacttttatataggaatattcatgacaaagtttaaatagtttttaactaacctaacctatatacgaacacaactacaatgaaaatgatagaaccaccatatattttgatgtgaatataccttagcataatcatctttcaccctagtggccttcgtttttcaaccaacgaaaatttatactaatggattgtggctattactcaagtgactttttttatagatgcactcaaaaagttatagattattctattgtaatcactttggtgataaatgaaattagttactaatttagtattattttaataaaatatttatttgtatacgaaactacaacaatagatatatttttatttggtggaatccttggttctcttggtaattatcttggattccaaagtccaacacttaccggtttaatttgactatgttttaaccttttactgataagttgctcttggcaatcacaaaatgggctttgcctttggtcgttttggcaaagatattccttctggctcaaatcaaatatagaataacaaaagacttatctgtcttttgtgctcgtatggtttgacataaaaaaattttgttttaaggaaagctttttgttccattgttgaattcgagagatataaaagctttttgttccattgttgagaagtggagattgatttctagattgtgggaaggttgcggtttttctcgaaaaggaaaaaactttctcttgtaaaatcgtttttttttttaattttgtttaaaattaaaaattttaaaaatctagaagataaaaatttgggacttaaaccacgcattcgatggaatgggtttcaatttttgtagaattaacttgtaatttattagataaaatgctacaaatcaaaagttttgaaattcagtacgtcagattagatgtatcgtggtgagaaataatacatgaaatacttaactaaaacaagcttaacaagaaaacttcattatgtgaaatacaatggtcaaaacttcataacatttttagtcatgcctttataaacttttgtattggtttgcttgatggcggcacacaattgtggcagaatctcaagaagaaataattcttactttactaggaaataa

SEQ ID NO: 10524 - DNA, 1157 bp, Arabidopsis thaliana landsberg
tgaagtcgttttaaaagacgggtatagtgtctactaatatgtgtattctgaagagagttgcatcttaatgttctatgttttgttggtaacaggctaatgcagcatcaggaatggcagtccatgatgactgcaagctgaaatttatggaattgaagacgaaaaggacacaccgtttcatcatttacaagattgaggagctgcagaaacaagtgattgttgagaaaatcggtgaaccgggtcaaacccatgaggaccttgctgcaagtcttccagctgatgaatgccgctatgccattttcgattttgattttgtcagttctgagggtgtcccaaggagcaggatttttttcgtggcatggtaactaactaactatactatctctgctaaaacctgtctatcttggtttcacattcttttcattaacatttcttcttgttttttttttgccaggtctccggacacagcaagagtgagaagcaagatgatctatgcgagctccaaggacaggttcaagagagaactagacggaattcaggtcgagcttcaggcaaccgatccaaccgagatggatcttgatgttttcaaaagccgagccaattgatgaaagaaatcccctgaaaatttcggttgaatcaaactttttcgtactattactcagtgatgctttttcctaaagtttgctgtgacggtaccaacctgaacagcttcattttatcagtttggtctttgtctttgtctttggtctcctttttgggtccttatagtgttgtcttaaaacttaaggaatctggcttgtgctctttaccattgtggaagaaatcgaaccctttattaaacaagaatcctattggcacatcttgtcttcacataatgataactaatgatccagggattaaaaagttgtgaaagtttttataggcaagttgatactgtgcaaaggtaatatacttcttcaaatcataaggatctctggattgatagaatttcttttttttcacgactatttacattttcttcaatgtctatattttaggttaatatatttggaatttaagattattcttatttccatgggagttgtctcaatctttttggatcattagctatacgggaccttttttctttatttcaattttaacctttagtttttggtaat

SEQ ID NO: 10525 - DNA, 1257 bp, Arabidopsis thaliana landsberg
cgatggagtttcccctgattgtataacctacacaacattgatttttgagcttggcaggagaaacgatgtgaagaaagcgattgagttatggaactcgatgacggaaaagggtataaggccagatagagtagcgtataacaccctaatacacggttgttgtgtggcgggagaaatggggaaggcgaccgagttgaggaatgagatgttgagacaaggcttgatacctaacaacaaaaccagtagaacaactacttcgaatgacactagttctaaatcctaacccctttggtaattgtataagttgaaacattctttgacatctcaaccatttatagataagaaataattttggtgaatagtttttgcattttttataccctctgtaacaaagagaacaaagggaagcttaaaagaatcatcttacccaaatcttaatcttaagctttggtagagttgaaacaaaggaagcaaacacagcacaaaccttgtgataattttgaatatagatgagacactgtaaggtaacatagacacagagaacagaccagacagatagaatgaagggtgtcaagtgtatctaacagtcacaagagactgtaagagaatagaaaacaccatttcataatagtcgaatataatcggaagcttattcaaagagagtttcttttagttgacgcggcttttcaaaacatcaagatccatctcagttggatcagttgcttgaagctccacttgaattccatcaagttcacgcttgaacctgtccttagagctcgcatagatcatcttgcttctcacctttgctacgtcgggacacctttggcagcagcagcaacaacaacaacaacaaggtaagaatagagaaatgaggttacatggttttagcagataacaagaaattatgtttccatgcaatgaagaaaatcttgctcttctggcaattatctgcagtgacaaagtccaaatcataaatggcgtatcggcattcggcagctggaagacttgctgcaaagtcctcgtaagttagaataggtgcaccaactttctcaacaatcacttgcttgtgcttctcctcaatcttgtagacaatgaaacggtgtgtccttttcgccttcagttccagaaatcttagcttgcagtcatcatggactgtcattcctgacgcaggattagcctgatttcaataaaacacccgaagccctaagatttacatcccatatcccacaaagctagcctataattgaatccacacaatac

SEQ ID NO: 10526 - DNA, 1585 bp, Arabidopsis thaliana landsberg
gctctactagtaatctcgtctctcactcttcactcgccaattccagagtaattctttagcttctcttgctttttccgcttcttttctttgcatgatcctgtcaattttgctgctacaatgatcgtataagaaatagatcgcaattcgcaatgccctgtttgatccttgagctgaattttgtatatgatggattttagtctgttggcttctgatcgattcttttgatttttgatcaagatcgtatcgatctgacccagaattatatgtttcttttcttatttatcttcagaaagcacaggactcgcagaatgatttgtcagctttgtttctttctgaaggtaaatctctttttcgatgtgtttatatcaggaatcgagatgattacttgtttttggtactgttcttgttaataatataagggttttgttcttgatttttatagagaaatcagcttcttcgccttgccttgacaaagaaagatttgatttagattctatacatattgacaaaggccttagggatgaggtatgatttttatttgaagcattgcctctattcatgtgattctaaccatactgattcttattccttttatcatgatcaagacttgtgcccttggattgattttgatatctcaacttaactccacatgaatcaatttcttgtttttgaaaccctgattttgtttttgcgagtcttataattaccacatctcttcttcaggtaatgagaagatgagttctatgttttttgttactgaggtcgtcttaggtttgttgatataatgaagttttgttcttcttttttccctctgctcttaattcactgttcatatttctatcacggatgtctatatatctgaatgcatggatccctgtgtaaatgtgtttccttacattaatgactttcttattagaatgcagggattctttttcagaaactctgtaattttgttgtggaagctctgaaatttttcagagcattctttctttgcatatatcaatataatcagattttacatgctttcaagagtctatgctgagaatctaacgcttttttccttttacttgtggaatcataggcgcggtttcttaaagcttgtggtactataccggagacacctattgaaattaggaaagcatcccaaaaacttagtcctcaacattctggatcttcccattttcactcatggatttccagtagctcctctatggggtctcgtttgactgaatcctcaacccccatgaaagcttgtgaagaggtgggaagaccatcatttacttcagagcaaacagctagcaggtagagatgttactttgtttaataaaacagacattttgctcattttgctatgcttgatagaattgacatggtttcttgatagaactggtgtggtttctatgctaacattattctcacatcttactaatggttaatggattcatggatctgaagttcactttttcatttttcatattagttgtgtaatcgatgtccgggacaatgcaaggatctcttctgcatctagtgatggtactgaggtagaaagcgttggcactgcaatcgagggtgagttggataaaac

SEQ ID NO: 10527 - DNA, 1446 bp, Arabidopsis thaliana landsberg
ctcctctgtgatttgctctggtctgatcctgggaaagatgttaaaggatggggaatgaatgatagaggtgttttatactcctttggtccagataaagtttccgagtttcttacgaaacatgatttagatcttgtgtgtcgtgcccatcaggtagatatttttcgatcatgtctctttgatactactgcttttgtgatgttaacaagggagttggattttttatggcaggtcgtggaggatgggtatgagttctttgctgatagacaacttgtgacggtgttttcagctcctaactactgtggtgaatttgataatgctggtgcgatgatgagcgtggacgagaaccttatgtgctcgtttcagattttgaagcccgctgagaagaagaccaagttcatgatgtccacaaagatttgatactttcattgaggttagtcaatagtctgtccttggcggaaaccaaaacgaaactagtgaatgaaaggattctcttgcactgatttgttcatgttattcattacaaagtcaagttcacatttctgttgaacatgatttcttttggattcttccaggctaaactttttacttaaatgggtcttgatttcggcttttccttctttcacagatggatttggtctttcttgagaaattgattgaaaccattgaagatttggctgtgaagtgtgtacttatggtagtgagaactcttggaaaggagcaagaccttcttagtcttctaatctctttcttcccccaaattcactttctgcattttttttctatcttcttttatgggttttacatgattttcatctgcctgttgggatcacatagttggtgtgtacatgcatatggtcgtttcttggattttaggacaccaaatgaaaatgatgttataaaaaaggtttagtatgatgagtttcgtctcttaaacggcatgtgaaagtgaatgagacataagtaacgcatatgaacatcttcaattaaccatcataaatatcgaatgagcatctaaattggacaacaagtttcacacatgttcatcatgtttaagtaaaagaagaatttgagaagctattgaaagtaaagtccactggttttggtatgatcgtgagtgaagtgatatatgatccgtttggtggactcgggaaatagaatagaatataataattggagggactgaaattttatgttgttctttgttgtggatgagaagtaaacacggaagcgataagttcgtaaaagtaactttttttttgggttgcaaacgggaaccaaaaccacatgtatccaattctttagacgcatatcatgcattatcctatctttgaatatgttaattttagtcatttcctcacaaagatgttggacgacgtatctcaacatttcctcatagtattgtgaccatgcaattctttagattctagttcctaatagattatacca

SEQ ID NO: 10528 - DNA, 1199 bp, Arabidopsis thaliana landsberg
aactatctcgaaggttttaacatcatttgctactttctcctcttctatatgaatctcaatacgaggaggtcccgagagcgtctcaatcacgtattgagtaaacaacgattcttgaatccgatcgaagtaagtactcatatggaaagaggaagcaagaactttaaccagtaaagtctttatgagccagatgataacagcaacaagtaaacagattaatactttagtcacatacttaagcacagtacttcgcatctctctttcaactttcttgtcgaacaagaaatgccatgcgatcaacacaagccctagccatagacaattctgcaccggctttcgaatcccgtaaacgaaatacaaaacctttttcctccaaagaaaattgctttcaacgaagtaaacgaatagcttcacaatccaactagaaaccaatctcccacatatcaagacaagaaccatcacttcccatttccatagagctaggtcccaaagtgtcttgccacgcaagtaaggtatgactaggctacaaatcaaactagcaatgatcaaaatcagaaatatccattctataataacccaaacacaaatcttctccttccttaaaccttcaggtaaatcctcctctgagaagggatcttcctcttcttccaaatccttggatcctccttggtttggagttcccggtttagtgtttctcccactaaacccgggatttagattcccggaccttggagtccgaccggaaaccatatccggatacgtcggagtaggaggatccatcaatctagatctagtcttcatcttcatcaaagtcttagtcctcatcgtcgatctattagaggtacacttcacaacctctgatccatctactctgttttcttcatcttcactactatcaccatctttaacagacggagaaagcgtgactctgttctgtctccgtctaatcgcatcaccggttccattacgataactcgccgtcactggcgcggttactggtgaagcagaaccggaaactgccgttgacgacagaggaggaaccgtatttttttgaagctcaggcatgttagcttccatgtcgagagagatttcatcaccggaagctttttgcttgttgagaaattgatttataagcttagacggtggatctggctcctccgatttctcactactccgccgcatggaatcagagcttccgtagt

SEQ ID NO: 10529 - DNA, 1416 bp, Arabidopsis thaliana landsberg
ctttagagccaaccatatatttattaatttaatcgtataaatgatcaaggattcgacaatatatgatttataactggaggttcaattagataataacttattgataacaataggagatttatataatctagtcatcagcatcacacggttcacttgtcgcacctagcctacccattcaccattatcattcaaatgcctctcatagaaccgcccttgtggtctgttggcttttatgtccattcccaatgtacgtactgttcgatacctcaccttcttgccctaaatagaacgaaaaaataatagaaagtaaaatggtatgagaggattgagcccgaaaacatcaatgcatgcaggtttaattttcttacagcaccatcgacactgtcgataaaaaatggagacttcatcataagatcctcaacaatgttcttaattggcggcagttttgcatgtctagcaatcatctcattaaattttactttcagcatatcatcctgcatataagaccaaaaagagggtttgatttttcagaaaatatttgccttcaatagattgttcctaacaagttttttttttaaactataataccctgagaatgcaggcatcaaatccgtatacagaaatggtatgaacaccatgaccaacatcatttacacgtagtcttctttcatctttcgagacataaaccagtgatcctgtatttatatctgctacaagtacgtagttgcaagttaggcccaaaggcttcaacttcctcttgggtaaagtcctctacaaatcgacgtggagtcttagcgcactgcataaccgaagcaaatcccttgacatgcaaaaataatttaacagagaaagaaacttttctaacatttatatatgtattagaatttcgaaacacgctaattatatatacctcgaagaaactgggcatcaggtcagggtgaatatcatgctcatggctattggaaagaaaaacaactcggccttctttataaccaaaccataccttgaccttgccccggtactcttgcgtacagcttaaaccaccagcttccgaccaaaccatagggtcgcgtgtgctaataattacacagagaattagataatataacgattttgatgcacaaactaaacccaaaaggtcgaataaattagacttgcctattttcattgccgtgtgtgttcacgaggagcaccaatgcgtcaccgctccattgaaacgccactgtgtctctgtcgtccattcttctctagtcggattagtttaaatttgttactattggaatctgtttctgatattgctgtgattggagttgtgacttgtgaccccgtctctgtttttatagccgacatatgattcactctgctctgctttttccaaaacttgttaacttcttccaacgcaaataccccaacgcg

SEQ ID NO: 10530 - DNA, 1143 bp, Arabidopsis thaliana landsberg
gtgaaagagtgtgacaaatggcttcactcctgacacatttacaacattacaagaaaaacattaaaaaaatttacaagggttttggcaatatcctaaacatcaccaagatttcctctatgtgcattaaaatcaaatagactgagaaacagagaaacattacctttagatataagttgattaatcaagttgttataatattcaattccagcctggttgattcctccctttagagtcccacctaataaacaattgagaagagttacatcaagaatatataacaactcttacaagttacaaagatctaatccgataatatcgatatcttacgaggcaaaatccgtgaccatgagatcgaaaatcggtaagcatcgaagccaatttgatgcagcaaattcacatcttcctgattttccaaaaaaaaatcatgaagcaaaatgtaatgcttgatgtataattgactttatttcttttttgggtgaagaaagcaaacaagaccttgtaaagattgtaagaatcatctgcaatggacccattactaccatccattatcttttctgaaaatgaaaatgacaaaaatatttatctttaaatttaataccaagaaaaagaaagaagtatcaagaaggttcatcatcatcaacccatttttgttatgaacacaagacaaaaccagattcacatatatgaaccaaactccaacattttgaggcttaaatctttatagagatctaaagcttttggggtttctaattaggaaaaaaacctgggaatttttcagagaaggagtcccagatacttggacctctaccatcttcatgtgcagctccttcacactgcaaaatcgaaaaatgttaacatacatacaaaaaagaaccaatggacaaaagaataagaactaaacctgataagcagaagtagcagatccaaaaacgaaatcttgtgggaaatcatttcttcttaatctaggccttgtggaatgctttttggcggaaacttcaatgcagggcaaagtaatgagcaacagtaaacttagaaatttacctctcattgttttcttttctttctggaaaaaactaattaaagttttttaattcttttttgattttattaaatggaaaaaattttggccttgtggaaaaaaaa

SEQ ID NO: 10531 - DNA, 1250 bp, Arabidopsis thaliana landsberg
gttccgtatctgatctctgttcttctttcctccgcctgctatattccaatttgcggtgattcgatttgttcgttctagggtcagaaattgggtttccattaggattcaatttttactaaccctaaaaaaaaacagaatccttaaatagtttaatacacagagaaaaccgaaggtttttaccttcatcaatggcggatcctggtcctgccagtttctcaacgagagccaatgccttgcttaggaaaaacttaacctatcaggtactttttccgttttcttttcctctacgcaatccaattatacacatacaaaatttcgtttaatgtgagtaagattctgttctgggattttcgtttaatagatcagtttccacaacaaaattagtggctgatttattgagtagattctgttctaattatgtctttgtgtaaattgtgtgttggtgtagaaacggaatctatggagcaatatacggctaatcatgatcccattctacctctgtatacttctagtgattatacaaatcctgttcgatacacaagttaacaactctgctgataatcgttgtggttgtgaatgcatcgaaagaaatagagctggaaaatgccaaaaagagctttgtggtttagaacattctaaaccggatcaagccttcttttgttctatccctactcctccactatggcctcctttgttacaaatcccgcgtcctgagagtcgcgatgttagaggtcttcgtgatgattcttgtagacgtacaggatcttgtcctgttactatactctttactggaaataaccgttcccttggaactagtatgtctcttttccttcttttttatgtttctgttcttgtgtacatacactggaacttatcttcatgttttctttagctgtatctgagaatctgttcactagttctgtgtcggcgaacgcctctgagattttgcgtactttagccaacaatgttttggtaagtttttttggtgtgtttctgtttgtttccattatgtagtgtgtttcttagctttcttgacctcatgtttcagggtacaacagttgaagcagatttcaccaattatcttgatccagcgattgcctcaaatctttccatctacaatatccaacctcggtgcattcttaacgctacgttcccgttctcattcgaccaacgtcctctcaagtttgagaaaggtattcagttttaatcccattgatgtttaagatgtcaactaaaaaagttttagagag

SEQ ID NO: 10532 - DNA, 1277 bp, Arabidopsis thaliana landsberg
ttgtgaatcaacaattgctgcccacatggataattgtcttttccttgtgaatcttctatattcttcttcaccgtcattatcttaaaaacaagcacatcatgcccagatttaatgatttgaagactaacataatcaacttgaccaaaccagattggattcgcgagtcataattttagcagttaataaagctattaaacacttatagaataaaaaaatttgatcaccaaacattcaaaattgtggatctgagtctcttctatgtgagattcctacttctctctactatactaggcgaaaattacgtaaacgcatggacgaagaaagtagaactaaccgtatcggagggtaaaaccctaatttcaaaatgactgcccttgagagttttaacggtgagcttcatatcgtcggaaaaattgaaatcgacggcgagatacgacggcggagagagtgtacagagagagacagacctaagaaaagctcaaatcaagagatcgaggccccgacgctagagaaaagctgaccgtagctaaaacagtctctctctctagcaacagagcgttttggatttcaaacgcggcaagagatcgccatgtgcaatccacgtgacacatgcatctccaattcggcccagctggtcacaattctacatgcaccaaagaaatattaatagcccagtaaggccctatgttagtgggctacgccctttaaatgacattaaattagactaacacaaaacagttctggttagtatgagtaataataattaagttttgttgtcggtatttagcaatcaattttctaaggatatactttgacatttaaatcaatagagagtcatgtaatgtcggtcgaggacttaaaagccagctagaataataacaaccccacatgggacatttataaaaaggtcacacaaagtaagtaagtggaaaataactcaattccagaccaacccaacacgcaatttaattctctctaatcaatttagttcctaaatatccggtttttgagaagaaacccgcgtttaccggcgaatcggctctttactctctagccggagacgagatctacaattttgacgactctgcctaagatatagcaattattgggagctgcacgaagaagattttatttggtcgacggagctggaatcagctattctttcttcttctccctaatcgtttcttttagcagctctttctctctcacccgaaggttcgttatctcttaacctgattcgatccgtttctttttatttattttgcgtcatgttttag

SEQ ID NO: 10533 - DNA, 1264 bp, Arabidopsis thaliana landsberg
ctttatatcatttgttgtaggatttggacccaaactcttgtaatcgtcgcacgacaagttgctatgccacggaagtttgcagttgatacaaaagggttcaccgcatttgacacagcttctcatagttacatcttctcttgttgagtttgagagcttggttaccgacattaaactcgagcacatagggtttgggcaataaactctctcctccacaggaatagattcctcttcgatccttagttcccacattgcttttagtttagatgtcaaaagattggcgcagtttgcaagagtaagtttagactcgcattgataatgaagacatctcggtacacctcccgcgagtagcctcacttctatatgtcgttttacgcactcaacacagaattcatgaccgcataaagcaacagaaaacatcagctcaggttcgaaattatcatcggaacatatactgcaagtcttgtcatgatcaggtatatgtatgctgatttcagaaactattgtttccattgcaagttcatacacaaatttaatttgattcctagtcaccagaaaaggaaagctagacgtcaatcgttgtctaatgtgttgcacgttatccattagtaaggcaaagttctcttccgcagaagcagatttctccatgacctaaaacattcaaggcaaattaaaaacatcaataacaagattgaagcaaagggacatgtgaaccttgacaatcaagtagcaaacttaccaattcaaaaatccgataatgatcgctgtaaattgagatatgatcaatccctaaacccacagcttcggttagtccacgcttcaatgccataatctcaacctctagaactgtaaccctagagtcatgaacttgttctttcatctgaaacaagagattatcatctttgtcgcaaatcgcaaccccaaatcccgctaataactctgtggtttcctcgctaaccaaacccttgaagtaaagcctgtacgagtcaggtttgatttcgctggagactctacccacgtgttttggatcttctgctcgtactagagtgctttcctcctccatatatgtttctttagttattgttttcaagcctttcaatttctcttagacaattaattgaacattaaggttttttaagctttcgataaccaaaacaatttcccttgcttttatacgtcttcaaaaccttagccatttttatgtggaaaacgaaaaagacaaaaacgcagattttctttacccaaaaaaaaacattttaaatgaaaa

SEQ ID NO: 10534 - DNA, 694 bp, Arabidopsis thaliana landsberg
tgtcggtaaccaagctctcaaactcaacaagagaagatgtaactatgagaacctgtgtcaaatgcggtgaacccttttgtatcaactgcaaacttccgtggcatagcaacttgtcgtgcaacgattacaagagcttgggtccaaatcctacagcagatgatataaagctgaaagctctagcaaatcagaaaatgtggcgtcaatgtgaaaattgccaaaacgtaatcgaactatcggaaggatgcatacatatcacttgcaggtataacctctaattacattccctataaaccaatctagaaaccataacatagagagtatacatatcaattttacagttccatttattctttttgtgtgaacttgattataactctatgttgcattacatggttgcttggtagatgcgggtacgagttttgctacatatgtggagccaaatggatcactggaagagtttgcactcattcaacaactaatcggtcattcctgctgacggactgaacaagagcagcacgaaatcatcaactctgaaattgtaaaagaatatatctgattagttgcctagaataaactttttaccgtactaattagatataggcggcataataatatacgcatattcttctatccaaattttgggattttataaaatatctacgtatcgcaaattaataatgggttcccaaacgat

SEQ ID NO: 10535 - DNA, 1063 bp, Arabidopsis thaliana landsberg
acgtaccaagcttcagaggatcctgtttacaagggttatagatcagctgttgagtcaaccagccaagaagagtctctggtatttgtcattggggatcattttcgataagtcggtttttattccattgcttctcatctcttaattagtttgtgttttctctggtgtaattgcaaagatgagtttcgcaatatgggagccaccacatggaccatacaagtcatttaactacccatggaagaactatgtcaagctcagcggcgctctcaagcattgtgcattcactgtcatggcattgcacggctgcattctctcagaaatccaggtaacatagtagagagacttgtatggtttttgaggattctgatgtttctggtacttccaaaggaatcagttgttcatgattagagcttaatctgggaacatttcacaggcaccagaggaacggagacaagtttttcggcaagaacttcagagagtgggcgtagaaggagctaaattgttaagagagctcggtgaaaaggtgaagaagatggagaagctaggaccagtcgaccttctctttgaagtacacctagctgctgaagaattacagcacaagatcgacaagaaatcttaccttcttgtcaattccgaatgctgggagatcggaaaccgagccaccaaggaatcagagcctcaagaactgctctccctcgaagattcagatccaccagaaaaccacgcgcctccaatctacgccttcaaatccctaagcgaggcagttctagagataccaccaagctggggcgagaagaatcaccgtgaagcgttgaaccatagacctactttctcaaaacaggtgtcatggcctgcacggcttgtacttccgccgcatctggagacgactaacggagcttcaccgttggtggagacaacaaagacttatgaaagcgcgagtgcattgtctctcgcgacgttcgcgtctctcctcattgagttcgttgctcggttgcagaacgtggtcgacgcgttcgaggagttaagccagaaagcgaatttcaaggagccggagattgttacaacg

SEQ ID NO: 10536 - DNA, 1015 bp, Arabidopsis thaliana landsberg
acaaaaactttatttgttattcccttcttttaatcttggtctccaccataaacaattattgatctacatatctgtgtaaaacagtggaagtgtacagacgaaataatatttttatgaatgcattgaaaaaggaaacaagtgagacaagtgagatttgattaacttctcctactgctcttaaagtatcaagaagcattggcttcacgtgacatcttcgctgtcatgtccgtgatcgagcttcttcatcgatgccacttacaactactgattctatcatgacttggttaaaaaatctcttgaattccattatgatctcttcttcttcttgtatgttcttcttggtgtttgctttctttttgatttctccggtgagatcaagcgatgttgaatctctactgagtttgaaatcatccattgatccttcaaactcgattccatggcaaggaacagatccttgcaactgggaaggagtcaagaaatgcatgaaaggaagagtctcaaagcttgttcttgagcatttaaacctcactggctcactcaatggcaagagtttgaaccaattggatcaacttagagttcttagtttcaaaggaaactctctctttggctcaatccctaacctctccgctttggtcaacctcaagtctctttatctcaatgataataatttctccggtgagttccctgaatcactgacgtcgctccaccgattgaaaaccgttgttctttccggaaatcggttttcgggcaagattcctacctcgttgctccgtctctcccgcctttacacgctttacgttcaagacaatatcttctctggttccattcctcctttcaaccaagagactctcagattctttaatgtctcaaataatcagctctctggccatatcccaccaacacgagctctaaaccggttcaatgagtcgtcgtttaccggtaacattgctctctgcggtgatcagattcaaaactcatgcaatgacaccactggaatcacttcaactccatcagc

SEQ ID NO: 10537 - DNA, 1599 bp, Arabidopsis thaliana landsberg
taattcgttgaagttcatgatagagcctggttcgagctgggtgaaccatatctaggcttgtctagccaggttctcgtattaaagcttgcagtatcctgcatcctgtttagcttcgtccaaatcgactcgcctgacggctatcaggaaagccgcgagatagcttttaggatcttctagcccattatagggctcgcggttgagcttccgggaatcttgattcttatgctcgtaatatgaggggtgaaatgcgtccaccttgttgcttcgatgactcgatcgatgtctagttccgaactggtggcctaatggaactttgattttatctctttcagtttacggcgaaccttcttcataggttcaaactgctcatagttttcttgctcacgagactcccgagctgttcttcaccatcaggttgtacttccacgacatttggttgagttctgggatcagttgcacccggagtcatctgttcgccagttttattccctgtatgggactgtggtgaactgaacatgctcctccggactccttgagggtttcctttccacaaagatcgaacgcgagattgcataatattgaaattttggctaagagatacctgagttgctttcaaagtgctcacaaccttttccacgtctgaaaacttttgcgccatgcccgaaacggttttctggatgctctagagtgttttagccatggacacattgacaaagctttcttcggccattgccgccttccttgggtatgtcgtaaaagatatctgatgactcaagaatcctccgtcccaatagacatcgccaaaatgtggatctcggacttgcacactcaaatatttatttatctatgagaagcaaatctcttaaggacaaaaatcgaatgaaaatataataaaatagagaacactttttgaatgataaaactgaaactggtattgtattagcttaaagtatgtttgcaagaatatgtgtgtattactccattttggactcagtatatatacatcaatactataattattcacaattatctacactaatttcccttcaatgcatccgtttagattctttggttaaatgccttaacgttcgaatttgaattcctttgacttcttcttgggcttcgacattaggcccatagcaactatctgaactgcctcctatctcgacaaggttcttcaccttgcacaaagtcaaactccttgttcgatttggggtatcctctaggttgaatccttggcgaacccccttttgttgacgtggcaatctttggttggaaccggacgatcggttttggatccgacaccaacacggatagttttgatcctgaggattctcaacattcgggtttctttaagaaagactaggactacctctaaagttgttgttgaagttgttgttgtagccgcgattcttgaagcatccttgggctccaacatagttaacttcttcttcttgatcgaatgtgtcatggtacccttggaaggcttatgtgatacccattgtggatgttggaatccgcaattaaaaatttatggatattaacgaggttcttaagccttgttagtcgagccaagatcaaatcgaaaaagtgtttaag

SEQ ID NO: 10538 - DNA, 1252 bp, Arabidopsis thaliana landsberg
actacgtggatatctttgattggatgttatgccttttctttgccagccaaatgtccacgtcacggagcggtgaaagaatgttaagtttaagcaaatttttacttttacagggtttttttttttgggttcacttttgcagtgttattgtgtaacttgcgttcggtgataaagtttataaatttctggaaaagaaattccacataaaatgaaataccgcacttttggtactttgaaaagaaatgcttacaccatgcaaaagaaatggttaacaagacatgaaaatatagtactacttttggttctctggtataccacgtcaagtgatctttacatgcacgaatcgagcattccaaaggttcgaaactgtgtcctttttcatggtatcaaatcaaatctttttgtagtatggtggatgatcttataacaataatggattattttcagcaaattctttagttctacaacactagtagtgattttaagatttcacattttgggggcttgtataacaaattaattcgtatccacactttcaagagatcaaagaagcatatatttcattagagaaaacaaagatacatataacattgcaacaagagaaacatatagtataaagccgtaaactctcttcaacgaaagcgagagagtgtgactccattccctcaaaacctaactttggctaaaatatttttcttggaagaaaagttattgaaactgaacaaacacaaaccacgtagaaaaatcccggaatatagaaataatatcttcaagctcttcacttggcactaccgagctgggagcggataagcttagccgcgtcaaccatggctttaagtgctggtttaacctcagtgtacttccttgtcttcagaccacagtcagggttaacccacaagatgttctgctcaagaaccgcaagcatcttgttgatcctgtctgcaatttcatctgtggatggtattctcggagagtgaatgtcgtaaacaccaggaccgattcctgcaccgtacttcactccttcacggaacactgagagaagcttctcgtctgaacgagagttctcaatggtgatgacatcagcgtccatgtcaatgattgagtggatgatgtcgttgaagtttgagtaacacatgtgagtgtgaatctagaagataaaataaagaagttagttgcagaaacattcatcactatttgagattttaagtgtacaaggttgttacctgagtgctgtcttggacgccacagtggtgat

SEQ ID NO: 10539 - DNA, 1106 bp, Arabidopsis thaliana landsberg
gtggaaatagagggtttttacaggtggtcttgtaaatgacacctgaggtgacattttccgggaagctgaattacgtagcgcttgctgccgaagaattttgtcttctgcttccatgtcagataccttttcctctagcctaaatttaggagtaaataagtaatgcatacatagatactgttgaaaatgaaaataaatagcaaagaaaagattgaaacattgaaactttgggaaaatagagaatgcaaatcgataacctttgcatagatgtttttaactcgattagttttgtctctgtgtccacaacctgcttaagcctctcttcacaaagtctacttgcttcctcatacttcttctctgtgtccacaacctgcttaagcctctcttcacaaagtttacttgcttcctcatacttcttctctgtttcgtctattttcctttccaacaaatctaccagatcctgtagaatttcaataaatttaagagagacataacgcacaaacttttaatggagaagaatacattttgtggaaaactaacatataaatctttgttttcagcagcaagtttgttggtcatttcatcatcaatcgaaaaatcttctgctaatatctcttctttgagcatctgtggtccttccttttgctcgtttggtgaatcatttccatcgttttcataattttcattctctaatgaactcacaagtgcctgagaagagtcatactcagaacaatgggaaaaacaaacctaaaacttaaaaagaatcaggagtggagctatgtcactgtaactttaccttcagacgttcattctctgctgcaagattactcaacatctcataatcagatgaagcactctctttcaattgatctgagatgtttgagcttgttacgtcgtgctttctgtctaatgaatcgattttcttctccaatgtactgaccaaagcctacgatacgttgtacttgttaagatatcaattaccgagagaaaacattgaaatctcaaatgaaccgcttttgccacaaatctgggtcgtctatcataaaacaatatcttgaaatcctaccttcaatttttgattttcagattcgagtttgataattacacct

SEQ ID NO: 10540 - DNA, 1475 bp, Arabidopsis thaliana landsberg
  unsure (1)..(1475): unsure at all n locations
gttttgaatatttcaatctttacactttcttacatttcacgtttcaattgttcaatgtctttcgtcatgtccgtgagccgggttttttttctgtgttgctacgctcttgtggatttgacattaatcaatcgtttttctagtagtcgagccttaaacgggctagaagaagaagatgaaaagtaacattaaaattgaagcgataaatgtgaaaccctaacatcgtaggagaaagagattcattgatgttaggatttagtctagagaacttaaatgccacatatcatcttctcatgtgctgacgtgatcgaatgatggaaagagttcacctcctcttatatatatgatttccgaagagaacacaaactccattatttaaattctatcccaactttagacactaaaaacaaaatgtttaattaagaccatataaaatgccacaagtcttactctaaaaccaaactttgtcgtttgatgaagcagataagagaaacatgacatgttggatccaaactttaggatccaacccatatttataattttaaaactacgcaaaccaatagtttagacactttcagagcttcaataatattacattgtccaatggtggatccaaaaatttaaattttgaaaaatatgtattaattgtttggattacaagttactatattattttttgacataaactctcaacaacaacttgcttaggtaatcaatgtctttattaatttttgttaacatcactaataaaaacattgcaaaatttacatcaataaaaattgatgctaataaaaaataatactaataatataaacataattgtgtgaattatcttcaactatttttttttttaatctaatgttaagttatatttatagaaaaagtaatgtttgtacaactagtgaatgtgttttcaactattgtgattatgtttcattctctcttcttatatctttctgaagatccaattccataaatcatatgtcttatcatttaattgctaatattaatgcttttttcttttatttgataaatatattttatacaaaacctaaattcgtttaatcctacacatttattctgtttagtaaacgaatggaataactaatgattgtaacgaactgaataattgataaataaatagaaagtaattattaatttttattagttgtcttcttatataaattgaaacttataaataattgatagaaatataagtatataactataagtgatagaaataattgacatcaattattaaaaccatcacaaatacgaagatcaactctaaaaattgatacaaaaggtagtatcattttggtaattgacacatacctaggtagctcgtaaatttcctaacttgcataagacatgaaggtactcttttccagaggaaaaaaaaaaaaaaaaaccggaagcacaagaacattggntatattgttgaatcaatgccaaaactaccagttaaaaatcatatt

SEQ ID NO: 10541 - DNA, 1472 bp, Arabidopsis thaliana landsberg
atatattagattaggaaaaccaaatcatgtaaagattgaaaaacaaaatgagataatcagataagaaagagtcttactgatacaacgttttctagtccttccaacactggaagttccacactcttcatgtcaactataacaaaaacaaagatacagattagctatatctaatatgactatcaagctcttacatcagaacctcttgattcaaacagtttaagatgtaattttccacttacttgagcctttgagaaggtctgaagtaatttcatgtccttcttgtgccaatgagacgagctgagcaacaaaatcaatccattgagtaagaaatttagcagaaaatttcaaattaacagatgtaattgatacaattattataccttcatcgcagtgatgaactccgataaaccgagaaatccttgccgctttgaatccgcaactgcccaaacctacaaaccaaaatccaactaattccaatcaaccctagattacactcttacaaattccatggattcatgaactcagaaagttcaattttaaaccaaatagcctatatatttcacgaatcgtcgattatatgaataataacctgtttgagttcctggcgagaaagctttgacatcgcgaagaactttgtagcatcgttacccgaaacacgaccatctccatctgtaatctcagagaatcgaaacaaaatcagagcaggaataattaagacgcactagtaaattccatctgagaagggaaaaaaacactgaacctgaatcggcgatgttgaaccattccttgtagatcttctgatgctcttttaaacaagaaccgatcgagatcgtcgatgaagtctccattactgagatgaagaagaagaagagagatagagagagaaaatggtttctgaaatttgaaaattgaaactgaatagttgagttaagatagagagagagagagagagagagcgtcgacagagaaaagatatatatccaaattggggattttaacgggcttggcgcttgtcgaggaggggaaacaacattacgacatcgttttaagtggccgacacgctgtgtaactctttaaatttgaaacaacgtgaaagttcgatctaatagataattagcctaattaactagatttttttgctattacagtttaaagaggtcagattttttgctagcaatcaacggctgtgatttgatatctcgccagatttatttattttaatttaatttttactaaatttgaaaacttgaaaaagcgtcacttctgcaaaatctcagctcagcatatctcggtcatatgtagctcttaaattttatagactaggtcagtattcatataataattcttgcaacctgcacatacaaaaggaaaaacagttagtatttcataaattgtgtagagtaattaatatgtccaagtccttaaataacaaaaatttcataccattataaaaaaaaaaggtcagtaccatg

SEQ ID NO: 10542 - DNA, 1432 bp, Arabidopsis thaliana landsberg
  unsure (1)..(1432): unsure at all n locations
ccctatttcttatacaacattatctctgtattgattttgctcagaaacaaaaattattcttgacttaattatcttgaaccgtcaaaaattatttaaaacattactacttaagagacacttcttcgttgccacattatagtaaatgtgtatcttaccaaaaaaaattttatagtaaatgtgaaggcaccatatccaggacataaaccggagaaactagtgaccacaacagtgaaggcaccatacccaggacataaaccggagaagctaatcccacgtacgcttctacttccatgacattgtatccggagtcaaaccaacctcagtcgtagtcgctacgagtcccacaacaaactcctctgcaaccgctttcggtatggttgcagtcgttgacgacatattgacggtgggacctgaaataacctcagaggaagttgggagagcccaaggaattttcgcatcggccgaccagaacaactttggtctgcttatggctttcaactttgttttcacaaagggtgaattttccggcagcaccgtgtccatgtatggccggaatccgatattttcgaaggtgagagagatgccgatcatcggaggtactggagcattcaggttcggaagaggatatgcacaagccaagacttttacgttcaatactaccagtggaaatgctgtggtcaagtataatgtttatatttggcattaattgttgacttctttggtgcttttctatttttccgtcgaaagatgataaatttggatggatacaaaaagaaataaaaggttggtatgaataaatgcctctttttctattgtagttgaattgatttttgattttgatgtatttgattggaagaaattgtggtaaatagttgtatttttatgtggtgaattgttgtgaagacagaatttattgtgtttcaaaacaatagtaactaataatgatacttcaccagcttcatatagttaaacatttaaggttttgcacacattagaattttgtttagaaaacctactataccttattatataagtaagtggtagttgtgaccgttattgatgaacctctgaccgagtagcatagtgggaatcttaggatgtatggattgtcatataggcctaagcccatcgaatctgatctactaaaagcccatnnnnnnnnnnnnnnnnnnnnnnnnnnnnnnnnnnnnnnnccggccatctactaagacttggagctattacgcatatgggcatatggccactagatctgatttttaaaagcccatttaccaaaatctaaggaatcgctgcatgtcttgcgcaacgcttctgaagcaaaaacaagccacggattgttgcttttactcggtcggtgatgtggctgataacagatttgacacattgaattattcaaaaaacattattgcaattttcaaattttaaaatattt

SEQ ID NO: 10543 - DNA, 899 bp, Arabidopsis thaliana landsberg
cattattactgagttcaatcagtgaataagaagatacatgctcaaacacgtggatttaacaaacaaatgctgtttgtcatgataactttttggaatggaaatgaacatttacgtctaagtacgtaggcaaattcagctcatggtatgtagaaaaaaaaatcatcacataaagtatatgttttttccacagtttcaataaattacacaaaaaatcacaatattaattcaaaaaaaaaaaagaccagtttattgatttttttaataactaaaagcagtaatcaatgacaataattaatgccaaatatagacattatattcgaccacagcatctccactggtaatattgaacaccaaagtcttggccaatgcatatcctcttccgaacctgaaagctcccgtacctccaatgatcggcatttccctcaccttcgacaatacaggattccggccatacatcgccacggtgctgtcggaaaatttacccttcgtgaaaaccaagttaaaagccataagcagaccaagcttgttctggtcagccgatgcatacattccttgggctctcccaacttcctctgaggtaatttcaggccggaccgtcaatttgtcgtcaacgactgcaaccaaaccgaaaccggtggcagaagagtttgtggttggaccgttagcgacttggacggaggttggtttgtctccggagacaatgtcgtggaagtagaagtgtaagtgggttagcttatccggtttatgtcctggatatggtgccttcactgttgttgagaaagattttgattctgtaatggtggctgcgagaataagagctaaaaacagaggaagaagtagtagaagataaagactagccatggcgaagaaatggtcgttgcgctacaaactcaaattat

SEQ ID NO: 10544 - DNA, 788 bp, Arabidopsis thaliana landsberg
gtcttcccggaaaatcgagtgggcttgtttgatgaaaatgggtaagcaatggctacagaacccgttgaacatggttatgttcttgtggatctttgtggttgctgtctccggtgcgattctattcatggttatgactggtatgttgaaccatgctttgcccaagaaatcacagagagatgtctggtttgaagttaacaaccaaatcctcaacgcattgtttactctgatgtgtctgtatcaacacccgaaacggttttaccaccttgtgcttctctgtagatggaagcaagacgatgttacaacgcttaggaagatattctgcaagaacgggacttacaagccaaacgaatggatacacatgatggttgttgttcttttgcttcacttgaactgttttgctcagtatgcgctttgcggtcttaacttaggctatagaagatccgagagacccgccattggtgtagctatatgtatatcttttgcaatagcagctcctacggctgcgggtttgtacactattcttagtccacttgggaaagattatgatcctcaaggagatgaggagaatcaagtgcaggctgtgggagaaggaccggttagtaatcgcaagttatctcttgaaaggagatattcatttgcttctaatgatgtgagtaatcctgaatggagagggggagttcttgacatatgggaagatatttcattggcttatctctctctgttctgcactttttgtttgtttggttggaacatggagaggattgggtttgggaatatgtatgtgcaca

SEQ ID NO: 10545 - DNA, 861 bp, Arabidopsis thaliana landsberg
gaatctaatggttcttctcggccaaatactaaggttcctccttgtcctcttgatgtttctacattttgaagaactttgattggtgatggtaaacctaggagatggtctattagtgctttacctgatgcttctagtagattccagcttctcaaatttggttctccttctgctaagttcaagaaaatggctgaggatagagacgaggtttcacggtcagtgactagctcaagtaacggaagcagtcataatttcagggaaagaatcagtggcgtgcttcaccggaaaatagattggagttctctgatgaatatggggaaagaatggattaggaatcctattaacatggctttattcgtttggatacttgttgttgcagtctctggtgctattctcttcatggttatgactggtatgttgaatcatgctttgcctaagaagtcacagagagatgcttggtttgaagttaacaatcagattcttaatggcttgtttactttgatgtgtctttatcaacatcccaaacggttttatcacttagtgcttctttgtagatggaagcatgatgatattactaagcttaggaaagcttattgcaaggatgggacttataagcctaatgaatggatgcacattatggttgttgtcattttgcttcacttgaattgttttgctcagtacgcgctttgtggtcttaatgttggatacaggagatcagagagacctcccattggagttgctatatgtatctctgctgccattggagctcctgcggttgcgggtttgtacactatactaagtccacttgggaaagattataatgattctaatgaagacgaggagaatcaactgaagcaacgtgaa

SEQ ID NO: 10546 - DNA, 1059 bp, Arabidopsis thaliana landsberg
ttgatcgcttttaaatcacatcatcatcaactggagattgagggagaagttacaatcgttgcactgtaagcaccttccacattttaactaattaagctttttcatctattgtaatgtgttcataacattataacaacagaacagaaaagaacttagaaaaaattgtcaaaatagccaaatcatttgaatgtcagatacatattgtcagaaaataaaaatatcttgctaccaaaattctcaaatttgtatctagacatatccatcaaatacaagcaattgattgatctgatcattagacaatggcattggcagcactagcaatccttggccaaagatcagcacactctttcccaataggaccagtaattgcagaacctttcatttctcccttggggttgacaatgactccagcattatctgtgcaacaaaaaaacacagaatcaatacttgctttcatacacactcactaacaatgatcaatttaaggattatatagagtccatatggagcagatgaaagcgttaaagcaataaagcatctgtaacgaaggacacaatttagttttccagacttgtacgagcgtcaacaccctctaaacgtgtaggtggaaacttgacttaaacctggtgatatcaatcacataaactgactaaaatcatagaatcagtaatactagaacaatgggaatgtagtgtccatatggagcagatgcaagcgttcaagcaataaagcatctgtaacgaaggacacaattaaattttccagacttgtacgagcatcaacaccctctaaacgtgtcggtggatacttgacttaagcctggtgatatcaatcacataaactgacaaaaatcatagaatcagtaatactaaaacaatgggagtgtagagttcaaatggagcagatgcaagcgtttgagcataatagtatctgtaacgatagaacacatttaggtgtaccagattttgttttgtatttatacaccctctttatgtttcggtggatacatgacacaattctggaaatgtaataatctaaatctggcataactagcccata

SEQ ID NO: 10547 - DNA, 862 bp, Arabidopsis thaliana landsberg
tctaagaatggcattgacaaagaattaaaaagagttatcacattttcaaaatactaaacgtattttcagatcgccaagaacaaattgataaatctaatggcagttttcttgctgaaatatgtcaaaagaaatcgaactccagataattactctggtcagacttgacactagtagatgtggctgctgctggagtagcaggcgcactctcataatcaaccggttttggtatctctggtgggctagcgcatcgaaccaatgcccaattcactccttcaaagaaaggatgttgcttcatctcagttgcaccacgcttatacgctaatctatgctgaggctctttcacaagcagactcctaatcaaatccctagcagcaaaactgacaactggagattctgggaaacgcagaggctgacccacaacgttgaagagtgttgctcggtttcctgaccctttaaacggggttttaccaaacaatagctcatacaaaaagatcccaaaagtccaccaatcaaccgcactcccatgcccttcacctttgatgatctcaggagctaaatactcatgtgtgccaacaaatgacattgagcgagcacttgtgggctcagcaacgagctcgggcaatggacttacctggtttccagtttcgtttttcattttcttgtctttcttggatttacttgagaaataacgtggagaaaagcatgttgtaggagcagaaatgcaagatggctgttggatgcaagcaggttgcgcacaataacccgagttcttttgcccttcagacgcaagaacagttgatctgaccactgtggggctaacagtacatctcaaggagaggtcgaagtcagaaagcatcacatg

SEQ ID NO: 10548 - DNA, 1255 bp, Arabidopsis thaliana landsberg
cctgaaagtcttgaaagaggtggaaacatcacttttgaagtttgaaatttctttcatatgctttttatataatatttttcaacaagtaagtgaagtaaaatgtcaaaacgatttaaaataaaaatcaagaaaaaggttaaaaaaaattgttaacttctatttccgggcaaattatttagtgttttgttgttttttgttacaaaaagtttgaaataataggatggtgacacaacatcaaattcaaattccaaacaactacataacatatatgccaagtccattgaaactctttaaattatacatctgttatccttttaaatctgataaaatgcaatacaataatagattaaaaggatgtacttcaaccacgtaaccatagaccattgattaatccaaaacaaaaccatagaccatagttcgatacagcttctgttgataaaagtacatgactatgcgattatctaatattagtttaactcttcatctatatattaaaaacatatatcgtttaaattaagaaaaaagtggtgatactgatatcatgatattcatctaccgacttcaagaaataagaggggtcattatacaattcaagaaataaatatccatctttttggatcattttaaaaataattaaatctttacagcgttacctccgcgttggcctggacccttctcttgacactataaaaaccccactctctcttatctcatcacaaacattactcattcacaaaaccatcttaaagcaactacacaagtcttgaaattttctcatattttctatttactatataaacttttaatcaaatcaagattaactatggctgaggagtacaagaacaacgttcccgagcacgagacaccaacggtcgcaacagaggaatcaccagcgacgacaacagaggttacggatcgtggattgtttgatttcttggggaagaaggaagaggaagtgaaacctcaagagacaacgacgctcgagtctgagttcgatcataaggctcagatctctgaaccggagttagctgcggagcacgaggaagtgaaggagaacaagattactctgctagaggagcttcaagaaaagaccgaggaagatgaggagaacaagcctagtgtcatcgaaaagcttcaccgatccaacagctcttcttcctctgtaagtaaaaatttatgaaattttgtttgatcgaaatggttgataagagatcatgatatatatataagatttagattagttttatagatcttt

SEQ ID NO: 10549 - DNA, 1264 bp, Arabidopsis thaliana landsberg
aggccttttttgtaaaacagtaaaggagagctaccttgcatcacaagaaactaggttataagggtctcagtccattaaaccgattgacatatgggtatactaaccgatttacttaaatatatagatctgtttaaagtttaatcaagtaatctttcaatgttgaaaacagagttgacatgtaatagaaaatgtcgacttccagtaataaaaatgtgaaaaatactcgagaacagaacatttgctttacataattccacatatcatattgaaacaagctttactttgacgtttatgtatccaaaacatattatgattattatcattaccaataccagacacaaaccatcatcatgatttaatgttttctttttgctaaaacaacaaataaacaaaaaacttaaaagaaaactgttggaacccaactttccagacataaaaacataaacaaaaacaaaatcaaagtctcggagagagacagagactcatcagctcttgtgtttccgttgcaattttgtcatctgatctctctcccggacaatgatacatagactgacaaacacatttcataaatcatatatacaacatttctaccccaaggacaagagacagtaccgtgtcgtcaagagtggtatggcctttttgtgtcgacttttggatcggtttcatattgctttatgatcacagccaaactgttcgatggtttttacccttctcttgttttggctctcttcataccaaggctattgtaaggagaaacagaaccggacattggagatccttcttcacgaagagttccattgagcaatgctagctcgcgcagctgttgtttcttgtacatatcatgggtttcctcctataaaacagaaaccgagtgtgaaaactttgtaacaataactggtttaaaatcaaagggagggggagagctaaaaacaaaccataggagtaagaagatcgtcaagtatttcccgagcttgcatgagccgtgcatcgactatttcaatcggtaattctgcttccactaagatatgaagtggttcatttaggtgctcgtatcccggttttcctctcatcatttcctcctacaagaagaaatatattaacaccttgtacaaacattgaaatgtagatacaaatgaagttgtaaagtttaataataaataccttaattggatcttttatacttcctcttcctcttataagaacacggcaatcagtacttgcttcaactcgcttcagggagtttcctttaggacccaggaggcga

SEQ ID NO: 10550 - DNA, 425 bp, Arabidopsis thaliana landsberg
gacacctcaaattataaacaacttggctttggctatacatatatatatcgttacttgataagaaaaaacggccaaggttatagattccgaagccggtccgggttaagtgtgttgtaagttaccggatgagaaacttgagctttttcctcctccaatcgttcttgatccggtttaccccggtttggattcttaccacaagggacagtaaacaaagacttggaattaggacaagtctgtttccgcatgaagaacttagcacactccgatggcgttttctggtttggaagatcaagtatacaattcatactaacgtccataatttttctcttgatgagttttctacatttcggaccaacctgagtgaagtaattattcgagagagaaacgttttggagacaagcatctcgcatacaatctccgggatg

SEQ ID NO: 10551 - DNA, 1671 bp, Arabidopsis thaliana landsberg
ctaagaccattagagtagactcatcggcagtttacccttaaaaacgatactagataagcttcaaatatgtacggtgtagtaaaagatataaagagcattctcttccatccatagtatatagtgaaatcgcgcccgcaaattatgagacagcaaaaagaaaaactgaagaaagccagtaaaagccattataagaaccaagaaaatacacaagctggatataagatcaatctagcttatgcttgcttcagaagtatctcagacttgcaaaaccccaaaatataaaacctgtcacaccgtaacgtcgaaaagagatctaaaccggctgctttcgctgtctctcgtttggttcttgatttcgtgcagctgcatatatattaacatgttttagtagaaatttttcactgcgtcatcttgagaaacaagaacaggaatcaagatgagattatctacataccgagtccattagcttcagaggttttcatcacacgtagccttttcaccgagttgatgaacattctaagataattccaacaaaaagaccatcagaaacatttattggaagtgtaagagataaataaacaaggtttttagatctattacctccatggaacatcaccaacaagcatccaatctccttccttatcttcataagtaagtacaaactcagacgatccatctaaaagcctcaacggtttagtgaactgactggttaacccgacagtacccggattagtgcgaaagaacatatcttccaatgtttgcgccaaattctcgtaagaagaatgagcattcaaatccacttttcttcctatagcaactccatccatgttcaccttaataaatccaacttgtactttcccattcactttctttgtcacatctttaggttcatcatctttcactttcttcttaccagcttcttcttcttctcttgctgactttgtagcttggttattaaccaaactgttcatcctgtgtgaccctataggaggccatccaacaacttgactgctacaaacaaagcaaacatcaagtcaggacttgtaatctatccaaatgaatcaaaaccaagaacagattcaactattcaagattcctaattccaaaccagagcatttcttccgacataactcagatcaagtatacatccaaacactaaagaatctttaagaaactcctaaacgaactatgttcagagaatagcaatttcacatcatacaaaaggaattaaacatcttaaaagatctttctttgaaaccaaaaagcttgaaaaagacgaaccttgaacgaggaggagatgaaccagcatgagaagcagaatcagcagcacgtttagaaccaacagaaggaaaatccttagccgtcaaaagccttccacgctctccccacgcgccaccaccacctgatttaccaatcttggccgccgttccaccgccaagactcagccctagaccaagctcaagctcactctcacctttccccatctcaagttcagtaatcatcagagagaccacaacaacaacaacaaaaacccactaaaagaaagagagccctagaatccaaaatcaatccaaaagaaagaaagagtcttttgaaagtcaagaaggcagagagagcaaaaaaaaacaacctgggaaaggaagataaagaaagaaagagagagagagaagg

SEQ ID NO: 10552 - DNA, 831 bp, Arabidopsis thaliana landsberg
acttcatgatcactttgtggcctgttcaaaaaattgtaatttgttaaattcttagtttgatttcgtttgtgtaaaaaaattagtatcatactgctaaaaatccaaattaattgattttacagatttctattttatctcaataagctgagaatatatatcatcaattacgaattttgtgagttattttattttataaattttgttttgccaactagaggtgcgtccaccactcgtgataggcggacgttcgtatggaagagtatcaaattctctgcctactgtttttgaaatacctccttctcctaatcttgggaatccccaagaaccaaacgatgaatcaagtgatcagatggaagaaattccacctatacaaaatcatgttcgagttctccacccatctcgaaggaatggagctaaatggtaatgatactcttagtttcaaactacttcatttcatgaaacagaattgtaaataatgaaaatacacatgtaacaggttcaaaaacaacaccgaagtatcaacacgtgttcgaaagatcattgaagggtgttttaaaggaccatggtatagctggaaaaaagtgccaattttttacaaagaagcttggttttcaacatttaaggttcggtttaagtgcatgtctctataatattttcagaatcgattgttatattaatacaattttcataatttttattttagatatggtttgagtgggatgcttcaattgagcatctggtgaaaacaaactttgaaacacttgctgctgctcggctcaaaggaatggataaaccttgcaaagtcaagaggtaaacaaccagacaggattc

SEQ ID NO: 10553 - DNA, 1667 bp, Arabidopsis thaliana landsberg
tgatatttttcactctttataatctacgtcaacattgtacgttccctatagttattatttatagaaaattaaatacgaatatatgggtacaattaagttaattttagtattgacttatttggtaattgaggctaggaaagctgcataagggttttgagttccatacagggtagttttttttttttgtgggggcattaattttgcctaaaattaacttaattgtaattttgtctacatattattacataattgtttttaataattttaatttattgcaatcacacaaaattacaatagaatgcattaaaaacaaaattgaacttttgctttataatattgaactccattgtaaacgctattagaaaactccattgtaattttgtacatatgtaaaaaaaaaaaaaaacatgattttatgaataaaccatagttacttttgaactaatttttaaacatatcaaaagctataataattaaaggtttcagctatgtgtcatatatgttgataccggaaagtttggtcattcgtctggctctagaagcttgggagttctgacacggccatgtaagctcatgttgtcgagagagatcgatgatattgattgagtcatttaatagtttcgatcttttattgtcaagacaaccaatgtgaatttattcccatgtgacattctttgacttgagctaaactcattctataattcagttttcaaatttttgtgatgttttcaaaatagtgcaagcaaattctgaaccacatctataaaatcccaaaatttcaaagtgaagaagaaaatcaaatcaacaacaatggaagaagaaactcaaaccctaattctcatcacaatcctaatcctaaccctcatcactctcacattcctcatcaaaaaccacaaaccaaaaccaaacctccctccatctccaccgttctcacttcaactcatcggccacctccgccttctcaaaccaccgctccaccgtcttttcctcaccatctctaaatccctaaacgattctccgatcttctcccttcgtctaggaaacaaactcgttttcgtagtctcttcacactcaatcgtcgaagaatgcttcacgaaaaacgacgtcgttctcgcgaaccgtccaaagtcaattgcttctaaacatatctcgtacaattacgcatctatggtatcagctccgtatagtgagcattggaggaatctccgacgtattggcgccgtcgagattttctccaatcatcggcttaatagcttttacactatccgccgcgacgagatccggcgacttatcgctcgtctctctcggtctccaaacgcttcactcgtaagtgagcttaattactaatttaggatataaatttagggacttaatcattaatttaggataaatttagtccttaatcattaatttaggataaaaagttaggccataatcatcattagtataggataaggttaggccttaatcactaatttagaatacttcatttgtaattaggctaaattaccaatttaggataatttgtacaactaggatatgtatatttatttaggccataatcactaatttagaaatcttcacttataattgagttaaatacttaaattactatattttaggatacgtgtaaccagctacacatttatgaattatgatgaagaaat

SEQ ID NO: 10554 - DNA, 1607 bp, Arabidopsis thaliana landsberg
tcagcgaggctaatctacttcaggctcttttgttacttgtttcctacggctcatcctcactggttcttgaaatctgcttcctccacccatttatttcttcttctttgataatttttcagacaaaagtgtttatattcttatttatgtaatggtggtaacagacatgagttatatagttgcttctcatgtagatagaagtctgttagtggagagagaataaaagagagaatcttagtctcagtttgttattaagtgaatgtgatttcagttagagtcaaatacagagactaaaataacaatttttgttttcattatagagagaaaaaacaatttatgacgaattgaggaatcttcttattcaagggttcaaaacacgagtccttacagacaaaggaatggtaacatttcgagtcccatcagtccaagtgaaactaccaaagaaaaaaccagtgttactcttatgactcgacgaagccctaactttaaacccaagtttcttcgtgttcgaacagaacactagagtctccggttcaacaacaatctccacacctcgcggaggctcgaccacggctcgataaactgaatccacaggtccaacgttagtcaccgttcttgtgacggtcacttcttcttcgaggtcgggaatcgtgatggcgggatagttaagatcgaggatagacggtaatggagacgagcattttgtgggttttcccgtgattatagtgattgatgtatcgttgtaaccagtggcgcagaaatagtgaatgtaatcgtcgatgttcatgtcataaactagtcctggatctttggctctttccgcgttcacgagtcctgcaccgtagtcaaatggatcagccagtttccgtggttctccctccgcaaagattggttccccggatggatcagtcttccatgctataaaaacaagagaagaaactcggtaagattagagattaacgaatggtggttttctggtgaggagaagaaagtggttttcgatttcaagaacctgtagtcataatagcggattttagcgcagcaggagaccagtcagggtgtgaagctttgagtagtacgacgagccccgcaacaacgggagtggcataggatgtccctgtgcctagaaaataaccgccgaaagaatcggggtaggcttgagatgtagctcctaaaatcgtcacaccaggggctgctatatcaggctgcatcatttataaacccaaagaaatttccatcattaacaggtgatccttaaattgaaacgacagacaagattttgaaacactgtttagggacagaaccttgagaatggctggagagagtccattaggccctctagatgagaatccgcaaacttgagtcgcaataggacgtcctacgagcgttttaccagtactaattttaatcgtgggagaactgaagagaccacaagccataagaagatgatcagttttacatactctatgtgactcggaaggatgatcaatcactaaaaatataaaataaaggatagtataccttgacgagcggatgaaacgtagaatcttagctccgacttcatagtctacgtagatgaatggttgattatagacaatatcactgtgtag

SEQ ID NO: 10555 - DNA, 739 bp, Arabidopsis thaliana landsberg
agtattgtcggtattatttgcttctctctcctgcaaagtatgtaattgcaaagaaagtctctctcataaagacatactgcatcttgtctgaaatcccaatcaaatgtacttggcaattttttgttcatcttgttgatacctgaatataggcattatcgatattggagagttcctggactctctcagtaattgtctcatcttcttagttgtgccaagaaaactcaatcttgttagctagatacctttttccacctgtcacatttttacggtctcatatatactttccaaacttttattctcctaggtctaagtgatgcggttatggagcgtctacggcagaatgctcaagctttcagtcaaatctcctcaaacctttctgtgtgcaaggtaattgatttgtatctgatccaaatgctagctggtagaaaaagattgcataagcagaaaattgaccttaaaaagatcgtagatcacatgcacaatgtttattcaatgcaacttattgtttggttgggatacatgctgttgtcctttcgtaatggaattcccatcctgacatcctattttctgcatacagccacaggataacgtcagtctgttttatatggcaagaaataacatcagtgccatcttgaatgagtatgtggatctaatagcatgccgaatccctaatgattcatttcctctgtcgtaattctcaaactcgtctatgaaagcttatcttactatactcttggct

SEQ ID NO: 10556 - DNA, 766 bp, Arabidopsis thaliana landsberg
cacttaaaaccataactagaacaagtcgaacttcttcggggcagatgttgcttccaacgtggtaagttgttgaatgcttctttctcgatcccaaacacactttggaactcttcctcagatagataagccttgtagtaaattgatcacaacaaaaagaaacagcaagttagttaggtaatgtagtaaagtgagttatctcctagtagctaactatctaactaattcacctctctgcgtttgaaatcgattccagtcactgggttctcagatttagctctcagctgttcataggtgaaagttgctccacttggttgtatttcagaatcaccttgctcttctgtttcctgctttgcttctgtttcatctgctgcaggtgaaacttcctcttcttccttggcttcaagaccagctacctctgaagcctcttcttcatcttttgcttccgctgtggatgaagatatttatagtcaattgtgttatcgaagtttcagaacgtggaatcaaggagaaagacttactcagagggatgtcatctgctgggttggagctagtggatcttcttgtaggagaggtatcaggtgatttcttattttccgcaacaagaacttgagaaagagcagccactgctgctgctctctgtgaagcctgactcgtccccactggccttggtggtggaggcgatttagttgatgacgaagaagagttgaatgcggatgacaaggcggctaaagcttcagctctctgtcttgggccgtcgtgactttcg

SEQ ID NO: 10557 - DNA, 734 bp, Arabidopsis thaliana landsberg
gtttagtctagactgcaacaaatttcttaagtcattgtaatgagaatcgtgtcaagaattatactctctgaatttaggacgggactctgaactagaaggttgaaaatgtgttcagcttccaaccagatagatgatttaacagctaaatagtcatagattggtttgttgtacaagcagagttattgaaatgtcaattactgggatacttacggaaaaataaaatcaaagccattattctttatcaatatcttcagttatttgacttatatctcagaaagaatatagtagaaacattgaattagggtatagatatttaccgaataggcaggcctgttactagaagagttaaatgccgaatttaaggcagctagtgcttcagccctttgccttagtccttggttcccaccgttagacttatcctgcagcagaaaagggacaaatatcatgaagtagccggaaagtaataagagcgttttctttcattgtcccaagtcctaaccgaactgaaaaagcaaatttgtattacctccacaacgtggtgagtgccaaataacaacgatgcctttttctggaatgaatttccttgtacctatatcccaatgtttaaaacagaagaaaggtaaattcaaggagaaaagaaagagaaacagtaaaggaaatccatgaggtaacattcagagttatctagttatattatctaaatccctcttcaacactaagtcacttacgatagc

SEQ ID NO: 10558 - DNA, 485 bp, Arabidopsis thaliana landsberg
taattgttttcgataggtttattcatagtaaatacgaagtagatacataattaccaaatacatgtagtcgtcatgaccccatgacatgagaacattgtctaaaccacatccttcagtgtaaactccattttttgtgttgtactttgggttgttgatatcatggtttcctttgaaatactgcaagacaacaatggtaaatatattaatcaagagctcaagtatatttttgtcacttaatttaatcggaaaacgttagcaaaaaatcggaaatatactaagaatagaactattttatcttcttttttttttttttaccttgtggtgaatattggctgagtcgaaggtacatccaactggaaatgtatcgcctacaatttggtggaagtgttaaaaattgtttaatttaattctaaacaaagaagaggataagtcatattgaatacacaccaacgacagcccactgtggaagaccaccgaattctggc

SEQ ID NO: 10559 - DNA, 935 bp, Arabidopsis thaliana landsberg
tacaaaatgatctattattgttatatagataaagtatattcatctatattcatataatagtaataataacttctaaaaagaaagcgagcttgccttgcaattccattgagctagaaaatttattggagcttagatctagagctttcagctttttcagatgaattaactctgccataagacaaagagacacagagtaagacacctctaataattaatttgtgttgatatgagaaggcatacacaagtattatataaaccaattatataataaagtactcagttaaatttgtttaaagttccaattaattgacgtagacgctaccttgcatggagccgtttagtttgtttgctctcaaatccagcagttccaagtttgtcaagtcttttagtcctgaaagataatccaatagaatataagactaattggaactaaaactttgttgtgctccataggcctctcgttaggaatcgaaaaatacacctttgataggaaaagggccacccatttcgttatacgtgagaataagagttgtaagtgatgtagcggcattaagaaaaggaaatgtgctgtagttgaaataattcgttgagagatccatgatcttcaagtttcgtaatccacttaaacttctataacctgcaaacgaaaaatcataagtatacaaaaaaataagatagctcacactacatgcaaatgaaattcatgaatttgtgatgttaagtgtggtataccttctacgtcatcaaagaagccattgaattcgttgtatccttccgtagataagttcagacttcgaacttcttcaaagggatggagcaaagaaagatttaaaggagagctctctctgaagtacatatcaccaacagaaagctcgatgacccgcccgcttgtacgattgcatctaatgccattccactggcagcaatcactcttt

SEQ ID NO: 10560 - DNA, 800 bp, Arabidopsis thaliana landsberg
tcactcaagatgcagagtaaacatcaattggtcactaagctaattttgcaagagatttttcacaaaaagccatcaatatcaatatctgcagggatatgtatattggttgaaggaagcattttccatgatacctttttgcggcgtttctcaattttgcagctgccatattagggagaaatgaataaggaagcatgacagcgctgtgattgcttctatctttgcactcaacgaacctacatcaatattgccaacaatcacaaatgagttaaaacggattataattaagttaagttacacagaatttcatcagcttgatcatgatctgatctcaaagattcaattgtgcctaagaaacccaacgaaaagaataaaagaagtgattaccatgcaagaggacttgcggttcggttaatgatcaagagatttgagtagtgactctcttgaagcctatgccgagtgactccactaacatgtgcaatccctctttctcccaacttcatacttgtggatagaacaatatgccatgtcttagagtcatctaatatcaccggtatcttctcagatatgaggtcaatgtcatacaatgagtccattgcacaagagctcccaagccaactaagacatccaaaagcaacccttgtgttaagagattgacaataaacattccccccaaggttgcaaacaagtcaagcggataacagaactcacccttcctctgtagttttgttatcagatcgattgagtatacaaatcttattatgtattggattgatgcacattccagaaggcgttacgaaggt

SEQ ID NO: 10561 - DNA, 1854 bp, Arabidopsis thaliana landsberg
aaaaaaaaaaaaaaatttgtccaaaaacccagattttttattttttttggggtttaaatagtttggagaaaggagaacaatagggaaaaacgcaagttgattgttaatttgtttatcaatttattgaaatttaatattgcttttatttgtgttatatactttacaaaataaaaatatatacagttacttttatcatttttttcctaaaatctagatttatttactttttccaaaataaaaatattgtaaaaatatttctagttactgtatgccacatcaatttttttgtcagtttgtttctaaaagctaaattaaatcatttctttaacaaataatggaaatactaacatttctatattattatcttctttatattgttgaccaatttaaagttttcattagcctaagttgatcttacgttttctttatattgtttgcccaaatatagctttcctatatctttttcaatatagttttccaagtttaacggtttactatattgttgcccaaatttctttcaagttaaaaaatttatatattttactttcttgtaaaatcacctttttagtcttataaattaaatttattcagtaataaatataacttttaatataaaatgctcataatcaaaatttaattatattataataaaaatggaactattttaatagaaatgccgatatggtcaaagaaaatccatctgctcacttttctcctttttcaatattagttcttttcaacaaaagttttgattggtaataagttcttcctcttatgctgagttcttttttttttttttttttttgcaaccatatcaagggaataaattgatgttcaataccatacataatactgtaacatattctaccatatccatatcaaattatcaaattccacatttaacaatttacctcaaaaatcactctttcaactacaaagtcaaaccaaaaataaaaatgacatttatatccaacaatttgttctctgtaaatcaaaagacaagatcctttgtatgtttcttacagcattctatcctgaagatcactgaatatactagaggcaaatgttcccagcttattctttgtttcctcagctaagttagcaatagatgacatatcttgctgcgcctgtgcccaataataaacaaagtcaaataaaaaaaccttataagcagagttaagaaaagctgaagaatttgattctacttcagaactttacctggaaagaaattcggttgatgagatcgcttgcagtgatatcgatgttggaatcatctggtccgtggccaaaaagatcagaacttgaaatagctgctgaaccctgatagatttgtaatcgcattaggcatgtatgaacaacgagactaaagaaaactagtatagagtttgatcggttaaggacataccgagaacttctgaagggtagcttttgagtcaagatcggcatctctgttctgatttccgaaaaattgggcagaggaaatcgatttggcgtttgaaaacttctttcttgcttcatctgtttcttcaacctaagtaaaaagaaaacaggtaaacaaagaggaatcgagaattgatttctatctctttcttcagttctgttaaaaatgaaacttttctttacctgagctttggatgagcttgagcttgacttcttggggaaagcactgtccattccaaattcattaaagaaatttgatgactttggtggagcaacatggctaagcacccgtgtgccactttgcccaccagattgctcatcatcaaagtactcaaatcgagaggcaaatgatgatccagctgctgatgtgtcattggttggagaagcagcaggaatcacaggtacaggttcttc

SEQ ID NO: 10562 - DNA, 1221 bp, Arabidopsis thaliana landsberg
aaggttaaaaagaagggactctaaaatgtgactaatcatattatcctgggaacgttaagatcataagcattgacagccatctcataaggaaatgattagtaagagaataagatttagataagtaccatcccaagcatcataaaactctcccacaggtgtggcaagtctttgtgaactttcgtccccagcatcaccctctacgtctgtgttacttgtgaagcttgctgattcacctgggtcatagaaatcttctgactcactctccttgtctgttttaatagggactggctcagacagaccatttacccgttctaaaccattagcagcgttatccaactctgacttcccattcccacttttcccatcaagcggactccaatttccaacaggaccatcaacaataccatcaaaattatagtttccaaccgtacgagcatgaactccattggaataatcatcttcagtaacctcagtgataggaaacgagaaggaagtggacctcctccgaggggaaacctttacatctgtttcagcagtaatagtttcctcttccagcgtcttctggtgggaagaagacacaacattagcctcagaagagcttttaagaagacgtggaggtccacgtgatttgtggttgatgatataaggcgacggtgggaaagacgatggcgaattaggaagcggaatcgcatcaggtgtggcgtagagagcaggtgacatcagaggacgagtaactgtcctctcattaggtaatttacctttacctttctccagttttgatatcggtggctttgaataaaacaaattagttgtgcttggaacactctcgacagacgtggaagcccctggctctagcattctatccaaagcaatagcagaaaaagtaggcatggctctgcaatcattcaagtatcaaattagtaaaaaaagaaaaaccgaaaccacaaagagcgtttcttcatttcaatcgaatcagaaatcaaccaacaatggtcattcgcataagtgagaattagctattgggaaggtacaaagcaaacaccgcgtgctcaaaccacaatcatcggtatacctaaacaaaacttgattcaattctcgcacgaaaaaaagaagctagcaaaatcaaatcacaaatctgataatctcgaagctaacaatacgtcaagccgatgaaaataaatcgaatctctcaagattcagacctaccataacgaaaatttc

SEQ ID NO: 10563 - DNA, 1591 bp, Arabidopsis thaliana landsberg
atatttttcccatcggttaagggggtcctaaccttctcctcgcttcacagtatgttttcctttgttggttgtcccgtctccctcgtccacagccttctaattagtttatattgattctgttttaagtttgatatcaaatttcaaatgtgaatgattttacaattctgtgagatgtcatgctcgagcctttgagacaaatacttgcaccttgatataaattggtcgaatcaaatattaattaccatgctcgagttttactattcttatgacccttatgttgtctcctacaaaaacgagagaaagacgatgaaaagacttgaaatccaaggaacccaagcctttaaggttagtggatttcacatctttctaaaccatgtagagaacgtcaagcttattcacgcatagctggtttgccacattggctcttaagttcaatctcatagacaagtatttatgcaaatccgtctttattctgtctttatattctttggaattcggccacaatcacaagtttttattttgacatttaagagaaacaaaatcttaaaaacgaaccctgcaaatagctaatgatcagtcacaaagtaacatgatctagaagctacaataaataaacttacaaattccctcatgaacgtacactacattctgctgctcattcacaaaactctctcttagatcgttcactttactcgtcagtcacacatccatctgaagccgattgcacgttcttgatgtactgtttttagaatatcataaaccattcattagaaactaatccatcagatgtcaaagagacatacattatatagatacaagtggattcgtatagtaccttatataggactccgcggttaaccttgtatgcaggagcagtccatttctttctacggtcattcatttcttcgggtgagacttgtgtgtctattctcttctttcctatgtcaatggtgattatgtctccgttcttgatcagaccgatcggaccaccctcctgcacagataaatagtaagcacaccggagaattgctttcagcattattatcttcacattctccaatcacattaatatcagttttattatttgaaatattccaaaatcatcataactgcataagagccaccacaaactattacaggatcccttgacccttgttcctttttgctaaaactatatatgactatgacccagtagcatttatttttcaatacacaagaaaaatatcccagaagagggacatggatctatcaaatttatcttgcaagtgcaaaatttagaattttgctctgatggagccagtgggcagagagaaaaaaaaaagggagagagagagacctgagcttcagggcaaatgtggccaacaacaaaaccgtgtgacccaccagagaacctaccatcagtcagtaatgcacattcctgcatcacccaatagcaacatattggcactttatataaggtgtgttctcggatatggacaaagtagataaaaagatttaggtcactaccataagcataatatagtcagaccatatcaaaggaaaaaataacgagttctttaatttagaacataaaaaattggatcagaactta

SEQ ID NO: 10564 - DNA, 943 bp, Arabidopsis thaliana landsberg
  unsure (1)..(943): unsure at all n locations
taaactttttaattataaagatattataatttctcgttaaacattttgatcaagtaatgttcttattttcagaaaatagcatattttatattcttttataagaaaaagattctagttaagaacattacattcactaataactactatacttttctatagaatactaaatccctacgtttctattaatcttaagtatttttaccactaaagataccattatatcactttctcaaaaaagcttaatcttccatacatacaaaaaaagttatgtttagaagtcattaaatccattatttggttcacttaaaacaagttggtgattatttgatttttgtttgatttaatgtcattttggtttcattttgtttctataatcatttcagtgttggttaaaataatgtaaaatacttctaaacaataattcaaccataattatataaaagcaagaaaaattattctgaatttaaatttcaaattatctggggcacgtttttaaatgtggctgcatatccgtcttgtttgttcaagatgaatgctcttctattaggtcctccttctaaacatctccagctccttttcgttggtcatccaatcatttcccagtagatactgtctagtttttgcatggtttgtgtagctattgggatgtcaactctcctgcttttaacctcctcttctccgtctctgtttgagctgctcatgtctccagacctcctgtgaagtccgatctctacaactttggtgagaactaccaagccatcagaactctagatccgtttatcccccagattcgccccctcaggctccaagttgaccatttcttgcaatctgttttagctctttgtatgacctatagtctttccttttctaccacctccttttcacctagcagcttctcctccattcaccctcgtttggatgatgagattnggtatcttccact

SEQ ID NO: 10565 - DNA, 991 bp, Arabidopsis thaliana landsberg
  unsure (1)..(991): unsure at all n locations
aggataaaaatagaaagattgttctttctacaagatatggttatcatactagtttgggaactatgaaaatggagtacctttccatcatattctttctttagtaaaacctcaggagcgatgtaagcaggagttccaacagttgattttggttgcgaatgtaacactgatgactgaaaaagaaaacacaaagcttagagatactaactaactcagagtttctgaaatgttttcaaagatacctttgaatatccgaaatcacatatctttagacgaggggccgggctaccatctaataacgtattctcgagctttaagtctcggtgacatacttgctacaacataaaatttaacttcttaagtcagctgaatttcacagaggatgaagcattgatttgatagagagcatttttcattaccatagcatgacagtaactaactcctgaaatgagnnnnnnnnnnnnnnnnnnnnnntacatgatagtaaacgatatattagcctcagcattttgaatcttcgattaatcatcaaagcaagaaaaaaaagagagaacaacctcgtcttcgctgaagcggcctgcattgcagattcgctcgaaaagttctcctccagatgcatattccataacaatggctaaatgggttggtgttaatataacctgaagcaatcctaaggattaaattatagaattccttttttttcctgaaaatgttaataataagaaaacagcttaaaagagagttgaaaacaaacctctttgaatctaacgatattgggatgtcttaaggacctgtggttgattatctccctttttacattttcatctatctgtacaaatacaaaaagtcccaccattaataccacgttccataacaaaagaaacacctagagcctttaaaacaacactatacaacataagtcataaagcaaagcagagcaaatttggtcttccataaaaatcaatcaattttggaaatctataggggtaaacca

SEQ ID NO: 10566 - DNA, 1531 bp, Arabidopsis thaliana landsberg
  unsure (1)..(1531): unsure at all n locations
ttacatattataatctatctaattccttaactgaattcaatttggtttggtcgtctcatggtattgagaagtcaanaaagtcccaacgaagaatcatactttctttaatgtatacaatattcgtttgtaacattttaacacgtttattttggaaatatcatactgtccatttcgattttaagttggttggtcgtcactttgcaggttcccaaacgaatttaataacaacttctatatatgtctccatcaccaaaccctataattatactgtagttcataaattttcatagttgacaaagaaaatgattttcaccaaaagaatatagagagtggtggtccttgttctgtcttctatcacttttctttaagttttatatatgttccacttctttggtatatttcctttacatgatgttgaaatttgaatttaacttcaaagggttttcacattagattccaatgaggtgtgcagattgcattttgtcacaagatcacaaggccacctacatcctaagactataacccccaaagacccatatgcgaatccattgagtagtgatggaggaattttgttttcaagtccaacggttcatcgtaaaatataagcaaaagcattttacaagagaaacatgacattaaccaaaggcattacataccataagaaagcaaaacaagaacaatgtaataataccaagatacacacactcgctcgcaacaccacagattctctacagcttaacaaccactggataaaacaccttaatccgggtcacagttttattcttcatacaccacaatgcaactccatctcaaactttatagtttaagaaacacaaactcttcaatcgcagaaacacccccaatcctctcaagtgttttgttgtctggttcttcatcaactccaatcgccattatcgcttgtttcctcaacactgttcttccaacactcatgaaattcacattcacgttttgttctccaagtatgttaccaacctgtccaatcatccctggttgatccacttgcctgcacagtatcagattcccttcaaggctcacatccacaccaaatgatccgacacaagttaaatgcggaactccgtacttcaccttcccttcaatacttatatcaccagcatcagagacagcaccagcgaaatttgactccacattcaaaatctgaacttggatggaatcaacagggtactctggtgatgaatcaacaaccattcgttcctcactaatacgaagacccttttgtttagctatgaaatcagcattcaccaagttgacatatgaatctgagatcggttcaatgattccctttgtgatcattgcacgaagtagtctagtatccaaatcatctcggtcacgagctgaccgatagaccaccctaatggactgtactcctttacctccagatgctaactgcacagctaacctcccaagcttctcagctaagacaatataaggagtcaactcagacaagacctcaggagccaccattggagcattgacggcagtagctgataac

SEQ ID NO: 10567 - DNA, 808 bp, Arabidopsis thaliana landsberg
  unsure (1)..(808): unsure at all n locations
tggaagcagaacctgaccacgatcatctctcacgacccaagacccaccacaatgcttttttttccctgaccagaccgctccaacagttgcgtgttaacccaacctatcggaggagggtcccaacgtggcctacaagggtcagcccgattgttctcctctggatccactagacggataagagattgtgccagaaaccattcctgcacatcatctcttatcttaagaatggagcttaaggggcaaaaacttattccttcgaataataacaagtttctattcttccataacctccataaaacccaaggccaagacctttttacctgaactggaaccctggctaaaaaactcagctcaaaaaggaactgaatgttggcaaaaatggagctgttctgaaaaccaaactcgggggtggggactcccgataacgctcatacctgcctagccactgaacaagtaaaaagcacatggtttatagattcaccttcttgaccacagatttgacaacaaggatcaacattcattcctcttctgagaatttgatccgcaacaggaagagcagcactcaatattctctagagaaagagcttgattttgggagaagtagatgtggaccaaatcttttctttcaacccattagtagacggttgcctacaagcctcaaagagtagctctggtttattggattggaaggccaaccagtaaccggacttaaccgaatactctnctgatttagagtgcaaccaaaccccaaagtcatccatgtcaaccacatgcttttcttacaaagagatcatatccactgaaaaac

SEQ ID NO: 10568 - DNA, 683 bp, Arabidopsis thaliana landsberg
ctatccttttttgatgaaagattaccaaaagccctacggctgtgtaacagaaccttgccttgctcatccctaacaacccacgaccctccacaaagcttttttttccctgaccaaaccgctcccacattgcatttaacccaacctatcgaaggaggttcccaacgtggcctgcatgggtccacccaaacattctcctctggatcttcccttctgatatgagattgtgccaaaaaccactcctgcacatcttctcttatcttgactatggaatttaaagggcaaaaactgacaccctcaaagaagagcttgtttctattcttccataacctccataagacccaaggccaagatcttctaatctgcacagagactaagtcgatctttcttagctcaaaaaggactgaatattgcgaaagtagagctactttgaaaaccaaactctcaagtgggaacccccgataacgcccagacctgcctagccacagaacaagtgaacaacacatgattaatagattcaccctcttggccacaaacttgacaacgagggtcaacatccattcctcttctgagaatttgatccgcaacagggagagccgcacttaagatctccaaagaaacagcttgattttgggagaagttggagtggaccaaatcacctctttcaaaccattagtagaagggaa

SEQ ID NO: 10569 - DNA, 1059 bp, Arabidopsis thaliana landsberg
tgatttcaggccttgttcatgaactcaagataaaacttagtaatctttcttttatttctttttatgtggttgtgatgagatgttgaaacctttgcattttaacctgatctgtcttttgtgatgtttccttctgacacttcttttcattatttagatacaggaaactgttcagctcccatgcttgagatggggaaatcaaatatacatgtgcaagaatgggattgggaaaccaaagatattctcaatgatactactgccatggatgtgtctccttcttcagctattggggaatcaagtgagcataaggttgctgctgcttcagttgaattagcttcttcgacttctggtgaggcaaagatttgtctaagtttcgcgcctgcaactggagaaacaacgaatttgcatttgccttctatggaggatcttcggagagcaatggaggagaagtgcctcaagtcgtacaaaattgttcaccccgagttttcggtccttgggttcatgaaggacatgtgtagctgttacatagacttggcaaagaattcaaccagccagttgcttgaaacagaaaccgtatgtgacatgagtaaggcgggtgatgaaagtggtgcagttggcatttcgatgccgttggtggttgttcctgaatgcgagatctcgggagatggctggaaagcaattagcaacatgaaggacattacggctggtgaagaaaacgttgagattccatgggtgaatgagatcaacgagaaggttccttcccgtttccgttacatgcctcacagctttgtgtttcaagatgctccagtgatattctcgctctcaagtttctctgatgagcaaagctgctccacttcttgtatcgaagactgcctggcttcagaaatgtcgtgcaattgtgcaattggtgttgataacgggtttgcgtacacattagatgggttactcaaagaagaattcttggaagctcggatctctgaggctcgtgatcaacggaaacaggtgctgcgattctgtgaagagtgcccattggagagagctaaaaaggttgagaatttggaa

SEQ ID NO: 10570 - DNA, 872 bp, Arabidopsis thaliana landsberg
gggttaacgtttttaattacgtaattgcatgaactttgttttttacatccccttaaagtaatatctaatatcgaaacaactttaatctttctagacatcccactttttttgcatttagcatgatagtatagtacttactacgccaagatattctttatttgcatccaataattttaattgagtaaaatttattgcataaaaacaaacatttttttaactaagtttactctggttcatactagatcctttaccataaaatatgctaactttttctactataccaaagatttaatggtaatgtgtaggatgagaaataacattttgggatgacaatttttactagatcgttaactgcaactccttagagaatacattctcttgtaactatcaaatgtctgttttcatttctttattgttgcagccttgaccgaacaattgcatgcagaaattgaaaggctaaaagcaataataatttcgaacgaaaaagggagtgtgaaattctaaaggctcaaaatggaaacctgtgaagtattacagtaccgtcgcgagtttgacagatccaacatgcaaggaatggacccaaacatgttcacttggtctcagccaaaccttggtttttatggacagatttaaggaagttgttgtaactttgacaattccatgggatcaatgattgaagttatagtcctttacaatgtattagtttatataatttatgttcatgttgagagtaaaaatgatagtaactgtgtgaggcttccttcagacgatatatccttttaatttcttatttatatatcaatttatgaaatttttccataaaattatgtctcgttttttttaactacatgtccaatactcgcccgtacatg

SEQ ID NO: 10571 - DNA, 754 bp, Arabidopsis thaliana landsberg
tagaagatataagatttgaagattatatgatctgaatactctccaaatcgtataagagtaaaacctaaaatgcacatcttattccatttctagcttggcaaaaatattttttcttgaatctttttaattactgttagatactttatagtctatgagatttaatgtaatttttaaaaacttacagatcattaatatttgaatatcccattgcaactagatatgtttaatatttgaagtcacatgattttttattgtcactttataaatttaaatgtgactatagtttataattaattgaaaagaaaaagatcagtgtcgatatttttactttatatgtaagttaactatgaattaatcatatctatggaatctattcttactgaattaaaataataggcaatgtaattgtagtgttttcacatattgaataagacaaaccgattaaggaaactaattcaaatatgaatgtttgacaaagagaataaataattctatatttatataaaaagtgattaagaaaaacacagctaaaaagaaaaagtaggaagcctgacacagttactatcatttttactctcggcatgaacataaattatataaactgaaacattttatagacctataacttcaatctttgatcccattgaattgccaaagtcaccacagcttccttaaatctgtccataaaaaccaaggtttggctgagacaaggtgaacaagtttgggtccattccttgcatgtttgatctgtcga

SEQ ID NO: 10572 - DNA, 602 bp, Arabidopsis thaliana landsberg
atgtcgttaaaaaaaacgagacataattttatggaaaaataacatttattgttatataaataagaaattaaaaggatatgtcgtgtgaaggaagcctcacacagttactatcatttttactctcaacatgaacataaattatataaactaatacattgtaaaggactataacttcaatcattgatcccatggaattgtcaaagttacaacaacttccttaaatctgtccataaaaaccaaggtttggctgagaccaagtgaacatgtttgggtccattccttgcatgttggatctgtcaaactcgcgacggtactgtaatacttcacatgtttccattttgagcctttagaattctacactccctttttcgttcaaaatagttattacttttagcctttcaatttccacgtgcaatttttcagtcaaagctgcaacaatagagaaatgaaaacaaacatttgatagttacattcatcccaaaatgttattttgtttatacattgcaataataaattatttcacatcctacacattaccattaaatctctgtatatcaaaaaaaaaagtaacgtattttacgggtaagaatctagaatgaacg

SEQ ID NO: 10573 - DNA, 956 bp, Arabidopsis thaliana landsberg
aaaacttcgcactatttttgttgtccgatgtggcaccagttctaggttttcttgattgaaaggccaagagaggaatgaagagaacggctaaagggttggataaagttgctgaaggttggattgaagaacacaagaacaagaggagtgatcacggtaggagtgaaaatgactacttggatatactcattaagatattgggacaagacaagattcctggtttgagtgatactcacacgaaaattaaagccctctgcctcgtaagacctatatacataaactataatataaaattttaatacatttgtaagtttatttataatcaagaaatttatatttgtgaacattttttggtgcaagaacttggtattggcagggagcgagacggccattgtggttctggtttgggcggtatccttgctcttgaacaacccgcatgtcttgaggaaagctcaggaggagctggacagcaaaattggaaaggagagagttgtggaagagttagacatcaaagatttggtttacctccaagccattgtcaaggagacatttcgtctatacccaccagtccctctcgttgcttacagagctgtggtggaagatttcgacattgcattttgcaaatgtcatgtacctgcaggtaatcaaaggctacattaccaattaatcttgagattaaagttcaacaaatattaccatattaccaaatgtcgttagttcaactggtaaagatcctacgcgaagcttagagatcacatgttcgagtgacgttttagacgaaactaatattataagttgtggtttccggagtagagggattatgggttttggttcataacctcctggtattaaaaaataaaaaaagtcaacacatatgacagaatgaatgttatcatctctacatacatagtcatttactatcagggcacaattgatggtgagtcatggagatcacaggg

SEQ ID NO: 10574 - DNA, 1207 bp, Arabidopsis thaliana landsberg
attttttttataaataatataatttaaataaaatgaattgatgaataataattacaagatgttttttcccataacagaaaatgtataaatgaattaaaaaaggtcggtcataatcgaaattggaccaactcttttttgcttttcctaaaatgatgcttatataccgcagcaaccattcacatcccaaattttttgaaattatttggatgtttattaggttttagtagccccagtattgaatcgaaacaaacgctaataaaatcctagacctaaaaatttatataaaatctataaatcgaacagtctaataaagatcaaaccctgcaatttgcaggaacaatcttgccacgaatcgaaccaccaacgttctcacacaaagccgtgactaaaccgtcacgtccaacgtagtgcaagttgatatttgagagctcaacgtcttgacaaggaaacgttttactacattgcatcttcaaagcctctttgcttgttgaagttccccaaatattgttatacttgacgtcttttatctgaacgtgagaagcatactttccaggactatcacattgtccgtgtggacaatactgctgatcaatgacgatagggtttccaacattgatcatttggatgttctcgtacaagaaattcgaaaccgaaatctgcgatacggacttagcccatgtcttgatacgtaaaccgtctgtggtaccgttgataatcgagtttctgacggttaagccctggacgttcttctcctctttatatctcccgagactcccgacactaataccatgtcctggtccgcatctgttgttgggagatatgaaaacatcatatcatataataatagacataaatattcgagaatattattatatcttatagtttacatatagtaaaccagtaaataaaatgaagaataaatataagtattattctcaatttttaccagttatctaaaataaagaaaaatattacagctcattcaaagtttgttaagaaagaaaaagttaaggaaacaaatcacctactaaagaggaaacgaataaactaaatgttcctctatttgttattttcaattcaaaaccttcatcattatttttttagttaatttcaaagtaacattttgcacagctagtgagattgagtcaagagttatatttacctgacattagagatatccaaattgctggttccgtcaaggattgcg

SEQ ID NO: 10575 - DNA, 1132 bp, Arabidopsis thaliana landsberg
  unsure (1)..(1132): unsure at all n locations
cattttgaactttcaatcacccagaatgggccgagcaaccaataataggagttatgagttcagcaccagtctcatgatgatgttatttcatttaccaacctttgtagaataggataagcaaaatatagtacaagaccagctggaactgcgaaaagtattgtgaggaggaagtaaagggcaagaattatgaggctaccaggtatagcaaagaatacgatcagaaggaagatgatcacaaacggaaacttggaggtgaaagagatgaaaaaatcaagagatttgtgaaaggagaagagttgtctgcttggttggttactgtggtcatgatgtggcaaaaggtctgtagactggttacgcaataaaggcctcgcaaccagattgttgttgctgctgtggtttcccannnnnnnnnnnnnnnnnnnngtcggagccgattgctggttatcagtgaccaaggaaccatgacttgtcctgtcaccatgacttgtcctgtcaccattcagactctcaaccatccagagaaggaagaaattcttccgagggaactttagattacccttgtaaacaatcctgaacgaaagcaactgacaccacgggcacgagacgaaaaacggaatccgaatatcttggcttgagagtctcaagacagcagattggagaccaaagacacaattctggcaaagagtatgaccacaccataacacataaggaacattctcaacaatgttgaaagattcccaacatatgggacattctaatccctcttcatccctgctaatatttgaaacctcatcatctgagcattgagaggatgcttgagctgaatctttaggggacttctttaaccccatacttccaatgacattcgacgcaaagccccacattttgatcaaacttgaaactgagaatgatcaccaaactttataaaacctgagccaatgtaccaacatttacccagtaaccttcccagattgaaaagagcttctttgaccaatacccatcattttaacgaacctggataacaagtgcaaaaatcatagatagtttagcaaacattatatatgaaaaaattcacaaaaacacaaactttcatgttattgggacatgaaacagattacagatcagaagaatg

SEQ ID NO: 10576 - DNA, 1591 bp, Arabidopsis thaliana landsberg
tgtagtaaacgctttaaacggcaatgcccatgaatctacccctgcctcaagtctcttccagttgatctatcatgtatagagtgttgctctttaggtatctcggtcttaagcaacaatgagttctccattatacaatctcatccaacttagtaccgacatgactctaccagcaacaacactcttaattaactacaaagcaagcattaatcactaataaacgcataatcgaaacaattaaacaacattctcagtttctaaacctgtttgtcatccacagcgtcggagattcgtttcttcacatctgagaaaccaaacatttgcaatgaatcaatcaataaaaatgaattcaaaaaccttaacaaagaacacacaattaccagattgtgaagtcaagtaatcgaatcgatcaaagagataaaccatttgctctttcgtcaacatccccgagctttgcagcgacgacgccattgccccaaaaaaaaaactctttggagccacaaagtgggaaattgggaatgccacaaataatatgaaaatgacggaaatgcccttaaccttaatttcttctgtctatattttattccttgtcgcttttcatattaatttttaatatcctttgtcttggtcgctttttgaaactttatcattggattcattaatcgaataagccctaattcatggagattaagctgaagaaagagaggataaaagcaactaattattcattaattcaaaaaccaaggataatacacggtaataatacaagagtagaatcgtaactatagcatcaaaacaaacgctctttaaaaatcttcgtcgagagagaagacatggttatcaaacgcgccgttaccattaacgctagacataacggaagccttttggtaatcaccaacacgtttctcgaagaaattcgttttcccttgaagtgaaataagttccatccaatcgaacggattagtaacaccgtacaccttcccgtacccaagcgcacccaaaagcctatccgcaacaaactcaatatactgactcatcaaatcacggttcatcccaaccaacgcgcacggaagcgcgtcgcacacaaactctctctcgatttcgaccgcgtcgcagacgattgatttcacgcgttcttcgctaagctttgttttgagtagcgtgtagagtagacaagcgaaatcacagtgtaaaccttcgtcacgtgagatcaattcgtttgagaatgttaatccaggcatgagtcctcgtttcttcagccagaagattgaacaaaagcttccggagaagaagataccttcaacacaaaggacataatcgtcaattcaagtaacaataaggaagacccacaaaaaataaagggtaaaatagtaaatataaggtaccttcgacgcaagcgaaagcgatgattcgttcggcgaaagtctgagaaccgtcgatccatttcatagcccattgagctttcttggcgacgcaagggattgtttcaatggcacgaaagagatgatctctctctttgttatctttgatataaggatcgagaaggagactatacatctccgagtggatggtttccatcgcgatctggaaaccg

SEQ ID NO: 10577 - DNA, 1629 bp, Arabidopsis thaliana landsberg
  unsure (1)..(1629): unsure at all n locations
gtctcattttaattgaaacttcgtgcatagtagtaggaattctaactcgtctgtaaatccgtaatatttaacacgcattaacgaataggtttgatatgctcacaaagtatctaagccaactctcgtatttatttagctacttttgcccatcttaaatagtttcggtaataaacgcacttttgtgtttaaccttttattatatgagctacattctnnnnnnnnnnnnnnnnnnnagtgataaaatcacatctaggtgaagaattctattggttttatcctaacagtttatcgatctaacaatttaatccctattgagaatttattaacctaacaagcaaactattgagacatgatcatgaaaacacaaaacatgatttgaatataaagcttaaaagaaatcgagaagaaattagactttagaagatcttctctcaagggtgctcccacatgattcccacatgattttacctccaaaattaaacttacaaaagtaaactttacctcccacatggttttagtcatgtctaacaacattgtagagtctatgaatggtgtcatatagaaagcgaaaatatttagataatcatatatttttatttaaatattatatacgcatgatacatattgagatatactaacaaaatatttaaatctaatttcttcttaaataattgttaaagatttcttacaactactttaatgttgtaccatgtaagttccagtaaatattattgtgtatacatataggaaaagacttatatgatttatgtatttttagaatataactgtttggagcgctcatgtacgtgtacgtgtatctcaatattattgtatagttaaagggtctagattaaaatactatctagtctccaccaataatattgtgtaacataacattcattaaaaacaaataacaattatatagaaagaataacattaaaacagaaatatcatatatattgttctaaatatatagaatttggctaactagtcgtatgcaccatcatagataccaaacattgcacatattcttaaaagaaccggaaatggtgtaacaatccatacttcgaattcctctaacatatgtgatcaaatgacagtcaaattaaccaatgtttgtaatgtaagaattcgtatatattacacgtacactaccgaaacaatggtacatataatcataattccgttgctactcgtttgagtaaagtatcataattcatttctctttactctcgtttttttggttttgtttccatttttttaataaacataatgacacaaaaatttagaaccgttatcgaacgagaactgttcaattcagaagacaaatcggtccaaaaaagccttaatagctaattgatgagaagcccaaatgactttgtcaaaacatggttcagaaagtcaattttaccccatatgtaaatatttcttataaaattattaaactttggacttgtcaaaaccatgaccataagtttggactttgccaaaacctatttaacatcctcttcaattttaaacaattatccagctctatacacgatgttccacgatcataattttgaaaacaaaagagatgaatatccatttctatgaatttttttctttcatagttcgaggcgatgtgtt

SEQ ID NO: 10578 - DNA, 844 bp, Arabidopsis thaliana landsberg
ggaagacataacgtaatcatcactttcttcctaacttttgttttaatttgaaaatttcaacctccatttccttttgtactctactaatccggttttcaattaaaatcaatgtcttcaaaatttaaccataccggtcgtgtcaatccgaccaagaatcgtttctttggtccggtttacaccaacccaaatttctcttatacgctaaaagcctacaatagtgagctggcttgaataccaataacttctttatccacaaaattcaaatcatatattttagtgattagtaatgttacttatacagttaactaatctggtttgagtttctttgtattgactagtgacataattaaactaacaataactgatacgtaatttagagatatgagggaaaaacttcaactcttttgcttcttcttctccactctctgcaatttcttccatttaagataaatttgatatgccaaaccaccaaagaccatcgaaacacatccccattgcttcaacgacaatggatttccgctcattactgatgatacaacaatgctaacaaacttcctggtcgtggttatggtcgtgttagctagtgacccgaagttacttattgtcatgaagatgaagttttgtcccacggcaccgcatatacaatactttagaatgtcccatgccgcttccgggtgtagcttacagaactgaattgcttcgaatcctatcccttgtggcaagccaaacatgtagataatgttgtatattgtgccccataagttcattcccagcattatgtcccacgcttcggtttttgggtacctataaaattcattgagtggtgacttgataaaagatgaag

SEQ ID NO: 10579 - DNA, 487 bp, Arabidopsis thaliana landsberg
ggaacttgtagcactgggaacattcagactgttcctaaactcgatgaagaccaaagtcgaaaggcccttggtgaatatgtcggcgtactgatatgttgtgggcacatgcagaacaaggacctctccaagggcgacacagtcacacatgaagtgtagatcaatctccacatgcttggttcgctggtgctgaacatggttggtagacaagtaaacaacactgacattatcacagtacacaatggtggctcgacgaagagggcaatggagctcatgaaggagttggcacaaccaacacgccttcgcaactccattggcgacagcgcgatactcggcctcagcactagattgagagacagtaggctgacgcttcgacaaccaggagatcagattgtcacccaagaacacaccgtatccagacgtggagcgacgagtgtcgggacaaccagcccaatcagcatcagaatagactgtgaggtcatcaggcgag

SEQ ID NO: 10580 - DNA, 924 bp, Arabidopsis thaliana landsberg
  unsure (1)..(924): unsure at all n locations
tattctgtacagaatctctatcacatatatagaaagaagttttccagagtgtaactttaggaaaaatgaaaaactcagaaggaagagtttgttgtattgttaagacaaatatatatgagtggaaatatatgatttgtcttttggtttgatatactataagtttcttctaatgcattagtttacattttgctaatggactaagctttcttctctctaactttcagacatatttggaagtaaaaagtttccaaatcaaaaacaattttcttgaagaattaaatattttgatccccaatctcagcttcaggcctttttcttcttctgcattctctgcagcttcctccatttcaggtaaatttggtaagacaatccaccgaacaccatcgacacacatccccattgtttggaagataacggattcccgctcaaaactgaagataccacgatgcttacaaacttcctggttgtggttatggtcgtgttagctagagacccgaatctgcttattgtcaagaagatgaagttttggcctactgcaccgcataaacagtacataagaatgtcccatgctgcctcagggtgttgcttgcagaactgcacagcttcaaatccgctcccatgtggcaatccaaacatgtagaccatgttgtatatggttccccataaattcattcccagcattatgtcccatgcgttagttttggggtacctgtatccatgtatggcgatgattaatgtccaacatctagaccatgttgtagatgtcagactgggttaagtatctgacagaatgtcaagagtcataccttgcggtaatggaatcctgngttgcgtttgtgaatccatcaaaagcaaggtttaagaagcatagcccgtaaccaaggggtgcattgngatgtgctagcttgctgatggttttagagc

SEQ ID NO: 10581 - DNA, 614 bp, Arabidopsis thaliana landsberg
gatgcttcaccagcttcttgttaaagagagacttccacaggttagaaatgttaaagactcgatggtctccctcacaaaaccattaattagcctttgtaacatcctctgcagacctcagtttatcctctagcttcatcagcacttgcttgtactttgcaataagccaacgataatagtcgatcatcaaaataagagctatcatttcttctgagaactaaaacatgatatctattaagacaaactgtcggcccatttgtcggcccattcacaacagagattttgaattttctctttgaaaccctcaagtgtgtttttcttaggcttggtcgatctttagccgtcttcatcatcaaaatcaatggaggaagaagaagcgagacaagtggtgatcgacaatgatctgaagaagaagatcaaggaaacggtgaagaagatcctgaaacggtcgagcttacttgagattacagagattaaggcccgagaagaagcttcatctgagttgaatctcgatctttcgcgagatccgtacaagatcatcgtcagagaagccgttgatagtttcatcgagaaggcgattatgacaatcgatactgagatgggaaagcttcatactc

SEQ ID NO: 10582 - DNA, 194 bp, Arabidopsis thaliana landsberg
aaagcacttcttacacactcaccacatcttaatccaccattcaattccatacatttatttcaccatcaataagacacatattaccactattgttatatatcatccttcatttaaaaagcattaacacaatctcccacaaataccataaaatatccctaaaatatcttactcaacagcctacccacttctattaa

SEQ ID NO: 10583 - DNA, 1278 bp, Arabidopsis thaliana landsberg
taaagcttggacgttttaaatgtcacttaattacctcataatatatgattctgattctcaaagggtgtttttttattaattaccagaaaccatcgacgattaagctggtggacataagcttcaagaatattagaggaacatcagggaacaaggacgcagtgaagctattgtgcagcaaggcgcatccatgtgcgaatgttgagattggaaacattaaccttgagtacaagggagccgatggtccaccgactttcatgtgctcaaacgtttcccctaagcttgtgggaactcagaacccgaaggcttgtagcgccggacccactcccaagacagctgctaagggagacttgtaggaacttatattttttgaaaatcacataagggagacttttaaaaagctgtactgtaaaaaaattgtttctctttttttgtttgcttgatcgatgccaacacattttatatatagatgtgtgtgtgtgcataagaatgtaataaaactaaaaaatttatatatcttattctacatttgcttatttaattttaatatatcgaactcaaaacaattttggcaatgaagaatgtttcaatctcatttcgatgtgagcttttcatcacatgtcccccaagacgattttcttttccagtcattatcttgatgatatgtatccagtataggactaatttcggaccgtgtcgatttcagtttgtatcatttggaaaaatcttatatgtggaatcgatttcgtctggggttggggcagcctgtgttccaatgtgtgatcgcaaggacggaggcataatttgtagtatttctttttaaaattccatattgaaatctaaaaattcaggtaatatttcatatgatttaagaatgtttttaaaatttatacgaagaaatcctaaagcataagttcgaacacttataaataataattcgttgtattttaagaagatatttaaaattctataacccacgtacataatatcttttttgttaacgtttctagtaaagatcttctaaataaacttgttcaaaatacgagacgtgtaattaataaaatacaaaacacgtgtaattaatttaaagttcggcatcgattaatttgtgggttcgaacaacctaaaaaacgagacgtggagaggaaaatggtgcttcaacatctctctatccaaggcactatataaagcagcatatattttagttgaaatcttagaaaaccaacaaaaaaaaaaaaaccaaaccaaaaaacctaaggaaaaaatttaaattaaattaaa

SEQ ID NO: 10584 - DNA, 1265 bp, Arabidopsis thaliana landsberg
  unsure (1)..(1265): unsure at all n locations
gacatttagcgaatgatggtgacgaaagacgctttggtgcttacacaaagaccaaagtgtataaaggtgtatgatatttgatgctgaattcttgatgaaatactaagaaccctaagtaagcgagagagataaggaggtttggcgatgattaaatactcttgagctaataacttcagtatatatttagcgatgtaaaagtgaatatactcttgagcgatgtttttgtcttttaattagagttgttaccatctcatatctctagtctacctgccacatagaaaattgcaatttcacgagaacattaagacattatttgttttcgtcactatataatctcttttaatggacgtttgtaacatctatgttcagattgacataacgacaaacagagccggccgagagtttcacaatgttacaagtgagagaaaattaaaaactggccacataatttttacctatttaattattttgttgttaaagagaatatgtttaagctattttcaaggttcaaattcatgtaaaggtgacaaaacccctgaggttttaagcactagactgcaagaacttttttttgtaacattggccaaagaaaaccatatactactattagcggccgcaagccttgcttttgccggtttggtcttttggccggcaaaattagacatttgtaagatgaaatgaactgatataatctgaggttagagaaacttttggtatatagtttttttttcaacttatttaactggagtttaggcttaacaagttcccacataaaagcggaattagaattctaataagatacgaaaatacacgagccatggcttgggtcggtagaaacttcaatgccagtgttatggaaattgcattgttccttggtggcaccaaggttctggtaatacaagttcattgcgaacgacgcgtgatctcttaccgtgtttggttcaaagcaaggtccaccggaattgagcgctccacagtcacggaatcctccttcgtcgctgcaaacccaatctatattcgcttgcagttgcttatctgtcgctttgtcacccgctatgcaccatactcctttgttttcagcagcctgcgagaggtttcttggtgtcgagttcacggatacggtagatacgaggaggacgaagatgagcgtcaatgatagagacatcagttttgagaccattatattattgcttatagattgatatttgctcacagactaaacattntatgtgtttgtgtcaatctatacgctaaatcaaaaggtg

SEQ ID NO: 10585 - DNA, 1183 bp, Arabidopsis thaliana landsberg
tgttgcagaatcatttgaagagataaagaaagcgatgaagaaaagtgttcagcttaaagcggagctatcagcaaaggagagaaatcttgtatcagtggggtacaagaatgtgattagcgcaaggagagcttcattggaaatactatcatccattgtgcaaaaggaagagtcaaaaggaaatgaggaaaatgtcaagaagcttaagaattatcgaaacaaggttgaagatgagcttgccaaaattttgtaatgacatcctgtccgtcatcaataagcaactcattccatcgtctaccactgtggactcctctgttcttttctacaatatgtgagcgaaaatgtgttgttgtggtgcttgaggccgcaaaagtgttgcactgttttggctatactttatgttctttccaggctggcagacttcagttctaatgctgaacacaaggaagctactgatcagtctcttgatgcatataaggtccttggctcatgtttgtttttgtgccttgagctcggaacaaaataaactgaacaatatgttttgtgttttggtaatggcaatgttggttgttgttactgctgcagagactggtttggtaccaacagttccagctatacatgactttgaattggacttctgttttcttaaactctcctgaaaggttcctttgcttacatgcatacatatgattatttaatgaaatcggtgtggtgttacttactaacagtctgaatcagtgaaactgtgtgttgtacagtgcataccaattggcaaagcaagcgttcgatgatgcaattaatgaatttgacagtaagtgatgaatcaaacaaggacatgactcttattatacagctactcagagacaatctcaacatgtggactttagacctcacagaaagagaggaggtaatctttttatttccctatctgcctcctctgatgatagatagatagtttcctttggaatcaatataagccatttttgtgaaattttgttagttcttgtactgtaatgaggagcctaaactttgattccaatgttaatgcttgggaacatatttacggctttgtggatctttcattgcttaaaccccaagttgttgaattcaagcaaattttgttgcaggaaaccatttgcatacttgtttcttgtctctttcaaagataactcaactttttttggtt

SEQ ID NO: 10586 - DNA, 1072 bp, Arabidopsis thaliana landsberg
aattttatctataggttgatttcctaaaacacttaactgttttcattattttttactcgtaatatttgttaatcaacaagtaacagtctgtttaattaaaattaactcccactctccgccgcataaactcttcaatttctccaggcagctgtttcaaattttagataccacaactttagtccaaccatacctccttgactttatacccgcggtttcatttttgtctttaataccgtttcccaaaaacacttagctgttttcttactgtaacatccaaacgcgctctttgcctaactggcaaccaaatcttggttaggtttctatctctttttatatttccctttttacccctctcttcttctcatatataacacaacacaacacaaactcatacaggcatcactactacctcaaagtcctttcttacttatatcaaagctttattagtctctttgttttgtttgcttctacattacagaaatggcatcttttgtgatgggttacttcttattgttcgctgttgcgttcgtgtgtttggatgcgaggacggacaaaacgcaagattatacgtcgtttcagtaccataaaggagctctcctcaccggagacgtttccatcaacctaatctggtacggtaagtttaaaccgtcgcagcgtgcaatcgtaaccgatttcgttgcttccctctcgtcttcccggagatcgaccatggctcaaaatccctcagtcgccacgtggtggaagacggtggagaagtattaccaattccgcaagatgaccacgacacgtggactcagtctctccctcggagaacagatcctcgaccaaggatactcaatgggaaaatcttttacagagaaaaacctcaaagacttggccgctaaaggtggcctaagcttcccagataacgtcgtgtcgacctcaactgacgtgacggtccaaggcttttgcatgaacagatgcgggtcacacgggactggttccgggccaggcaagactggatctagattcgcttacatctgggttggaaactcagaaacacaatgtgcaggacaatgcgcgtggccattcc

SEQ ID NO: 10587 - DNA, 994 bp, Arabidopsis thaliana landsberg
  unsure (1)..(994): unsure at all n locations
atttcctaccggcgagtccacgagcgttgtaactagacccggttgttttgtcaacaagtacccgacccgcgtaacccggataagaacctgacccgaatataccaggacaagcagacacagcttcaagcggtgcagttggtgggccttggtaatatccgttattaaacggattcgtcacggtgttagctagaagtgtggcaaggtttataatcattccgtcaactccaacgtcaccgttaggcgctactaacggcggcgtttgtggtccgtaaatcggctggtgaaacggccacgcgcaatatccagggcactgcgtctcggagttcccgacccatacgtaagccgcgccgttagctgcgcgacggggattcgaaccggaggatccgtgagtcccgcaccggctcatacagaatctttcgacggtaacatctttcgccgttagaacgacggttatggaacggagaccgccgttaagtttggtggataaagcacggaggtaaggatttttgagagattttccgagaggatagttctcgagtagaagctgtttcccgacgacgagtgttgaagagccacctttgtatttctccgtcgtcttccaccacgaagcaacggaaggaactgcggcggaagatgcaacgtctttggagtttagcgagtggatgaaatcgacgattacggaccgttggatcggtgtgaatttcccgtacnnnnnnnnnnnnnnnnnnnnnnnnnctttcaacagaactccgttgtggtatttcataacaagcggctgctcctcgaccaacgcggcggcggagaaaccagcggtggcgaaaaagagagtgaggaagatggcaaaacggtaattagaagccattgagaagggtagttatatccgattgaagagatataggagaggttttgatttggggttctataagatatacagaggtatttataccagagatgttgttttgaaaccgagaaaagattgttacagctgtaattg

SEQ ID NO: 10588 - DNA, 1618 bp, Arabidopsis thaliana landsberg
tcgatcccgcttgaagagactccttccagtgggcgctcaaatgggattgtgtgtagttacatgtactacattgcgattgattgctggaagctgcttcggtaacaactgctattcgagaggacatcttcttgtagatggggattggtaaaggtctctataaccttttataggtggcttgtgagttatacacaccacaccacaccattacatgtctcttactatgaggtttatccaataaaatcatacccgggatttggtattggctgcttgggaaagctgaattctgcatacgaaaacgattaagagtttatgattggtttctacaagtttctcgcaaagtaagctcttctcttcacggtgttatcagaaattcgattcatatatatgaggggctgatttcacagtttaatagggaggagatggcatgtgaagaagctgagcttggacaagatggatttgaacagaaaatgaaagcactacaacaattacaagaacaggtaatgttagctttggttactataagaaaactatctctccaaggtcaatgtctaactattcgaatgtgcttactgcagcaactagagatgcttaagtatatgcgtaaattctctctggatgatcaatctgctatccttcaaaaggtaaacaaaaacaaaaataaaactgtttttacactttttaactaccatgataatattttccattagcatgaacagaaaaagtgttttattatggcttttggtccatcttgcttaccggtaaatgagaaactgtctgagtctagtgaggactgattcatattagattggtctaatattcgttgttcttgtccaaaacagcttcagaagcaattagaaaatgcgggttttgagccggaggcgtctcttttgtcaggagaggaaatggaggaagctggaagaagaagagtttcacctgtttttggaagcagatagcttttcagttctcacaagctacttcaatttctaatactcaagtcgctctctctatctcatgtcatctccatatacttaactctttaaacgtaaatgtacaagaaaaaaaccttgcctcatttgactctcaactgcattttcatgtgaagccatttttttttaatgtatattggtagtaaactatatagttaataaaaaaaggaaaacaaaaaacaatttagtacaattttgttccatagtgtaatcttgacatgattttagaagagttagaagggtttttttttctattcttattatgtttaaatcattgggcaatccctattatatgtttaatccatatctttgatatcaataacacaaagttcatagcaatctcttgaatttagaagtttgagttaaaaatttgtgtatttagttagtatccattatcatcaagatcaatggggaatcatcaagctgataagaagttcgcttgggtgattaagaatttcaactctttggataccactagagtttactctgatacatttaaggccggtcgttgcaagtggtaaagaacataacttgtttgcaagtgctttatggttggtccctgcaagtgacacatatggtttttgcttgcaggcgtctagtcgcttatcccaagagacgtgataggtatacca

SEQ ID NO: 10589 - DNA, 1139 bp, Arabidopsis thaliana landsberg
tgatcactttgttagcttgtgaagatccttttttagtgaagtgtgtgtgtaagtatataacctttgttttgatttttgtttgcagttcggattggattgctttatttgatatcagggtttggaggaagcatattgtcagctcttttcctccgttcaaacatctctgttggagcatctggtgccgtgtttggtttacttggaggaatgctctctgagatctttatcaactggacaatctattctaacaaggtaactcactataccttcaagacctgttttctatctatgatctaaagatctgaactttagaatttatgttgttttgccaatgctttttctaggttgtgacgattgtaactcttgtattgattgtggcggtgaacttggggctcggtgtgctccctggagtagataactttgctcatatcggagggtttgctacaggttttcttcttggatttgtgctcttaatccgtccccattacggatggatcaaccaaagaaacggtcctggagctaaaccccacaggttcaagatatatcagggcatattatggactatctctcttctcatcttggtcgctgggtaagtgttacatttctctgtcacgtcaatagcaataaatcagtctgtttgtttttaactatactaataaaagcctgcagattgtgtaaatgatgatcttgtctctttgattgacactaaaaaagttatgaactttgtgagaaaaccaaaccaagcttctttccttatcaggttcattgttggattgatctctctcttcaacaatgtcgatggaaacgaacattgttcgtggtgtcattatctttcatgtgttccaacatctaaatggagctgtaaccgagaaccagcctcttgcacggtaaaaaccttaagctcttttatttcgttcctcgggttctctagcctagtatcaaacctccttccattgtatctaatcacaaagcatctcttcttgttttttctgcagacgactcaattaggtaaccaattgagcatgacttgtttgaggaatgggaaatcagcatcttacattttggcaaatccctcggattcacggattaatagcttatgtgttcagctttgccgttgatttactgatttttagaaatattat

SEQ ID NO: 10590 - DNA, 1389 bp, Arabidopsis thaliana landsberg
tatttaattgttaaagccacatattttcaccccatattataatccaattagggtcaagaatttaagtttttctatttggaactagatcaatatataaacagaagaagaaaaatgttacgtgcctgtcgccaacaagtctgtacattctaaagatgagatcttcttcttgttcggtcatattgataaactcccatttcatactactcacttctgcattttagttagtatataaattcaaaatatcagtgaaaacgtacatcacaaaacaatttaatgttacaggtcaaatgaatgagcgtagaccaaaaggaagaacaattagatttccaactaaatcaaagacaaaccttgagagctatgagtgaacttgggttgtttatgacagtgaaggcggcgaagacggtttgtgttatccattagtatgtattggaaacagcgaaacagtatgaacacaaatattattgagagaaacaaaaaaaattggagtttggagaatgcaagcgaagaaagagatgtgaggtttacaaaactatgtagagacacaaagagaggtccccaactctcctacttggccacataacctttaacttacaaaatataggtacaccataacttactgaataaattaaatgctaaaactaattttcagaagcaaagcagatcacaaatacaaacattttaaattatggatatcattccactttgtaataataatacatacatatgatatatgttgtatttataaacgatatattattatgtattcaaaatgaggaatttattataaaatattatattttaaaatttaagaaatgatttttttatttttttttgtttgcaatttgtatgtagttattttttcttatcttgcaacttttatctttttaataactttgatggaacaaagtggatacataaattttaacataaactaggaaactatatagtatatccggctcttttgtagaagatatgaatcataaaatacattctgatccggcaaattaaaaaaaggaacgaattatagataccaaacaaaaaagcctagttgttgacatacacaacaaaatatgtgacatacagaaggaaaggacgaataattgttttggaatttgcatgcatttgaattcgagtactcataatcttctaagcgaaaacttgcgaaaactttatcacctataaaacattgaaaatattgaaaccaaattggtggtctaatagttttgaaaactaatgtgtgggtcaaagtcactagtttaatacttgagaggaataatttatgctctaaataatcaaccacaaaattttcgatctttcactcactcacagaaaggaaaacaattcattgctaaagcgtcatgactcacgttgcttgaatccttaaaattt

SEQ ID NO: 10591 - DNA, 438 bp, Arabidopsis thaliana landsberg
gatccgaagccccactgggccagagccggagcgactgacgccgcccgtcgggactgcggcgcgcggagacgaggctgccgctccccagaatgggtcacggttccacgcccccctcctccgaggcaacaggcagcgacgcctcagccatctcagcatcggcggcgacgggtggctccacgaccagaacggcaacggcctcagaggaagccggtgccagcgccgacaatacgtctggtgggcccaaggccacagccgcgccagcagcctccccggcgcgacggccgcctcaacagaggagtcggcctcgggagctagccccactgcaactggtaccgcctgagccccccgctttggggcgtcttgcgaggggatcagttggccttcgaggcccggcgtggccctagctgcagaagccgccgccgtcttgaggaccttctg

SEQ ID NO: 10592 - DNA, 514 bp, Arabidopsis thaliana landsberg
ctttcactttcaaataccaatggataacaccaaccgtcttcgtcaccttcgcagtcgtaagcaatccaagttcactctaggggataccgcaggtttctctttaatttagtttataaattataatcatccatttaacttagctacgtcctccaattttcattgatattcatatttgattgaaatataactaactaaaatgcagaggtaaatagtgtgaaatgggagtttatcaatatgacggaacaagaagaagatctcatctttcgaatgcacagacttgttggtgataggtaacatcttcttcttctgtgtatagatatgtcgatccatattaaaattgatatcttctttttttctctatatacaatcttacatgaagtaactcatgtcttttttggatcttaactatctttagattcttctcatgtacttttttcaaccctttaacagcattatactatataacaacttttaaaataaaataaaaaaatttttaccacataattattttact

SEQ ID NO: 10593 - DNA, 943 bp, Arabidopsis thaliana landsberg
ttaatgttctaattaatatccaggaagcttggaacagattcaactcagaaggacgttgatgtgatatatggttcttctttaattttttgtaaagttgtgcttgattagttgagtatatatcctctatattattagtccacgttcttccattctctcgcaagtctacacatgtaaatttgaactaattagcttagctaacaaaagatatgtaaaatgcaaaatgttatagatcacatcgactagatatgatgggccggaaaaagtgggctggattaggcgttatcgggctattagataatgaagaaatatagggggatactttggacaaaccttttccgcggtcgggaggaaagggcagcgataagccatgatgatacggggtggtggatccgcgtttgctaaggtagctgaaccgatttattcatatgaatttctcctgctttgattcaaatgtctctggctgattgcaattgcgtcaatttgcagtactgtcgaagagggatgtcatcatctcgagagttaccttcagagaatcatcagatgggtgagtcagcaagatttttgccattactcatgtttttctttgtttttgttttttttgggtctaacaattgccatatgtttcatcttcggtttgctttttggtgtggcgatgtcttattgtttttgctcaagaggcgaatcgtggttttgccagttacgtatttaaaggggcagtcttttacacgtcatacgccatgagtatgtaattcgtagccgggaagaagatcatcatgcttctgcttctggttcccttggcgaggtaaaagaaagaaaatagtttgtttttggattttattttcaaaacccactagttggatcttcatgtatcaacatgatcatcgtttcagtcgtcgacgacttcccaagacaagagagaatgaaggaatccatcgtaatggct

SEQ ID NO: 10594 - DNA, 2580 bp, Arabidopsis thaliana landsberg
  unsure (1)..(2580): unsure at all n locations
ctgttgcagatagtattgatttcctaaataataaatcgcaaaaaaaagaagctattttgttgagactaataagatcaccgactcagcgtctacgtgcatgggaatgtatatatgtagtaaatcacgagaaaaaaatagatatcgacaatatagactcatgaaaagataaatatttaacatatgcaggcaatgcatgcacggtccatgcttcacctcctagaggaaacacttgaaaatgttcacctcaactcctccgccagtccgccaccgttcacggcggttgatcttggctgatcatccggcgcaaatactgtccacataatcgatttcatagtcaaacatatctctaagaggtttgatgctgccggaatcgaccctccggagttcacagctttcttctccgatctcccaagcaacgacttcaacacgcttttccagcttcttccaccacttgtctctaacacttgcatggaggagtgtcttgctgccgacgggaaccgctcctacttcgtcgctggtgttcccggatcgttttaccggcgactttttccagcgagaaccattgactttttccactctgccttctccttgcattggctctctcaggtacacactctctacgtaacgttgtaaagtatgcttggtcactttattacacgtgtcaagtgtcatggtgcttggtttttctgcttcaaagcaacatttatttttatactttgtgaactcgtaatttttttttaagctttaaattttttaaatttcatttttaaaccaaaataaacaacttgtaatattttttttcaaactagtattaaccaaaatatcaagtaaccaatatgcactgtgatgatatatatattaataagtggaaaatgtggtaggtgccggaaagtgtgacggataggagatcggcggcgtacaatagagggagnnnnnnnnnnnnnnnnnnnnnnnagaagacaacaacggcatacaaacggcagtttcaggccgacttagcggagtttttaagggcaagagcggcggaggtgaagagaggtggggccatgttcctggtttgtctcggtcgtacctctctggatcccaccgaccagggtggtgccggtctactcttcggcacccattttcaggacgcttgggacgaccttgtccgcgaggtacaaccttaattaattttactcgttattcgtcccctaagtaattaattaatcttataactctaaatcattaaccttgagctctaaatttatactactattaacccttgcccttttcgcttttatgaattaactgctagaaatgaggaaatataacttatttataactctaggatagatatctacatttgacccaaattggaaatgtcgctaaccttttagctttctctaagaaaataaaccattttctaagaaaactacagcataaaccagaatatacaaacttttactcgtaaagtcatcaaacctagtaggctagtacacttttacattgacactcgtattcaatgtaatccacaatttcttgaaattaagcttttcttaacaagactctatatatttttagaaatcaaacctatagtaacaacaggcccggctcttgggaggtgttgagtgtgctagtgcaccgggtcccacttctttattcagttttttctttatattttagagtcaaaattttcaaataattgcaaaatagggtctagtgtttaaatatttagagttttaggtaaagaaatttggagcataacacaaggtccaataatttattgggccggccctgtttgtatcgctctcgtttcactctctaattttcatgtatgtcaaatagtttacatttttttccattataaatcatcattagttaccaatattctatgtagttttaaaatcctttattctcttgttatatacatgcaatattttcaaagctgacaaaccattgacaaatcctataacatgaagaaagacaggaaaacaacaatgcaaaacaattgaaaatcattttatctgtacagacgatcaagagttaataatctataccatcgaaggctgttggaggaactgtctcacaacctaattaaccaaacacctcctttccaaagatttaagaaatttggagagcaattatagtatataccaaaattttccattataatataaatagtaagtattcatgtgacctcaataaaaaaaaaaaaaaaaaatctgcctacattaaattataccatagtatacaaattctcaagagcacattaaattataccatagtatacaaattctcaagagctagtaatctataccatcgaacgttgttggaggaactgactcacaacctaattaccctaacacctcattttcaaagatttaagaaagttggagagcaattatagtatattccaatttatttccttataatagaaatagtaaatattcatgtgacttcacttaaaaataattgtgcctaccttaattttgcttagtgcctttaaatgtctatgtaataaacataaactgatttttttcctcttttttattggttatttatttttattagntatgttaaccttattcattttttaaa

SEQ ID NO: 10595 - DNA, 149 bp, Arabidopsis thaliana landsberg
  unsure (1)..(149): unsure at all n locations
taaattatctgggtctggtggacggatctcctagaggcagaggaggaagaagaggtagaggaggaagaggaaggggaaggggaagaggtggtaattgtatcaccnnnnnnnnnnnnnnnnnnnnnnnnnnnnnnnnnnnnnnnnnnnnn

SEQ ID NO: 10596 - DNA, 1918 bp, Arabidopsis thaliana landsberg
ttaaataaataaacgtgacttgaatagtggtattgcttgacacaaatctaattagaaatgtttgaccaaatttggtttcgaaaatttcaccgcccaattccacttgctttatatgcgatgaacagttgaccagaggagacaaagtgtaacaaataggctattaacaaaacatagaagtaattaatacattcatagtttatatatagacatgttgtgagaacttattcttttcttctttaacaaacaatctgaattcgtttcatactatataagtattatatactacctagttatatgctagctttgtattgactcatagagtcatagtacaaatgctaaaatactaaagctacacagagtggtagaaccagctgaaatatgtttaaaactacatgacctaacccaaccattacaaatttataaacaaactacatcctgaaactccagaatagacgatgtagctcactatgaactataatgtatgtttaatgtcagaaccaaataaatttaaaaaaaatgtcagaaccgtacgagaagaacaaacaaaactttttgtagtttgtttgtatatatttctaagtaaaaatgctgaacacaattatacaaccaatatatgtgatctaatgtgctatttaagaaaatttgtcgatgataagtactacgtcagagtcaaaagacccatattggtttagtccgactattagatacgaaaagtcaagcaagcattacatgtaaattttggtcagatgtgagagatatgtctttttttattattttttgataacaaagatgatgctaaaatatttttagatccaaacaccaattatgagattcagaaaaactaatgttagaattcgaaccatgatggccaatattacatgaactcaagtggcaatttttttcactcttttactattggagcaagacgacttggttaagagatatgttgctctcaatattctcatagatcatctctttcttcaaattggtaagatatgagaaatatgtcccatctttttattatcataccaaagtcttttataaaatatatcatatatgtatatatatattgtcaagaataacttgacttcatacatactatttgaattcggatagtatcacaaaacatcactaccacataactgttggaacttcaattttacaaagtatttccggctaacttttcggcgagtttttcagtgaagtttgtcacaaaaataagaatgatcatatttttggaatctttgtaatcgttttcaaagttttctctccggattttcgcggttctacaataattacattacatatcatgatcaatatgtgacctgatcctcgtagttaattaaaacataatttcccggtcaccattcaaaactttctagatggaagattaacaaaacaaaattatcttagcttaattttgtagtaacagagaagaaatgattaactaacatctaatcaagcccacgtgtcataaaccccaccaatgaagaaaaaagagcaaaagacatgcacatgcaattacacgaatacatacaccccaccaccatcctccctccttatattattattgccccttcctctcctttcttcttcccctcttaccttttcagagagagaaacaatatttctaatctattacaagtaacatgatcggccaacttatgaacctcaaggccacggagctctgtctcggcctccccggcggcgctgaagcagttgagagtcctgccaaatcggcggtgggaagcaagagaggcttctccgaaaccgttgatctcatgctcaatcttcaatctaacaaagaaggctccgttgatctcaaaaacgtttctgctgttcccaaggagaagactacccttaaagatccttctaagcatcctgctaagtaagctacacatttacatatatatatata

SEQ ID NO: 10597 - DNA, 1493 bp, Arabidopsis thaliana landsberg
aaggctttggggaattaaaaaccgtgggggttttatgtttttcttgggggggggcattacactttgtaggttctttccaattttgataggtttccaccttcaaagctttggttttcttaactttttctccattaattcatccaagtagctaaagaaaaagggcaagcctttaatgtttaaagatgactggtttcaattcagctgaaaggacttttgctagatttatcatgtttgcaaccgaacgctcatctgttttgttgattcggtttttgtcatgcttgtttatgcaggttcatctactctttcatggcggttggtatattggtctgcattgttaccttcattggtttcatagcagctgaagcaatcaatggctgttgcttgtgttttgtatcctttatacagagacctttctccaattttttctatctttgttaatagatcgagtttattaaccttcatgagagttattggaatgggtttgttgcggtttttcccttgacagttttaaagtactctattctcaaaactctgctcattctacttgaagctgcacttgttgcatacatcgctattgaccgtcactgggaaaaggtgagatctttcttatgctcgaatcttgtttcttgtttcttgtttccttgacttgtttgtaacagtttaacatctgtgttctgtaggatcttccgtatgatccaactggagaacttagtagtcttagggctttcattgaagaaaacatcgatatatgcaaatgggtggggattgctgtggtagcagtccaggtaattcaattcagtctttataaaatttgagaattgtcatgatatatatattctctctagagagtttaaagagaagacatgaatatttcttgtgtctttcagctactgtcattgctactagccatggttctcagagcgatggtttcaaccccgaaacccgaacttgacgaagaggaagatgatgagaacccaaggagtagaacttgggacccacttcttggtccgcaaggaaaccaagcgcctgctggctcaagcaagattgaaaactggagctcccgaatcagagaaaaggtaatgctgatcattttttcagtttcttgatactttacggattggataatgctttgtgaatctgctgatgataaaaactgtttcgttttgaaaatttccttttgcagtatggtttgaaccagagtccaccggtgaacccgaaaggttgatgaagccaaataatcatgtttctaaaactgcatgtgtccatatggtctctgtgaagctctctttctctatgttttgctctttgcaacttctcgagtgtgcataaacatttactcaaaacagtgctgtattgtgtttacacaaacggcataagcatcttcgtttgtgtgtttgcttgtacaaacattcctgtgaacagtttgaagttagcatttccactataaccgtttcgattcaatttataatgaaagaaaacaaaaactaaaaatt

SEQ ID NO: 10598 - DNA, 711 bp, Arabidopsis thaliana landsberg
catcttacttcttcttggcatcaccagccttggtctaaattcacttaacaatgaaaatatcgttaatacaaagcgggcgcaaaacaaaacaatagcaaatgtagatttctaatctcgtaccttcttaacaccacggatcttcttagccctgttcttcctctccttgatctgtttccttgatttctcaatcttagtgtcaagtccattctgtcaatcacatcaacaatcatttcagtatgagattgcaacttctatctctcacattaacaccattgatttcatcgcaaaacagtgaaaatcaaagcaccaagactaaaaactagaaccaaaagttttacttaactatcaaacatgtaaagagaaattaccctgatcagtctgtacttaggctcaaacttcttagcattctcgacagtatcatagatcaaaccatatccagaagatttaccacctccaaagtgagtcctgaacttgaaacagaagatagcatttgggtccttaacctcatacatcctcgccaacttctccttcagctcagccttcaaacaagtaaagccccactcagtacacaacatcactaagaaacaatacacaactgcacaagcttggattgtaatcaacacaagccaatgtaagtaaagaacatacctttgaaacattggctcttccaggatgaagaacatcaataacctacattaattgattcaaaat

SEQ ID NO: 10599 - DNA, 756 bp, Arabidopsis thaliana landsberg
  unsure (1)..(756): unsure at all n locations
tacagactccgatccagtacagtataaggagatattgaaattcaaacaaacacacaagtagcatgttgtcaaggaccttattaccatttacacaagtacaatgacaatttctagaacagagctttttttatagctcatttttattacactgggacttcagaaaatatcacaaacttcacttggaaataggcttgacatggactccaacttggtgaattnnnnnnnnnnnnnnnnnnnnnnnnnnnnnnnnnatcttgtggccgtcttctttgagtaggacgcttttggcaccttcaagtccaaaaggtggagaggttcgcttgttcgttgtgaacctaagcatcgttatgatttcaccttcagttccaaatattttgtcatagttaagctccaccgatgttatatattcgtttggatattcaagaaggaactgcaaaaaaaaaaaaaaaaaaaaaaaaatctaatatgaaacaataatttagaaatgaggttatatgctggttcttctatgtgtatacatatttgacctcttcaggtgcaagtagtgttcttttcccatgatcatttccggggacctccttagagtccttgtcgtagacaaacttgacgtatgatacaccagaatcaccctgacctatatacactttcctcacaccttcatgaggaccatcgtcccatggatttcccacgttaccaccttttgcttctagtttcttagcaccagctgatccagttgacatgagctcatccagctgg

SEQ ID NO: 10600 - DNA, 1290 bp, Arabidopsis thaliana landsberg
taaggtaatcaaccgcaccgtgcgttactcccttctagaaccacactctttgaatcatccgcagacatcactagttaaacgaatacaagatcaataatctataaaaaaagattcaaacttagatgagatttgagggagtaaaaagaacgttactgataacaggtaagtccatctctagaccaacatgctcaagaagcttgaaaccgtccatgtcaggcatatgaacatcactgattactatatcgaatccatgtttgttcttccggagcagagacaatgccatctctgctctgttgcatttcgttactgcatgtcataacaaccaaaatgtttcatatcttcaaagataaaagaaaaaacagagatttgaattctgacaacaaggacctcatgaattgacatttaaccaaaactcaagtcaaagatcaaagactcaagatttgaatccatttgaaacctcccctaacttattatatacaatggatctacatgtgaatctatcagtagatcaaaatggtgtgatctaaatgaagaagctcgagattaatagtgtgaatcttaaaaagtaaccgaaatggtttctattaaagggggagcaaagttagtcaaccaccgatatgaaaaccataattattcctcaaaataacataattttcgagaatggaccacaaataaacccatcattggagcaagagaccatgaactctctttctctctctctctctctctctctctctctcgtgagattaaacgaacaaaaaaaaataaaaaaaaatgaaaagagaagatcttggtttttggatacgaaccttcgtaaagacaagtcctaagcatcctctctaagatcatgagacaagttgggtcatcgtcaacgacaagaactcgaagaccagaaggaaacatctcgacgacggtctcaccaccacctccttgatttctaccggagctggacccaccagccgatccgagtcctcttccgtgactcggattcatcatacctctctctatgtagctcgaacccaagaaacaaaaaaagaaaagcagaaaagaatatatacccagaaagaaagaggggaaattgacgcgagttttattcgatttaaaattgaatattatgagagaatacgaaattgttggagatagaagtgaatctcttctgggtcaccaaaaaaaagaagaagagagagatggtgagatgagacttagggagttgaagaagacaaggcttgtctcaccttagagctctttttctctggttttttatttattcacagagtaaagctctcttaa

SEQ ID NO: 10601 - DNA, 1702 bp, Arabidopsis thaliana landsberg
aagcatccgaaagccgatgttgtcgcttgtttccctcacctcaagaagtgatgaaagctattatctcaactataaaggattccaatgtataacgtatggatcctcatctttcctatgtttgtatcaaagtctcgacaaattttatggtttctatttctctctacttgtttcaacaataagtctcttgctatgattatataatgaagctttgtgtggaacctttttttttaatataagttggcttcttttcgctgttgattatgtttctatgaaagtaaagattaccacaattttgatacaacaaaatcattacaaagtttttggttgaaaaatagtagtaagcatcatcaatcaagcttcggttttactgagttcgtagtctgctgctctctgcggctttaacttgagcgaagtatggatgatcctatagatcaatagagaaaccagagattataagtttgacttgatcatcgggtaaaacaaaatcaaaagatgtgtgcacatgaagatcatcgggtaaaacaaaatcaaaagatgtgtgcacatgaagaggatttttaccatggcttctcttgcggttaatctgtcttgatgatcatactgaagaagcttatcgagaaaatcaattgcctaaagatgtatacaatgagtcaatacacccagaacgaagcaaaactatgtttttcgaaaaagagtagtacctcaggtgagaccaaatgttggttgtccgcgttgataaacttggaccatggtttggggacatgtctacaaataagagtgacttcaggttttaactcattggtataaaattaactgagccagagttgagaacagcaacaattttgacttttaaagacagagagattcagggatggaataaaaccttccaacaagtgcttccagttgagggtcaagatctagctgatatttgtttaggtaatgatctaactcattggttcccaacacctatgcacacgtttcaatcagaaatcatatacatggatttaagtttacaatgtaattttatgccaataagtcgtagactagcaatataccttggcaattttgacaagttgatcatgattatcatggccataaaagaacggttccttacggaatatctgcagcatcaatatttgacaagtgaataagcaacagcaaagtattaacgactaccattcggaaattcaaatgcttgcaatagcttcagcattgaagctagagagaagagtgaggggattattagttctcaccatgccagcaaacatgcaaccaagactccacatgtctaaagaatagtcataatcctgtagatcaactaaaagctcgggacccttgaagtatctggcaattaattcacaggtttttagtctaatgcatttaacaactacaagaagctttgattgcacagctaaaagtttcaatcattggcatctacgaatgaccctcttttgcttttcaagacaggtggaattaagctgtggtatcggatattacctcgaggccactcgaacattatactcttttccgggatggtaaaactcagcaaggccccaatctatcaaacgaagtttacccaactgatgatctatcatgacattttgagggttaacaatcctatgcattattccttgagagggacaaaaatccaaagcctgaaatgcaataacattaacttttgaatccacgataaacatttgta

SEQ ID NO: 10602 - DNA, 1355 bp, Arabidopsis thaliana landsberg
tactagtagtcgattgtctgaacggagggtcacacacgataaataagaagacagctgcatactattgtattaacgatcgacgctcattaaatccattttaaatatacctcgcatacgattttggaaaagaatatcatgtataaaatccattgtttgaagatcaatggtagaaaaatgtggttgacatatgactctaattctacaagtaaaataactcattaaaatacatatcaaacgatgagaacttgtagttcaatatcaccaaaataatactaataataataatttaaccaaaaccatatacaaaatacaaaacatcgcgaaacataattataacgatgagtataatagaaatgatatatcaaatgataatattagaattcgatcaaacatgattaatttacgagactagaccagcaatgaaagtgataccagttgatggtaaccacaaaatcccttgtatgagttgagatactgtaaaattattagcctcggccgaagtattcaacacatggtatcctggccacttaacacggcggtcaagactagcccccggtccgctattcatatactcaccataatataatgtatccaacgcaaaatttccattccattcaagccatcctacggggttgattgcatcactcatgtagttttgcatgaacaccgtcctagaatatagtttccacggccgacctaagtaagtagccgtagtatttaagtttagaagtaggtcggtatcagctgctatattgctgaattggattgtgaaaccggttggctcatttggatccttacgtccttgagccgtgatgctattcttctggtttggaaggccttgtttggctttgatttggcagctttggaatactgctgtggcgtctccgaatataaagtctacagtgcctgttataatgcattctctaaagaattgacgcattgagtgggcatagagagtgtcttggtaacctctcatcgcgcatcgataaaagaccccgagatccgtatcggatcggattgcgaccgcttggtgtttttccggtcctgctgtgttttggaaggtgatatcgcgtgcaataaatcctctaccgctcacagctgccaaatagttttataaccaattcataatcttcattaatagtaagaaaacaaaaaatactaggtgaaagatattataaatttggacttaccaaatgtagcagatcggaaagtagtccagccgtcgatgaaactccggttacccgtgatcacggtggcatcgatgccgtcaccaaccatcataatgttccatttcttctttttaacgccacattctctacatacacacatctttttacatgtatgacatatctttt

SEQ ID NO: 10603 - DNA, 1764 bp, Arabidopsis thaliana landsberg
cactgtctcagtcaattcggtctttatcttttgcattaatgcgttcaaattaatgtcaaacaattctactttttcacgtacgttgaaagttctttttcttttctttttactgataaaaggctttatagttgaatgttctcggtcgttatttatcacttacacatatattcgttaaatatcactatcacttatatacacatctgataaacttgtgtatatcatgcatcgattttttcaaaaaaaacaaaaaaagtatggtaggccaaatggtcgtgtgctcgtatccactgaatccaaatagatttttcgtcatcactaacgtcacaaaattgcgttgttcaatgtttagttagtggggtttgctctgtttctgtctttgtttaatattattactttcctattttcactgagatcagattttgtctgtcagtataaactctctataaaaccaaacttttgtgttattgtctttcattagtcacaacaacaccaaccaataattaaacaaatggccaacaacaattccaactctcccaccggtccacactttctattcgtaacatttccagcccaaggtcacatcaacccatctctcgagctagccaaacgcctcgccggaacaatctctggtgctcgagtcaccttcgccgcctcaatctctgcctacaaccgccgcatgttctctacagaaaacgtccccgaaaccctaatcttcgctacctactccgatggccacgacgacggtttcaaatcctctgcttactccgacaaatctcgtcaagacgccactggaaacttcatgtctgagatgagacgacgtggcaaagagacactaaccgaactaatcgaagataaccggaaacaaaacaggccttttacttgcgtggtttacacgattctcctcactttggtcgctgagctagcgcgtgagtttcatcttccttctgctgttctttgggccaaccagtaacagtattctccatttttttccattacttcaatggctacgaacatgcaatctcagagatggctaataccccctctagttctattaaattaccttctctgccactgcttactgtccgggatattccttctttcattgtctcttccaatgtctacgcgtttcttctacccgcgtttcgagaacagattgattcactgaaggaagaaataaaccctaagatcctcatcaacactttccaagagcttgagccagaagccatgagctcggttccagataatttcaagattgtccctgtcggtccgttactaacgttgagaacggatttttcgagtcgcggtgaatacatagagtggttggatactaaagcggattcgtctgtgctttatgtttcgttcgggacgcttgccgtgttgagcaagaaacagcttgtggagctttgtaaagcgttgatacaaagtcggagaccattcttgtgggtgattacggataagtcgtacagaaataaagaagatgagcaagagaaggaagaagattgcataagtagtttcagagaagagctcgatgagataggaatggtggtttcatggtgtgatcagtttagggttttgaatcatagatcgataggttgtttcgtgacgcattgcgggtggaactctacgctggagagcttggtttcaggagttccggtggtggcgtttccgcaatggaatgatcagatgacgaacgcgaagcttttagaagattgttggaaaacaggtgtaagagtgatggagaagaaggaagaagaaagagttgtg

SEQ ID NO: 10604 - DNA, 1186 bp, Arabidopsis thaliana landsberg
tccctttgagttcagtggctatggaatgtctcaatcactctcaaagaaccaaaaaacttttgttcacctgacaaaagccaatccatttctaccacgagtgaaaacatttctcaagaccgcacaaagttaagaaccaataagtttgaaatattatgatttattgccgatgcattgcagagtttaaagcagtaagacaaacaaacaaaaagagacaaagatttgataatatgcagtagacaatcttatcaagcttcaatattggattccttatcctaatccggatgcaagatcaactggggtcctttttatttccggggaaatcaaaatcagttgggtgatcttaaatgatctaagagaaggagttgcctcatttcttggttgagattacatctttgcacataaatgcagaatttgtagactggtctccctatatagacttgatctatttgaatctcacgaggaccacagatacttatggacttctttggttttggaccagctcaagtcactgacacagtgactcaacatttttatctacttatgtcctaatctgtcggtttggtgactattaatctaactgtttctggcattttatcacaagtttaaacctaagatgtaaaagaaaagagaaatgaagaaaaagttaccgtaaaaagcagaaaaaatgggaatttgtgtgtttctagaagaagctgagctcggtgtatccacgggagtaaggtaagagctcttcagcttggacccgtgaagcggagtaactcgttgttcgctttatcctattatgagctgactcaacctctgcacagaaaatgccgtagaccggtctatgatcagagaaccgtgactctcctcttacataagataactgatgcagtccttcaccaaaccacaatatcctatcacacctatttttagaaaaccaaatgtcagatgaaagattcatatagcagcagaagttcttgttttcttgctgttaaaataaggaaacttaccaagcaggagtgcgacgtttctccttgggatgcaaatcatctccagagtatctatctgagttcctcgagtacttgtacgttggtgggaaataaatctttccttcattccatcccttaaacacatggcctcgtttttgctcaattctttacttgcagcaaacatattccgcataagaacttcttgcgccattttt

SEQ ID NO: 10605 - DNA, 1079 bp, Arabidopsis thaliana landsberg
ttccctctggtactgaactttatcagaccagatgtgtcattaataggatgatctctatttgcaacccatacaatagtctgctcagagacttgagcataccaaatcccaacatacctgagctttgaattccccaagctgaagaatccaaaagcaaatctctttccttcagagtatataacatcaccatctttcaaagactgacttctcaagattgtgttgtcagagtaacaagattgaatcaagaaggagaacaagaaaatgaaaaagataaagaagaacttcattctctgattatttctgatcatagtttgatgaaacaatataaatgatgtttcttgttaaaagccaagtggggcttacctcaactaacaacattaactgctgacatcgaaatcagtcacaacctgttccggatttttctcaaaggttgaactttcaaaagttgtaagaaaaaactgattcatgtgacttagaacatgacacgaactaataaggttaccaacattgtgaaacctttcttccttgtccattcaatcattgcctctttcactgcaggaaatggtccacgccaccacaatttgcctacaatagtaaataagtacttatatacaaaatgacaagcaaattatgtaatataaagacctattttatacacaaatttacagagaactgaaacttagaaacaatagtcactttaagaccaactattggaccgtgaaacagttaccaccccagtgaagattaagttgataaggactcagtaaaagcaagctccataagcataatgcagaaagatttataataattgactctatgagacattttaaccactactcctagatatatattaactattcgagctagagacacttgcatatcatatcaggtgaatataaagttgacaatgactgattaaagtcagtaaatgcaacttccaattagcaaaatgagaaacggtatccataattaagcataacaccatgggcttcctctttccagatgaagcatgtttattaaataaatctgaaacaggaagcatacaaatggttaacattttaaggtctgtattgacatgtact

SEQ ID NO: 10606 - DNA, 1132 bp, Arabidopsis thaliana landsberg
ttttatttttttgctttttccaacatcagagaagagggaaagggataccaatgtattataaaatgtagaaattcaacttaagtagatttatttactgttttaattacttattattattcaaagcacaattgagaatgaaattacaagccacaagagtcacatacaattcatgtatgaagaaaaaggatgattggtttgtcgttccatctagattgtgctttcaatagtgataaatcaggtcgcaaggatgataagccaagttgatattggtggatactttcattgcttctctcgtggcatttttcaacatcaagctgagtaaaataaaagagtctatctttttccaattcaggttctacattttaatgcaactctgaatagacttttagtttttatattttctcccttactcaagtgttggaagaagcaattgattatcgcaaaggaatacaaaaaagtatatgtactttgttgtagtcctctcttagctcagaagcttgtaaaggtaaaaaaaaagaggtacataacattatctgaaacgtagagaaagctatgaagattttagaaactaaattttttttgtcctcttactagtcttccgttaaagatgcttagaggtaaccattaaacaaaatatgatacacacaagaagtgaagatatcattgttcattttctttgaacatgcctgatgattttgcattgccttataagatgcaatgtaagcttagtatatcgtaaatactaatggtcatatatattctatattttctttctcgttctgttgttgcttgattcgatatccaccgaatgattaatgatcttcattgatgttcatgagactttactcacaatatatggtaccaaagagaattttccgttccaggaaacatcatatattaccgcatatggcatcgtaagatctcagagaaatattacccaaactatttgacttatgcattggtcactacaatggagaactactcatcctcttagatttcatcagcatgtttttcaccatctaatcggttgttgaaaatttataaacctaagcatttaggaacatgaacctagaaataatgaattaaatgtgtatagtactcttctaaaattttggaagttcactttctaacg

SEQ ID NO: 10607 - DNA, 646 bp, Arabidopsis thaliana landsberg
catatgggataacaatctcaacgcaagtgtattaatcattatataaaaaatcaatatatatcttttcatttacgggatttttatacaaaatccaagggcagtgtaaaatatcttaagacaatgaatggaatttattccatgagcaatgaatgaagatggtccattggttgtgcatacatggtttagtttttcatggagccacttggattgtatatcactatgtatagcactccacctctagacgcaaatgatcttcatagctttctctacgtttcagatagtgttatgtacttttttttttacctttacaagcttctgagctaagagagaactacaacaaagtacatatactattctgtattcctttgcgataatcaattgcttcttccaacacttgagtaagggagaaaatataaaaactaaaagtctattcagagttgcattaaatgtagaacctaattggaaaaagatagactcttttattttactcagcttgatgttgtttttgccacaagagaagcaatggaagtatccaccaatataaacttggcttatcatccttgcggcctgatttatcactattgaaagcacaatctagatggaacgacaagccaatcatcatttttcttcatacatgaattggtat

SEQ ID NO: 10608 - DNA, 1124 bp, Arabidopsis thaliana landsberg
ggttaaaaaaacagattgatcttgaggtgttccaattttgaataatggacaatgattcagttgaggattttaaatgggatattcaaagtgtttgatgacctaacacattaatgaccataacaatactggtccacaaactttgtttgttgttatctccataatgataatgtgatgtaagagaaacgatcaagtttgttatgagttttttcatatctacttttccgaacttatttggttcaatataagaagattacacaaaaatttggaacaacaacacatcactaaaccagcaccatagaaaatcaaggctgatccagattatttttaaagcagataactaggaaacaaaagaaagaaagatcaacaacacattccattggaaataagacgtataacaaaatgttcataagccagcatcatatgccaagataagaatccacttgaagacttaaacacaactcttgaaaacttcccaccatgatatagaatttgacccacggatgatcaaccaattaataacatttacctacaatatctcaaaaacccctattgcatgatcgtcttatttcttgattttacctccaacgcgaagggcatggtcatggttccctcctcccattgattgtcctgcctatctagctgccttctcttgcaatgccctcgcgtctctacaccacaagaaaaatgatacgagactatggttaggttgattaggccacggttaggaaatttaattaattagttttggtgtttcttttaatcatgggttttggaaattttacttttagaattaggtttgaggtttcttttttcacaaggtattgtggcctacataagttccctttttcttaatgaaagaaccaaactccaacagttaacctaattctctaatagagagttgggttaagaggaaatttttgcttaaaaattttgtggccctgttaattcacgaggcccacatcttgaacagtccataacaatgacattatcacattaagatgatataagcccaattaagggagttgaaccagcacactctttcgtagacatgtagaaaacgatgctcatcttgtacgatgagagaagaatattgcttccatgatgcaacatagaacaacagagat

SEQ ID NO: 10609 - DNA, 1300 bp, Arabidopsis thaliana landsberg
atgatctgctatcatcaccaattagtgtatatcataattattagtggtggctattatttacaagagtttcttagccatcctaggtcgggttaacactatagtcagcgatgtgaaactcccacaactatgcatttttatggaaaggtttcctcatttttcagccatcctaggtcgaaaatacacaaaatcggtatctgaatattaatgaagatgctctcatatcgctacactcaccattaacatcttaattaaacatagaaatttaccatcgacaacgatagacggatgatccaatccatgatacagtattaacagttacgaacatggcaattactctatctacaactactatacgtacatatgtcaggatctccaaaaactatatacataagacatacttttttttttgctaaactatataagacatactgtaatctgtattattctctactaattgttaagttttatacataaccaatatgagaatgcaattcatcatatgatcagaatttcactaaacacgtcaattactatggcgtgtagctatgaaataattacacttaatcaattggccatttggcctactatattagaccgcagatgtatacgttttctaactataattttgtaaattaaatttttgtttgtggaaaaaaaactaaacattataaaaatgtattcgaagatacaaaactactatatatataacgtgttcaatcctcacttcaaaaacccacaaaaactttagaacgaaaaaagatgaaaatctttaactcatctcaaaacctattcttggccataacctttttccttgttctcatagttcatctaaaagcccaagacagtcctcaagactttttggcagttcacaaccgagcacgagccgaggttggggtgggacccttaagatgggacgagaaggtggctgcttatgcccgtaactatgctaaccagcgtaaaggtgactgcgctatgaaacactcgagcgggtcctatggagagaacatcgcttggagcagcggtacgatgacaggcgtagagcagttgacatgtgggtggacgagcaatttgactacgattatgattccaatacatgtgcatgggacaaacagtgtggccactatactcaggttgtgtggagaaactcggagaggttgggatgtgcaaaagtgagatgcaacaatggtcaaacctttatcacttgcaactacgatccgtcccggtaactgggttggcgagtggcttactaaaagaaactccatttaaatgttttcgatatatgttaccacatgtatatatg

SEQ ID NO: 10610 - DNA, 1091 bp, Arabidopsis thaliana landsberg
  unsure (1)..(1091): unsure at all n locations
tttcctgcccattactttgccaacgaagacagtgcaaggcaataagacggagtttaatctcgttgatggcgcggttactgctaataacccggtgctatcaaaaacaaagagaatacaaagaaattgataaaacctttagattttcgaaaatcaaaacagaactaactccgttgtgtttggtcctgtaatcctgttatagactttggtggccatgacagctgtgtctaagcagattgtgaagaataatcctgatatgggtaagctcaagccgttaggttacgaccggtttctcgttatatcgataggaacaggatcaacaaaaagggaagaaggtcagcgcaaagaaggctgcaaaatgggggatcatatcttggttatatgacgatggatctactccgatattagacattaccatggaatcaagccgcgacatgatccattatcacagctctgttgtgtttaaagccctacaatctgaagacaagtacctccgaatcgatgtaagagctacatattaacatatatgtatgtccttatcactgatagatcgtttaatttacaattgcaggatgatacattggaaggagatgtaagcactatggatctagcgacaaagtctaacttggagaatcttcaaaagattggagagaagatgctgacaaacagagtcatgcaaatgaacatcgacactggtgtatatgaacctgttgctgaaaatattaccaatgatgaacagctaaagaggtgattaagcaattatgaatgtttttcttcttggattacaagtaatctcgatattttttatttattaaaataaaataaattaataatgggcctcccaaacaaaattgggctgggcctaggacattacaaaagattagtaatctcgatctttgatataggtatgcaaaaattctctcggacgaaaggaaattaaggagactaagaagcgacacaatgattaaagattcatcaaatgaatcacaagagantaaataaaaggaaatcattcgtgcttttgtgtgaaatggntgttgcatatgtttacgtggngacgtccatacttaaatgctgtgagatgaaatttttaa

SEQ ID NO: 10611 - DNA, 1264 bp, Arabidopsis thaliana landsberg
taagaaaagaagaaaaagttaggtagaatatttttgtaatgtttaaagaacaagaagcatgaagttggggtagtaaaggaattgtggaaaaagaagtgggctcatgggctttttgtagttttgttcgaaagggagaggaattatcgaataaaggaaattaaggtataccgattgtgattgtgcagataggggacctgaagaaagggttgaatccactctccggttctgatctcatctttacttccccttacatgtccacagctgtcaaaactggcctcatcactggcatcattgctctcgctgtaagcccattatccctttttcttatttaggctttgatagttatcttatttattaccaagtgtaattaacaaattaactaaggctttatacctaaggcttaaatcaccaacacacaatatgggaatatgattttcaatggtgaaaagtgaaaacaaaaactcatcaaatcaaatcaaattcatgtgtaaaatgtaggaaggaatagcagtggggaggagttttgcgatgttcaagaactacaacatagacgggaacaaagagatgatagcgtttggaatgatgaacatcgttggttccttcacatcttgttacctcacaaccggtacctacacactcacacatagtcacatgtggttattaactatgaaagaaaaagcttataatattaattacgacgtaccatactataccaggaccattttcaaggtcggcagtgaactacaacgcgggttgcaagaccgcaatgtccaacatagtgatggcgattgcggttatgttcacactcctcttcctcacaccgctttttcactacacaccactcgtcgtcctctctgccatcatcatatccgcaatgctcggactcattgactatcaagctgccatccatctctggaaagttgacaagttcgacttcctcgtctgcatgagcgcctacgttggggtcgtattcggcagtgtagagattggactcgtcgtagcggttagtatatactttataatgctgaatgagcctagatgccactgtcttttttttttccttctatttgcgtttggcattttaacacttgcaattttattacattctaaaatgttttttttttcatggcgatgaaggtggcgatatctatagcgaggttgttgctgtttgtgtcgaggccaaaaactgcggtgaagggaaacataccaaacagcatgatctataggaacactgagcagtacccatcatcaaaaaccgttcctg

SEQ ID NO: 10612 - DNA, 1967 bp, Arabidopsis thaliana landsberg
aggatacatcccatggataatttatgcactatacgtgatcgtgtttcaaaaccgtgaaggctctaccgaacttggagctccacttaactcagcttgatctgttttggtccattacacggatcaatatgttgttgaaactgttttacttatcatgtaccaaataataagttgctttgcaatttttatgtattgaagatttgagaacattgtcgcgttattgatacattgcttatctttttgatgtataacttgttggcttttgcaaagtcaggctacggaccttcctaagagttaatgtatcaaattctttgccaagattgtatttaccggagtttaaacttcgcaaaatgcggaagcatttttgagtttgaaaggattttgtatgatgccaacatatattatggtatagattatgctaaaaaagatagatttctgttactttggcaaataatgacaatgattgtgagttgaggaatcaaagtctcagtaatacgacaccgtttgagtcaaaacgtttctgtccaattccagtctggtcccgggattaataaaatagacaggccttcccaggcccatttagtcacatggatgagtcagagactaaaatatctaaaagtgatctgatgtgataagggtgcaccatatcgttcgttgtgattcacgagatgtaatctaaagccgtacgatttaaatatcaataaatgaacggtgcagatctcgcacattgactttgtagtggaaacaaaataaaacgtggactgatctctcttcattggtactctcaactctgtgacagcaagtttcagtgttttgtcttttaaaaaaactcttaaagcttcttcttctctcatctcatctctctgaaaaaatgccgagcaactgtgagattctgtgcgagatcattatcgcgatccttcttcctcctctcggagtttgcttcaggaaaggatgctgcactgtaagttctctctctctctctttcgaattcctcaattttgaagaatcctggaacttcttatagagactgtaattttggattgattataatgtaatttggtatgagtaatgaagggagtgcttaatctatgatatgaatcgcagaaattctctggattggatcaatttatgtttgattcattgattcctgaaagcttggataatcatttgaagaaagttgaattttttttatgtgtggtttgttttggcaggtggagtttttgatatgcctggtgttgacgatcttaggctatgtcccggggataatatatgcgatttacgtgattgtgtttcagcaccgtgaagagtactttgatgaatacagacgccccatctactctgcttgatttctgtttctttggaactgtgttactttgacttgtaccaataaagttgctttgcagttgttttcagagatttgaaaacgtttgtgtgtcatttatatgcaatattgaaagtttcttctgttatcagcttatgaaccctcctgctatgtgtgcttatgcatcaggttgttgacatagtgttttcgcaaggcacaaattaaattattaaattgaaaggttaaaaaaaaaaagagtttaattagaaggcgaagaacatcaacagaattgagctcgcgaccgtggaaccgtagcgcaatgccatcgagagacaaggtcgactagtagcggatgatccacccgcaccatgaccactactggggacacgacggtggctacgaccaccaccacgactaccaccaccaacaccaccaaaacgagctttcctcatgaaaactcgaagagagtcatgatgatccaacggattggagtcacagtgttgtgcaagtcttcgttcactctccttattttcagatgaaattggcaaaggctgagagagtacaataggagtaaatcaatgacaagaagatgctagtgaagtcccatttctgtttacaataatatgtgtgtaaacatgtactgatgagg

SEQ ID NO: 10613 - DNA, 525 bp, Arabidopsis thaliana landsberg
tagagattcaaaaggttcaatcaaaggctgttctttttttatatgttgaaacaagatggaattcaacagttttggtggtaaaagttgttgtggctctgaaaaaagggtttgatatgcttaagcttgaagataaaaagtatgtttccgaacttaccagaatttgtgatgatgtaccaagtcaagacaattttgtcttatgttaatgtactatccaatatcttgcagtatgtttataataaaatagttaatatctttgtatctaaatatgttactgaaaatatatatgaaagagatattcaaagtgggttggatgatagtaaagatggggtgaatggaggatgagcacacaaaaactatgactaaaaaatgaagctaatgttttataagtattggggaaactttgataatacaaatatgttgatctatgttaaagcagttatggatctacaatataaaatgagatgggtaaagtggatgatggaaggtgtgtatcctgaatttgaggctaattgtttgatagaaaag

SEQ ID NO: 10614 - DNA, 1260 bp, Arabidopsis thaliana landsberg
caatgaagctcgacctaaatggcggcgatgactttgttgacacatcagtgaatcaaataagtgcattcgatgacttcgagatatctcaactctttcactgcgacggcttattgctttgcgtctccaataaacactactacagcaacacggtcatggtatgtaacatgtacttgggggaaactaggttgattgaacactgttgcttgttggagggattcgacaacttcggctcgtatgctttcggatatgatagcagcaaaaaccgtaaccacaaaatctttagaaagaaacttgtttctggtggttatgaaatctacagtttcaaatccgattcatggaaagatcttaatgttgatctcggggaatctacagaactttgtgaactaggaagcgtgtctttgaagggaaatgcttacttttcggttataacgaaacatgaagaagaagaactttgggaaaataatttactctgttttgacttcacgacggagagttttggaaagtttctgtctctgccgtttgacaatgtgactgctgaagaagaattcggcattatggttttatcttgtgttagagatgagcatcttgctgtgttatatcaacttgacactttaggtatttggatttcgactgagatcgagcccaataaggtgtcgtggagagagtttttgcaagtagacttgtatacgctggatggttttccggatgcatttacagctgggagattcattgttgacgaggagaagcaagtcgttgtagttttcaatgaagctacagagatcgatctcaaccacggaaacgctttcatctttggaagagatggatacttcacctcttttaacgttggagatactccgccccaagacttcacttcttatgttccaagcttagcctcattgcaaatcgagaagacgggtggctaaaaggaaagcaagagatgactagattgtttcatctgcacttctttatatctctcttttgtttcagtcatttactttcatctccttttgaacaattctgctttttcatgttttttttagcctatttgggatatttgctgctgtgataacatcttgatgcgttttctgttattactttatttcttttaaatttggaagcttacaacaaaaactaaagacaaacataaagagctacttccacaatgaacaaaaggaaactgcctctcctttccacattaatccagcaaaggtatcttcatcttccattcttatttcccaattgttgtcatactttcttagt

SEQ ID NO: 10615 - DNA, 692 bp, Arabidopsis thaliana landsberg
agaggtaaaaatctcgactcggtactttctggtggtacttctcttccgcctttccaaagctttccagtgccctctttcggcctctttggtccagcgtatggcggtagcagctcaactaatgatattaatctggatctcactcttggtccatcttcttggtctaacactaacccatcttcttggtctaacactgacccatcgttctatcgaaaattgttcactcccgtgctaccttgtgtgcctagaaacaattttgttgctggaaacccggttggttcaaacactaggtatattcctccgaatggaaacaacaatgtttgtcatgattttttttctttacaggggaatagttcggcctctactcactcgaaaagtctcttctcaatgggaaagaaccaagccatggtgcgtcattttgctttatcttatccaaccacctattattgttatgatttgttttctttacaagggaatggttcgggaaactggccactcaagtctcatctcaaagtgggaaaaaaagtcagggtgcctcctttggctcctccctattgaaacaacaatcatgattttttttctttacaggagaatggttcgggatctagtccactcgaaaagtctcttctcaatggaaaagaacaaagccgtggagcctccttggtttgctcctcctaatggaaccaccgatcttc

SEQ ID NO: 10616 - DNA, 891 bp, Arabidopsis thaliana landsberg
aaaaatattttctttctaatattgaaaaataaataaaataatttcttaaatatttttgttggtcatttttggttaacgtcgaagctagtcaaatagcgtaccggaattgtatgtctatggtataaaacacattacatcgtatagttaatacatatagtcatacatatagtgtcgtaactgagcagagcaagaagaaacaattgactgtagttcccaaaattttagttattttttctttataaaaaggcccccaattgatttttcctataaattggcccccaattttagaaactacaacaaacttcttaaaaattttaggcccccaaaatttcagggcctgccatgtacgatatatacctagaaatacaatattatacttgatatatacctaacaatctttttttccatcacctgcctatagaataatcaaggctcctagcttaaactggaatatgccggtcgaggcctctttgccccatcagaacaagagctgcttgatttaatatagcatctctttctcttggagactcatgtataagtgaaattaacgtcgattaaacatgcaagacgaagagacgattaaaatggagagaatccttcattttttcataagatttttgctttgtcaacaactttatttgattgagtaatgtttagataagtgatactatgttgttggatacaaatatttcgtgccaatttatctattttttttattattatataagattaaatttattcattttaattttgtacaccattattataccagataggtatttattccataatttataacaaatgtgctagtttcacaaaacattgaaatcattgttggatctacatcagtaatattggctaaagcaaatcatgaaaatatttggaataaaa

SEQ ID NO: 10617 - DNA, 938 bp, Arabidopsis thaliana landsberg
cggggtgcaggaagaatgcctgtgagatcgaattttccaagctcgcggttatctttcgtcatgcttctcttttcttcgtagacgttgatagtcacagtagtttgctgatcttggtaagtagtgaacacctgagacttcttcgttgggatcaccgtgttcctcggaataatgtttgtcatcacgcctccgacagtttcaataccgagactcaaaggcgcaacatcaagcagtagaatatctgttttcaataaagttaagttttttgcaactcaactacaatgataaaaacacttcgcaactattgtcataaagagagttaaaagagtcacttactttgtgtttcttctccaccttcaccacttaatactccaccttggaccgcggcgccataggccacagcctcatcagggttagtccctttgctgggttccttgccgtcgaagaaatcctttaacatctgctgaacttttgggattcgagtgcttcctccaacaagaacaatctcgtcgatatcagatttcttcaaacccgcatctttaagagccttcttcactggctccatagtcttcttgaacaaatccatgttgagttcctcgaatcttgctctcgttaaaggctcagagaaatcaactccatcaaagagcgactcaatctcaacacggacttggtgctggttgctcaaagatcgtttcgcaagctcacattcacgcctaagtttaccaagggctttgtgatccttgctaatgtctttgttatacttcttcttgacaagtttgatgaaatagtccatcactctgtggtcaaaatcttctccaccaaggtgagtgtctccacttgtggataagacttcaaagactccattgtctatggtaaggatactaacatcgaatgttccaccaccaagatcatatacgagaatgtttgactccccacctttt

SEQ ID NO: 10618 - DNA, 120 bp, Arabidopsis thaliana landsberg
ttctgagtttcttaaccttcttatcagactgattttccaccattttcttccattcaacaaatttctcaaaagcttcatctttcttcgttcagaaaattatatccacactttcctggaata

SEQ ID NO: 10619 - DNA, 524 bp, Arabidopsis thaliana landsberg
  unsure (1)..(524): unsure at all n locations
cgaccttgagaataccatcttgagacttgaaccagcatcctttgtcttctaaggttcctaaagaaatttggttcctagacattgttggcatgtatctcacttctgttaaagtaatatgtgtcccatcagagttcttgattcttatgtttccaattccttttacctaagacaaagaatcatttcccattttaacataaccagatttcacttctctaaaatctgaaaaccaatctctccttggtgtcatgtgaaaagaacagcctgtatctagaacccattcgtctgcagtattccctgaaacaaatagattctcttcttctgccataagaaccattgctggatcatattcagctttagctatactcgcttctcctttgtctgaannnnnnnnnnnnnnnnnnnnnnnnnnnnnnnnnnnnnnnnnnnnnnnnnnnnnnttaaagtgtccctctttaccacatatccagcatactcgcttaccatctcgagacttagatcttgatctccctttacccttatttctt

SEQ ID NO: 10620 - DNA, 1156 bp, Arabidopsis thaliana landsberg
ttactgctgatattagtcatatggatactagtgccgttgtaagttctaaattctccggttttcgattccaaaattactactttagatgttttagagctaataaaattgatcaatagtgatgattgttgttgttgaaatagagaaatgagcttaaagatcatatacatgagcttaaaaactagtactttagatgttgtagagcactagtgatgattgttgttgttaagatcatatagagattgttgtgaatgtttttggaaaactttgttttaggttcgtggatttctcgggcagccgcagttagaggaagcacttacgggtatggatttagtgatcatacctgctggtgttccgaggaaaccagggatgacgagggatgatctgtttaacattaatgctgggattgtgaggacactctctgaagctatagctaaatgttgtcctaaagcaattgtgaatataatcagtaatccggtgaactccacggtgccaatcgcagctgaggttttcaagaaagctggaacctttgatccaaagaaactcatgggtgtcactatgcttgatgttgttagagctaatacttttgtggtatgcactcattatttggtcttagaatggtgtttagtattgtccattagaactcaactatcttcttctttgcatttatggggttgaataggcggaagtaatgagtcttgatccccgtgaagttgaagttccggttgttggaggacacgcaggagttacgattttaccactgctttcgcaggtttgagatcagatgattctcatcattatgtttgtttgaagcagatataatattctcatcattatgttggctacaggtgaaacctccttgctcgttcactcaaaaagagattgaatatctcacagaccgcatccaaaacggtggcactgaagttgttgaggtataaactaatctttcagctttctttgttttgaacttcgaattaagcggtgcatttaccgtttaaatcattttgcaggctaaagctggagcaggttttgcaacactatccatggtaggtcttttgttgtaacatgggagttgtttgacaaagctgggaattgattgatatctaatctgttaaatgataaaaacaggcatatgcagcagtggagtttgcagatgctt

SEQ ID NO: 10621 - DNA, 413 bp, Arabidopsis thaliana landsberg
catttatcatggttattgtttacccgagggggtaagtgggtcttcacaatttctttcaacatttactgacccctccaataaatatagaagtgaaacttatttattgaaatgggtttgcagtttgaagattgcacatttgagtggctctactggccgcaagcgaaactcccgttttctgcagacaccattgactacataaactctctagactccgaacaagacattgcgcttctgcaactccatggctggaatgttcctgaagctgtctcacgcactctacgtatctccacgatgctgctgaagaaaggcgttgagagaaacctgacgccatatcaaataggaagcataatgtgcagagaaacggtgaacaaagactcagcgattgaagagatagtgagagaggctcataactc

SEQ ID NO: 10622 - DNA, 1210 bp, Arabidopsis thaliana landsberg
acttcctcttctttttttgtatatgaaaaacgaattttgaagtttataatattaaattcagcattttcatattttatgaaaaaaatattttttcgaaaaacaattattagatttccccttttaacatgtttttataatatattattaaacagccatttatatattttgtcaagtaatattaaaaaagtatataatgtttattcattttcaatttatttgacagaaaatttaagaattttgtatacatattaaatccatattaatataaatacattttaagtatatatactgtatatttttgcaaaatataaacacaaaaagtcaacagatttttttatcaaaatggaaaaaacaacacataattacatactttcattatgaatttcaaaacagtaaataagatttgatgtaaaaaaatttgtaaatgagactttaatataagataaattactattttcttcattgcactgtatcttattggttaaatctatttacatcacaaccccatctacaacaaaacttcaccaaataactagtatataattgttaaaaaataattatcatatacaacatagaaaaaaataatacaactgtagtgtaatatgtttttggtgatttaacccaattatcttctaaagaatacaaattgatggctaaatatatacgtgtaataattaaaggatggccaaaattgagaagaagaacaatgaaagtgagatagagagagaataagcagcagaagtcgtcgacgtgtttggtcttggagatggtatgtttgtcgcctctgggtcaaacgaagaagctggcggtctagccgaggaggaggaacggttcgatggaagcgtccgagccgatgtctcaccggtgtaacctttagccatgaatataaagtcagattagaaagaagattaggatcgtagtgttcttgataaggaactcacaatcagattctttccaccccagaatcagtttctcacgatcaaagacaacgcgatagccagtcatgaagttctctgcaaattgtaacaaggaagaattccgataaaaatcttgcatttgaagtgtagtgagacaacattttttggttgagttttccaaaactgatacttacgtccaatgatgctaatgtcttctatcttcataatggctaaacagtagacatctgtgtcctgaaattatcaatacgagagagctaaagtaatagcagaga

SEQ ID NO: 10623 - DNA, 1307 bp, Arabidopsis thaliana landsberg
tgttttgtaatttagcttgtgatttagtgttttcgagaggatagctaatatctttctgccctttttctataattcttaggcaggaaagtacgtgtggaaaacatacaaagaagtatacgacattgtcataaaacttggaaattctctacgtagttgcgggattaaggaggttcaaattcatatttactatatatttttcatatgtcctcaaataatggttttagtgttccttaagtttgtctcttatgctctgatatgtggaaatgtagggagaaaaatgtggtatatatggtataaattgttgtgagtggatcattagcatggaggtatgtactggaatgtataatctttgctaatacgagcattcattgtttttactttgacttgattgatagtgcacttgtgatgcaggcatgtaatgcacatggcctttattgtgtccctttatacgatacgttaggtataaatgtaccaacctttatcatgtttttggatgattctactcttttgagtgttcgagtatagtaacattctggttttgaacacaggcgctggtgcagtggaattcatcatttctcatgcagaggtttcaattgctttcgtggaggagaagaagatccctgaggtattattgcaactttgtttttaactcttgagataggctagtgcttttgacactttttatgataatttaacccctttttcccttttgggtaccagctttttaagacttgtccaaactcaacaaaatatatgaagagtgagtaatactaattgaacctttcactactttttttggtatacttgtgatgctaatgatcaattgtgattaatcgaaaatgaagctgttgtgagctttggcggtgtcaaaccggaacaaaaagaagaagctgaaaaattgggattggtaatacattcatgggatgagtttttgaagctggtaagagactattatttgcttctttaacaatgatcattcacatataatatggtataatgtatattctgtcaatgacattaacagggtgagggtaagcaatatgagcttcccattaaaaagccaagcgacatatgcacgattatgtatactagcggaacaactggtgacccgaagggagttatgatttcaaatgaaagcattgttactataactactggagtgatgcatttcctagggaatgtgaatgcaagcgtgagttttatttcatttgtcatgatttcacatgaagcgacagcttttaagttttaagttggactgaattttgcaaaacaaatcagctatctgagaaggaatgggtttatttctt

SEQ ID NO: 10624 - DNA, 1531 bp, Arabidopsis thaliana landsberg
ttaagattggagaatactatgctctgtaacaagtaacaacaaatatgatgtttccatttttagtgctaattggactttttcttcttttaatgttggattgtaacttgcaagatcttcataatttaggactaatatgtggaattaactgtttacaaaatttagttattgaaatattgtaacgtgttcaagttgcatgttttgggctagctggttaattacatacatgtataaatgtaaaatgtattatgtatatgcaatattgaacaaactgtagtatcaccgaacgtgtgtggtctgcatcaacataatcatgcaactccatttcaaactttttgaaaagtaatgagaaacttatatatacctttgaaaatccactttcaatgtttgtaagtgttgcttttcgagttttcgtggttgctcataagcaagctaacaatttcccattgcatacactgatacacactatttagccttatacatattatcgtgtacatgagactgccaatagcatatctatttggaaattggaatgatcttacacgcatcttattttttcgtaaagatgaatagtaaaaaaataaaatggttgagatgatttatattataatataataaatgattgagatgatttcagacaagagaaaaatgtgagactaaaagaagaagatgaaatgaaaacgacataaaagaaaaatgaaattacaatctcagttttattatgaaaaagaaggataatggtctaaaggaacgacacttaaaaacgcttgaacatagtcttcaccttgagcaactaggagtatcacttgtttctgctgcttcttcaatggtaattttcactctccttccattaattatgcgcagttcgctgctggagctcatgtcacactcctcctcttcagcgtcatcataagtaactaccacattattgttagtttcaggaccaacattatggtcataccatccaaaccgattgtgcggagcctgtcctttctccgccagcggcaagggatacacatccgcaaactctttcaagtactctgatccaggcaaatcagaacaaaggacactacctaatgcatcaccggtttggctgctgctgcctacatccatgtattcattgacatttccttggggttcaaggtttatctcatctgagatagcgtaatcgtacatctccttaatggttggattggacagaagcgaccaagcaaagaagaacttttcagaagcttcttgtctaaatgggaaagggttactaatgtttccccatcccaaaagattcaattccttctcgatgttctgatataaaactagtccaggtctgctcatccggatcatgccgtagcaatccaacaacccgttgggaagccggttctctgcggcgatcaggatgtcacaaatggctaggcctttctcatactcatcatgacgtgtcttgcttaacttcaaattcatttgagtgatatatcgagcgctcttgaagtcacgcgactttagaatttggtagcaccattggattggtttatctcgg

SEQ ID NO: 10625 - DNA, 1323 bp, Arabidopsis thaliana landsberg
cttttcttctatctttggtgttggttggggtaatctcactttttaatttttgtctgaaattcacaataacatttgatggatctttttgttttttgtcatcgagtatgtataaaagttgacctttgacgtgggggttttaaaaataaaagaaaaaaaaaactgaagacatggcgcgtagtaatagatgtgtaccccaaaatagttccattgtccaaattccgatagaagaagtattcaaaactcaactcaagtctcggtggaagcagatcacaatgtcatctgcttcttctccaccgccgccgcaggttttcgtcccagagccacttttttccgaacccccgcctcctcccaaagcacccgttaacgtttccctatctacaccgcctcctccgcggtctccctccacatccactccacctaggttgggaaatcgaaaccctccacctccagcgagtccctctggccaggaacctacaactccaactatgaccccaggcttttctctatcaccgccgtcttcctcaagattatcaacgggagctgtggtcgggatctccataggaggaggagtttttgtgttgactttgatttttttcctttgtaagaagaaacgaccaagagacgataaagcactttcggctcccataggtacaacaaagatcctccattagaagaataaatggattcctgaactatatattgttgctcatttcctatgaatcgaactctctttagggcttgtattaggcatccatcaaagcactttcacttacggggagctagctagagccaccaataaattctctgaggccaatttgttaggagagggtggatttggattcgtatacaaaggtatattgaataatggaaatgaagttgcagttaaacagttgaaagtagggagtgctcagggtgagaaagagtttcaggctgaggttaatattattagccaaattcaccataggaatttggtttcccttgtcggttattgcatcgctggtgctcaaagattgcttgtctatgagtttgttcccaacaacactctcgagtttcacctccatggttaggaaaacaaaacaaaactctcttatggtttcttgcatgaatgctttaaaatgagtactgatggtttttatttgggaattgaatttgtggtagggaaaggacggcctacgatggaatggagtttaagattaaagattgctgtcagttcttccaaaggattgtcttatcttcatgaaaattgtaagtctaagatcatttttaataaatattggcatgtttgttaatttgtcacgcatgtatatatattcgcaggcaatg

SEQ ID NO: 10626 - DNA, 369 bp, Arabidopsis thaliana landsberg
  unsure (1)..(369): unsure at all n locations
tttattccaggaatggggaaacaaagggggaagggggtctctcatatgacagaccgacaaagcccaccggccacagagaaagaaaactgacacaaaacagctgaactgaccaaacagtctattttcgaccaatggatgattggactgctgcggcaataatatacactataagcacatcaactctatttgatcagcgannnnnnnnnnnnnnnnnnnnnnnnnnnncaaatagcagaaattgatactactgacccaaagacaacacaggacttataaagctacacctcaggtcataagcgataactagcaagcactaataacaaagggatactcatactctatatgccgtgaaaaaccgaccaaaaggct

SEQ ID NO: 10627 - DNA, 1476 bp, Arabidopsis thaliana landsberg
catgaggaaagcccatgtggaagagtctttttctcaaactggactaccagtttaaagagtgagagagaagcaaaatcatgaaataaattattatgacactaaccagacagacacataacaatgtcggcaacacacttttatattttaataattgcataacaactccagctataactaccacaattcaacaaaaataaaatatctaaagaatgtgatgcagtctaataagaatgtttttcttgccagcaaagcaaaatcacacaagtatccattagaaaaatattatcaaatcatcactccctaatctcactaaggttccaaatcttaaccataaccataaccataagaactcaaaacctaaccaagattctacacaatgtatctaactaatagtgtagtaacaatgaaattgagcaaaattgagtaagataatagatgctaaccgtggagaagagcagataagcttccggtaggcatgaaatcgaaaacgagaagtttctcatctttagagtagtaataagctcttaatggaataacatttggatgtttgattttaccaacaacttccatttgtgtttcgaactctttcttagacgccattacatctttaagccgcttaacaacaaccgtggtaccttcctataacaccgtcttatacgatgttccaacacttcctttacctaaaacctcagcagaagctctaagcaaatcttccaaatcaaaactatatactcctccttcagtgaaaacaagcttattcctctctgtttcacctcccatacccgatgatgtccccgttacttcctctttcgaggacgaagcacccggtggaagatccacattccttgtagctactcccgccggtttcggctgcttcgtcctcgcctcattacttcctcttctttttcttaaacacaagaacaaaagcagcgctagcaaaagaagcgcaacgagcgcgctagcgacgattatcgcgacaatcgcagctttcgaaagctgggatttcttgctggataaacgattagaaggattaatcaacgacggagacggcgagggagacacaaaaaacgatttacaaggctttaacggaccaccacagagatctacatttccagtaaacgattcagctgagaatcttgataatgaagacggaatcgaaccgtttagattgttgttagagacattgaaatcgactaaaccgagactaatactaggaagattccctgagaaaccattgttaccgagaaacaaaccagtcaagtgagtgagattattgactgagaaaggtatcgaaccagtgaagttgttagatgagatatcaagacgaatcaagttgtttaactgagtaaaactcgtcggaaactcgccggagaattcgttgtgttgaacatataagcttcgcagatgagtaagatttgagaaatctgaagggatctgaccagagagacgattagaacgaagactgagaactcggag

SEQ ID NO: 10628 - DNA, 1380 bp, Arabidopsis thaliana landsberg
ctttttaaaagtacagttgggtataatatctttttgtactcacataactctttacatattttatccgtttggttttgtaacattttttaatcattgctaagatttgtataaagaaaaattggattaaacctcacgttaacgttgtaaatatacaaacacaatatcttgtaggaaaataaattaaaaagtcaagaaaaaaataattttttaacataattgaatatacaaacatcaaaacataagaaaaactaagttaaaaaatatttttaaaataatttagtattgtattttacgtaaatatttctataaattaatatttattataggataaattaatatcactataaattaataaaatttcatggttctaatattattaatttatatagtttctattgtactagtttaagaaagtaaaaaaatggagagttaaaaacgacataatttttttttatctcttttttgagcaaaataaattgcacctttcttaatcatgccagctcacaaaagttcctaagatattttcttaataccaaacttaatgaggttctgattggtgcatgatgttggcgcgatcagtgtaatttgtttggtcagtgtaatcaatgagttttttttttagttgtcaaccagtgtaatcaatgtgattaattaaaaagattgaatttagagaaaaagaaagaacatagtataaaaagttaacaacaatagtaaaatattttatttcagcgtttttccccaacattttctactacagtaagaaatgctgaaatgtcatttaatctgaatttacacatattttcgaaactataaggactacacggttgtgcaatttaccgactaaaaaaggtgggggcaatgacaatgtatagccaagatgcagctggatggatctccttcatctgaaactggtccaacggaatagaagataagtgtccaatcacttatctgaaactggtgatgtctacatattatgggcctaaaattgtaggccttatcgaagcttatgtatattttggttgaatttaaaaaggcttcaatcgacaactgttttgggcacatcaactaaacaagcccaaaatttggacgcgcgcggaggatcgatcatacaagcgatacggtcgatcaagtagggttccttcctaacctacttctgataagatcgaatcgtcgccggcgcatttctccggcattcttccagatccttaaaggaatattctctttctgtacaagtaattctttcaaccttttttttattactagcaaatttcattattagaaacccttagtttgctcagtaatttatctaggaaatttatttacgagaacaagttttggtatgatcttgaaaattacttgtttgcatagtcatttatctag

SEQ ID NO: 10629 - DNA, 745 bp, Arabidopsis thaliana landsberg
agtacataatttagatatacattgtactgttctattttaatataatatgcaaataatgtaaaacaaatcaacgaaagttagctgtacttatatgacatcgtcagttagaattctttttattttatttatgtttttttattgaataaaaggataattatgtttttcattttcaagggattattttttccaagtggcaattaatatttcaagtgggaacatgtgtcaagcgaaactttttttttttttcacaatattgattgcaacttttttgtttgacaacttttaactgttaggaattaaggaataaataaaagattcaaaaaaaatttcgttttttgtttgacatcaagagatggtctcctctcaaatgaaagtaaaatagaaatctatattcatgaaaaagattggacagctattcaaaatcaataatgaacgacttgtttttttttctattaacaaagaatagaaaaagaccaagcttagctacagctgtattacgcaagtattatatgaaatgaccggctaacatatatatgcaaggggaagaggagaatacaaatatcacaaaaatccaaatttcctttgtagcaaccatgagttccgtgggtgtatttcgtaaggaggaaatcgatggaaacccatattttgtgatattaacagaaccaaaagttaatcaaaaaagaagaaaaaaaacatattttttatgtcctgctgcacgtataaaatatctgaagttcaaacgaaa

SEQ ID NO: 10630 - DNA, 2009 bp, Arabidopsis thaliana landsberg
gggaaaaaaaaaagattattgggggcaaaaagaaaattgtctgcggtggaggaatatgttggaatctttcagacctttttgagatccacatttgtttttttatttttaataagatttatattcttgaacagagaatgattaatagatatattttgaaacctaaacttttattataaatatttaatctagattttggttttttgagttttcgaattttagttgggagaagaataaaaaggtaaatactattgaaagatttattaaatattatttgtcgatgctcacatgtacattatgtggtaatctttagatatttcgatacctacatcaaatttggatgttaagcttcttcttaagtccgagaagagtaaagaaattagtgagcgtgctattaaatattgctggacagctgatgaagtttcttgaggatcctgacgagctccgattgcgtgcttttcttactctcaaaagacttaacatttctatattggcttgcgatgtagaagccatgaaggtatgtattgaaaaaccgaaaatctaagatttctattcgttaataagaaatgataagtaaatttattttgaagataaacctttattgtgggtatttaatcttgattttagtttttggagttttggatttttgattgggaaagaataaaaaggtaatgctatcaaaggaagccactctcggcacaattgaaagatttatcaaagattgtttgtcaatgcccacatgtacattctgtgcactagcctttagatatttctaccactacatcaaatttggtttagggcaacaacccatgctcttagaaaaactaaatactatctttatatgaagttgcaatgtcgaagtaataaagatttatgttgaagaaatttttttttggtttagacttattaaatcaatatgctaagatggggtagtgaagatttcaatcttatgacttttgatggagagtaaagaaatgataagtaaaaatctattttgaagataaatttttattatgggtatttaaactttattaaatcaaaattatttagtggcacatatcaataaaaatcgaaatttatccattttgttttataattttcaatccacactgtaaatagcgtaagatatctgtgattaattacaaaccgaatatgaatcaaattaagattctattacacctaacgattattataattaaaatatatactttacaaagaaaaagcggtaatcctcaaaggtattcattgagattgttaatattaataaaataatttattttaccatttaatttagttataaattttaatccaaaccataaatggtatcgacttgtttgaaccttgagggaaaggtctaaatttctataattcgcatgaatttttaaactaaatacatggaattcactaagagaattacctagaacctgatttatttcaaaagtggactatcaaagtgagattttattacgtcaaacttcgaattacaaaaaaaaaaaaaagaacatcattttcacttgtaggtaaaaagaagtatatcaatattttaattaatttatcatatgtccctcttttgctaattattattttaatttatgatccgatgatgcgagaaaactttcaggtaatgagagagctgtttgagttcgccgcccttaagacgggaaatttcttgctaacacagattaatggccaatttcttaaaatcaacgcattaatggcgggtggagttttggtcggtcacattgagtgtggtatggatttgaaaatctttgaattcgatatttttttgtcggtcggtcaacgcattaatgctattttgtttgatctaccagaatcgctaagcttgggttgcaatacatttgtaacctctattttgtgtgtttactaactcatgtccaggcgcttggaccatcttgacgcatgtatagaattataacgctacattagtctgagtcactcttggatgatcttactttatggaggctctcgtgtcaccatgtagagccactcct

SEQ ID NO: 10631 - DNA, 1362 bp, Arabidopsis thaliana landsberg
atgttttattaatcaatccgaataacattacatatttgtctatattattgactcaaatatattttttcgtaatcctagagataagcttggtttacttgcaaatttcaagaggagcaccacacaaacacttgttgtgaaaataggaataagaatcaaatgtctgaagtttccctccagttgggatgtgtccacacagtttgttgtagctaacattgaagaactgaagaggagcttcagtccactgcaccggaatattcccagtgatcccattgtggttcaagtccaagataccaagtgttttagggatatcaacctttgagatatcgaactggaacatgtttcttgataagtcaatagaccaggttgttttgttggaaccaaacaacatcgaagcatcaccttggagcttgttgcgggataaatcgatccggttaaagtcgatgttgcctaatgatttgggtattggaccggagagctggttatgtgataggcgaaggtcagggactgttcctggaaacgacccaaatgactctggtatggaacctacaacataaagatcgttgtttagacaagacactgaatgatgtaataaaggaaaagatcgttctttacctgtaagtttgttcctgctaagttcaagagccaagattttaggtaacgtagagagagaacttggaatggaaccagagagatcattgaaggaaagttctaagaactcgagattcttgagctgacttataaagtcaggaattggacctgtcagattcgtccagctgagcctgagcattcggaggttcttgagtttggcgatggtgggttggattgtaccggtgaggttagagagtttgcggaagacaagggtctcaagatacggcaagtcaccgacttcagccgggatctgaccggagatctggccggagaatatggttaaggcggtaacacggtggttaacgggggcgtcgccgcactcaaggcagtaccaggagcaacagtcggtttgagggtcccatgaagcgaggtgataagggttgcttagagatttcttgatcttgaggagggtgtttttgtcattttggttacagagatctttatacaaacaggtcgtgaggaatgtgaacaagaacaagagacacaatgtcgctgtcttatccatggtgttggttttgaatcttgatggaaagtgttagtgatacatatacatactatatagagagtgatatagacttagagagacggattccatttgatctctgtttacacatggaccgtaataatagtcgatacatatcatatagtcaagatgtcggcgttgaatatgtttgggtaatgcaattacccgttgtatataattaggcttttacc

SEQ ID NO: 10632 - DNA, 1022 bp, Arabidopsis thaliana landsberg
ttatatgtatctacgaaatctgttgcttcggaatcggaaggtgttggtatataatgtggattgtccaggacattgtgttgctcaatgcactcggtgttgggttcggttttagtcctttactagttcgtctattcaccattctgaatgatcgttgatattttacatatttgagtgtagcttagaaatagagcaagagctgatttgtatctagtcctcggtcttcttgttttatcacagctacttgaataaacaatcgatcatgatttaaggaccgttgtgtaggtctcggtggaaactatcacatttgaaaatatcatacaaagaaaatcattccattaagaaagaaaaagactagagagaaagtgaaaagacaatgtaacaaaaacatctttcatttatctttaactgatgataatatgtttagtaacgcttataatatcgtttttgtgatttgtaactgtttaaagtggtataattcataccggtactatctactgttcgtttttcacaatttaaagtcaaattcactctattgcataccaccgttcgaattcatcgactctaaataatatgtttagtaacgcttgtaatatcgattttatgattcgtaactgtttaaagcggtatagttcataccagtactatctactgttcgtttttcacaatttaaagtcaattcactctattgcataccaccgttcgacttcatctgatttcgtcggctctaggtacactctttatccatttaatccgggcatgtaccttccccactacgtaactattcactgtcacacctaaaggtgttaacataataacaaagatacacaagtttgcacgcgttaattaacttgtctctatgcaaattttgcataatggaatatacgtgtaataccatgtaaatatacgcgtgtaaaagcaaaacgcatgaatcgtatgatgtgtgttaacaaatttggaaagttttgctcttttgctgccaccaaatcttcgtattatattttggacattaccatttttacgag

SEQ ID NO: 10633 - DNA, 565 bp, Arabidopsis thaliana landsberg
  unsure (1)..(565): unsure at all n locations
tgtaaaaaatttaaccttttaccaaccaataaaaaaaaagtgcccatattcatggatttattcttcggtaagtaaaaggattgcctcgtggtagatttatatatagcacccccatgacgagagtctgaccaacaaaaaatcaagccacggatgtaatgccttaatccttcagggatattaatattgattctatttcgaaggtaagtagaagagaaggcaaagaaacattccatgtagttgtttgaagtgtggccgtagtccgtagatgaaataagctaagcatcacgtggagactgagccaaagaacgactcacaatcgattctatgatgtctctacgtctactaataattgatgaccatagcttcgaaatgcataggaccttcgaaagagatttcaccggcagtctttttagtatttcaaccgtaccatcgagaggtaattggcttcacagtgaagaagtcgtagtgtcgagatagtgaggtctgtttgtgtcctctcttcatcgcctctgttntatgaagccctagagatcactttgtaacttctatatcacgtaagtagaaa

SEQ ID NO: 10634 - DNA, 584 bp, Arabidopsis thaliana landsberg
caataacaaactaaataaatcacaacgcgtatgagtttgtataactaatcccatacatgtaaaacgttgtgtaaaccaccaatatacattctttgaaaactgttatccttttctattatgttatattatttatttatacacaaatcgccttaaatcacatacacgacgactagtccctagcggctagcgctttctttcttgaacactgattattataacacgatcatatgttcttcatttgtcataatgggaacgcttaaccaaaagcctacacaagacaatcagttatgcaaaataaatgataattcttcttagattcgtttttgcagaagctaaatttaaacggataatccaaattatattcaaatcatccaaggagaaagctcggaactattaagttcgaagaaagtggagaaatgggtatgggtcatgttcccatattcttggaacagaggaaagtaatgattagtgttgactttcctatcgcctacaaaaacttgggcttttctaatttgtagggccaagaaagacaacctaattttctacttacgtgatataaaagtttacaagtgatctttagggct

SEQ ID NO: 10635 - DNA, 1727 bp, Arabidopsis thaliana landsberg
ggacttaaaatgtcatatacaaataggtacaccaatgacgcaacacaaggatacacatatagtggaatacttacatgcttatattggtggtgtgctcaaatccataaggtaagtaaagtttcttattgcatcttttcttctcctatcttgttcgtgtaattgagaaaaaggacattgctacgtgtaggaatggatcagacactagaggctattttgtatggtcatttatggatttattcgagcttatagggcggtacgattatggttatggattgtactctgtaaatttcagtgatccacatcgcaagagatctcctagactctctgctcattggtactctgattttctcaagggcaaaacctcttttcttgattccaaaggcatcaaggaatcgcagagcaacttctcttcttcctcttagtactgtgatgaaataactcttatgttctactgaatttagactacttgtcatgagagccacttctttttttctataaattctaaacaattttgttaaactagtttagtaactttacacgacaaaataatgagaaatcacagatgctgaatacaagaattttccgtttttaaatgctaaaaagaaattcgcacccaggcctaagcatgacatcaagttcaagctagcattgtatcaaaaaaacatattacagaaccatacaaacacttgaatagttagtaactcttagcaaagttgtttgttacacaaaagcatgctaatccgcatcaaaaaagagaccaatgagcagcttcaaattcatataaatccattgttaaggctgcatgtccacatcaaaaagaacaaaaccgcagcttcctacctacatgtgaaaatcataacaaagactgatcagaaactcaagtatataagtactaagctaacaatctaaactctaaagcaaaatagttatacaaaaaaaaaaactcattaatttacctgattgtcccccgttttgttatgttgataaagttgggatatttttttcttcaaaaaaaaaaaagatttctacttcaaaatttaagaaacaacattattcttaccaaaaaaaatgagaaacaaggatcaatttttcaaatatcatataattatcttttttctttctttttctcaattaataaatgttattttgaattttgagaataatttatagttaaagataattatataacttagtaaaatatatccttctacataatcagtttgttaaaaaaaaatctataaattagaaactccatctaaatacgagcttcacagattgtttcacagagaaaacaaactttggcttccttctctccttggttcgtgtaagttgaatgtttttttttattttaaattcgtgtttcttctcttccgttttgcgaagttgataattttgttataatcttatatgaatatttttcaggaaacatggctcaagtttgtcacacatgtagacatgtaacagccgtgatccattgtgttacagaagctcttaacttctgccttacatgtgacaaccttcgccatcataataacatacatgcaggacacgtacgttaccaactttgcgataactgctcgatgtatccgtctatacttttctgttatgatgacgggatggttctctgtcaatcatgttattcgcacccttacaattgtgccactaatggccatcaaacctcagtcgtctttcgctaccttgcatcatctaccccatgatcatgccca

SEQ ID NO: 10636 - DNA, 1143 bp, Arabidopsis thaliana landsberg
attattatcggatttttggtttctctaaatgtaagactcttaaaaagtaatattttttgcgtatccctttccattctaaacaaaaataaataaaaataaatatcacttaaataaactatatcaatattgtcacaatagatccagctttagtattgaaaaactatttaaattttttattaccggccatgtcttaattctagctccattatccgtcctaatgaaagtgcaattagttacttggacattctcaactatagattcttctccatctcttcctagacttcccacactgtattttaattttatagataaagaagaaaatgtaatatatatatatatatatagaatatataaaattagtatatgtacaatgctattgatgaatcacacacatatataccttattccatgaccaggtccacaattcatccttgcgatattgatattcatacttccgctgttaatagctacacaatcatctcctggaaagttttataagaaattttaaaattaaataatcttaaaataccatttgagattactttttaattagtgagtgtgcaagagaaatatctagctatatataccagttccaataactgtgtcgtatatatcgacatcacttgattctgagatattaattccatcagtgttaggactatcgtggggtgctacgagttttatcttcgttattttaactcttttgcattcgctaatcgatatatggttttttggactgttgaatgaggttattccagttatcatgagatcgttgcatctttgaaaatgcaattgctgtaagaaaaattgaaagaaaaaaagaattcatcaggaactttccaaaatattgacgacgatcaatgtatataaataaataaaatattttcattttagaattcagaatgaattttagtgagaaaaagataaactcacggtaggccgtttagaagcaggcagtccttgctggatatattgaatatgaaaaaaagaggaaatattaaattaacacttttgtttatatataattaaaaatcatatcttttattgtgtatataaatttctttcaagattgccaaaaaataaaattgtttcaccttccaaaaagacgagccacgttcatgaattgttcccgaaccattgact

SEQ ID NO: 10637 - DNA, 711 bp, Arabidopsis thaliana landsberg
ctacgagtcttatcttcgttagttgaactcttttgcattcgctaattgatatatggtttcttggactgttgaatgaagttattccaattatcttgagatcgttgcatctttgaaaatgcaattgctataaggaaaatgaaaaaaaaaaagtattcatcatgaacattccaatataatgatgacgatcaatggaataagatatttttgtttgagaattgagaataatgttttgtgagaaaacgagaaactcacagtaggacgtttagaaagtgacattcttggctggatatattgaaaatgaaaagagaaaaatattacattcacattttgtatatatacaattaaaaattttctctcttttgtatataccaaaattttttctctcttttgtatataccaaaaattttcaccttccaaaaagacgagccacgtccatgaattgttcccgaaccattgactgttaaaccgattatttccttaaaactaacccatctaaataacttactctccgaccaagctgctttgttaataggtgcaacaatctttccgtcaaactgcataaatgaatacatatgtaccccttttatagtcagatatttgatcgcgtaaaattgtaaatgaatttataaaaaatatcgataaataccttaacttgtactgaaagagatttacaaagggccttggaaagtaagacgttgtagtaagaatgtt

SEQ ID NO: 10638 - DNA, 525 bp, Arabidopsis thaliana landsberg
  unsure (1)..(525): unsure at all n locations
taacaccctaaatttggggggaataaaatttcttttctaatatccctcaaattcaggtgttactttcttgttcctctttcttttcgctcctttattcatttctttctaagtaatagggaattttactccaattatagttgttaataaaaacccaagggaataatgattgatgcatcatgctataatatatttatttttgtctgatgttttgctccggtgtgtatccatttaatatgtggctcattattgtaaataaatttaatagcaggaaatagatataaaaaataaataaaaagaagaaaaggaggttgcggnnnnnnnnnnnnnnnnnnnnnnntgcgctcacgcgagccatgtgcgctcggagctgtcaagcgtagggacggtttcagctgccgctcagcgggcccagcccgccaggctcccgcacgccccatgttctcccctcccccgagtgtgcgtgctcatgcaccagcgcgncccatgcacacatgacatggcatctcgctcctcaatcctcatccc

SEQ ID NO: 10639 - DNA, 514 bp, Arabidopsis thaliana landsberg
  unsure (1)..(514): unsure at all n locations
attaatccctggcacattatgaaatttatggtccaaacattttttagaattcaatgtgcacatatgttacccctccgtcaaatttcatgatttttaggctatttgtgtattgttgttttctttctgtagaaaatcattaaaatgcaattaaattcataaaatattataatgtcgaccgaaaatggtaaataagttaccaaaactaataaacatcatataagaagataacctcaaatcctcatatgaaaatgataaagtgaagtattgattatgttaaaatttggatagttaaggtgatatcacatgtaactcacgtaacaagtgaaagtgaattaaaagaaacgctggcaatctttaggttttatggcccaaacatttttgaggatgctatatgggcatatattgctccaccgtcaaatttcatgattttntgagactatttgngtattattataattctttctacagaaaattatcaaaatgcatttaaattcataaaatattccactatcga

SEQ ID NO: 10640 - DNA, 862 bp, Arabidopsis thaliana landsberg
gaccatctatccccaagatcaaagtcaaactgaccgtccctgaagagttttccagataacctcatatttgtcacctgatatgaaccactcagattcaaagttccaacacgtattaccgttgtgcatataactttagccagaaaggaatgatctgaaaatgtaataccataactgactaataagagacaatttaagaaggggttcatttttaagttttaactgtaacggttctcgaagcatcaaagtttctcaagagataggactaatacaaatgaaatttaacagctaaatagagaaaaaggctgttcatacaaccccatggcatggatactcataaaaagtcatttaggtccatttctaggaaaatgacaaaccttgtaacctgagggtggtgagatggaagacatgattcttgagatgaaacaatttcctcatcatcctctgcgtaaaagctactgattgagattgcgaaccaagaataacaaaagtggtaaaatttaacacatgttgaaagttgaaaccgagagaagaactaacctgcagcagaaccatactctgtatcaagagtcgctgcactagtgctagaactagaagaatatgactccagacgtttctgcattctttcttcatcatcttcaacttccttctgcctcatccttattttggcttctataactcgctgctcttccttcataacacagagatcacaatattggcagaatcagccagtaattccatcacatactcttaaaaacaatactgtttcaagatttaagtctggcttacaatttgttcaaagctcttctcctctttagttttccctccacgatactcgacagcataattggatgttttgcaaaaa

SEQ ID NO: 10641 - DNA, 1757 bp, Arabidopsis thaliana landsberg
atataattggttgaggtaagtagtagataaaaaacgctgtggtttgatttacgtgtattatttcaatacgtcgtcgtgtacacgtatagtatttaaagagtaaatttgaacgtgacaggtgcccacacgattggagtgtctcattgctcctccttctcaaaccgtctcttcaatttcaccggcgttggagaccaagatccatcgctcgacagcgaatatgccgacaatctcaaatcacggagatgtttatctatcgctgacaataccacaaaagtcgaaatggatcccggtagtcgaaacaccttcgatcttagctactaccgtcttgtcctaaaacgtcgtggactttttgagtctgacgctgcattgactatgaatcctgcggcattggctcaggtcaaacgcttcgccggaggatcggagcaagagttctttgctgagttctccaactccatggagaaaatgggaaggattggggtcaaaacagggtcggatggggagattcgaagaacatgtgcatttgttaactaaaagtgtttcttactttttctttcgcaacttttttgttttgttttaaatatcttttatattggtttttatgttccttttgtcaacttttttgggtgtttggaagaatttcgagatatgtattattgtatgtggtgaatatgtgattttcaaataaatttcacgtctgtgaaaatcgttgaactaaattttccaccaatttatttttcaataaaaatttgctttagctttagatttttttttctaaaaaagcaatagataaatttgtataatataacagaaatgtttctaatataaattaaattgggccatgacccaaaagaataagctcaaggttggaacaaaaactatattgcgctgaataaagcccattggtcttctagtgttatctgcgatttccgatttgggtgattcatcagtgtttgcttctctactcaaatttaccattgataacacacaagcgtaacttagtgttagactgtgtgtgagaacctttacataagaagactttatattaattaccgatttacctaagaacttttatatctctcgaatattacataaacgtcagtgtgaaaaaaataaagactcaaatttatttgtcttcaaatgttttttccattgatgaaagataattagaacatcaaaatggcttggtgtagtctactcacaatattgacaatagttttgcaatcttagtattaaacatggtgtatacattatctttctttaattacgaattgtaatttatatacatcaaagattatcacataaataaaacaataaaaacctgtaatttgttctcttttcttaatcaaaagagttaactcaaagattaaattttcacaacaacaaagttaaaagattacaatcagtgatcaatcacttcaagtatctcacttctgcttttcaccaacctatgaaacacttctctaactcttctctgtaacccctcaagcccatcttccattttccggcaaatctcctccatctccgccacttgcgccaccacatcctcctccccattaaacctaaacccttcactgaactccatcagcttcaacccgatcctctccatcctctgcatctcctccatcagtccaccaccacgcgtatccttccgtttcatctcttctacgaccctctccgagatactcacggccgcgttagcccatacctgattcttcggcagcggtacatgaaccattaagccgtacttgttgacaagg

SEQ ID NO: 10642 - DNA, 815 bp, Arabidopsis thaliana landsberg
tgacatcgttgtggtgtctattgtggccggttctcgttcagactggtccaccaccatggacacacagttgctacaaaaggtatcagaacctcgtttgcacttgtcttgaactgagatttgcattgccattaatgaacaactccgctctgtttctgcagatgcataatttatccaaagtggatcacaagaactttttgaatgtgatcggttattgccttgaggaagagcccttcaagcgaatgctggtttttgaatacgctcccaatggatcactctccgagcatctgcactgtgaggatttcatctcctcaagaaatcttgtttgatttaactcgtacactctttgaactgtttgaactgatctctcatctcatggcagctcaatacgtggagcacttggactggcctaccagactcagaatcgtcatgggaatagcttactgtctagagcacatgcacaatcttaacccacccatcttgctctccaatttggactcctcttctgtgtacttgactgaagacaacgccgccaaagtctctgacttttctgtcatcaactccatatttccctctaaggagggttcctcgagcaagaaccttctagaaccctcgttacttgatccccataccaacgtctttaactttggtgccgttttattcgaaatcatcagtggaaaattaccagacccggattctatgcttcttgaacccaagcccacaagagatattgtggacccgacactgaaaacatttcaggaaaatgttgttgagagactgttggaggtggttaggcagttgtttgaaatcatacttag

SEQ ID NO: 10643 - DNA, 1810 bp, Arabidopsis thaliana landsberg
tctaggcaaaagaaagagagcaagaaaagaggaaaacacatactgagaactcaaagacgcgaagaaaccaacaagaaagactgttttggctaataggaaggaccctatgctcacaacatctcactcaggggttcagactcaaggaaacgacatttgtaaactgaaaaagaaaagaaattgatgtatctttcttcaaccagcacccataagaacaagatatgaaagagaggaacaaagaggtttctctaggactatgcgaaggaagaatttgcagacttcagccctgcaaaaaaaacgaaaatgtcggatatgtaaatatcctctgatagatatgaatatgtgcacaaaagatatcattaagtgtggggttgacgtgatggcatacaacacttccgtgttcattgtttgtttatatttttccttttcaaattgtccaaaaaaaattagcagttttaccatttctcaaattttcttattttgccactcataagaaagtaaaaaccatcttaatgaaacctattaaaaactacaattgggataattacaagaaattcaacttgtaccaaatgcataacacgcactaaagttccaatggcaaactatctaaggagggaagaatcgtgtagaattaaacaggtttaatcgaaagccatacctgtctcagaaatttgcctcacaccttcccctaaagatcatagaagagggtttgaccactaagtgcagttaacgaaagagcccacaaggaaatcagaacgtacaagaaaccgccaatcgagcgcttcttggaatgagaaaagccgatagtggtagcagcttggccagacaaaaacttgttccatatctcagaagatgacaatccacttaaattaaagcctgatataacctgatagcaatgaaaaagcaattaaaaaattataagaaatccaaagatggacacaacaatagctagaagaaaaccatccaaaagccaggcaagctctaaaaatggactcaacttacattacagtctcataaacaacattagcaaaagtaatcatcgttcatgaaaccataaaaacctagcagcaataattaaaatgcagataagataacaaagcacaatatctgaaccgtggtgccatcatcacctaactattggcccactttatacctcacagatctgaaaaaagctggaaaaagctggaaaacaaacatatccaattcgaggatatatcaatcaatactaaatcaataattctacctaagaaaccctaaatttcaatcaaataatccgaacacatcaaatccgactcaaacagatcccaaacagacgaatccaagcataccaaatgaatttatattaatcaaaacgaaaaattagatccactctgatcaaattcgagaccataaagagagaaatgaaatggagagatggagatctgcgaaagaaatacctcagagccaacgggcaaaaccaccgtcgccgacgacggaaagagacggaatccagagcttctctacctcttttacctttcaatttttcgatccaaaagtccaacaaatatcaatccttcctccaaacgttttctctctctgccaaatatctctcttccttcccttttcaatgtgcggttctctcgtgatgaccaaaaaaaaaaccctatggttttatattcccgagctagaaaaagaatattttctactttggttcgatcgtcattgatgatattgtggtcgtgtcgcgttcgaaactgctataatcgtctgtgtctcactctacgaacttacggtgttcttttcatatataaccgtgggattatcaggtggttgt

SEQ ID NO: 10644 - DNA, 1139 bp, Arabidopsis thaliana landsberg
catctatataaccatagtctcacattttttttgtggacaaagaaccataatataacattttgtttcgtaaacaaattatttaattccatgcatggcgtgggacaacctaagtatacatataatttatttttttaagtagtagatattgaatcaaagtaaaatatagaagcagtgaaaattatagtttgtagtatatccctatatttcttacatgtaatgatttaaaaggagacagcagaggaagcgggtgggacccgactcggacagcaagaagaagaaagtcaattttttggacacaaagacagaagaagacaccttcactttcttctctgcccgttttttaacaatttgtgctcttcttcttccgtttcttcttcgccgtcagattcgactgtaactgtaagttcttcttcttcttcatgttcctcctgatctcagtcgctgagcttgattagagtttgcaattgtttgactttggattcgatttaggctatcttagaaatgagtttggttcgttttgtgtagctaaagtttcgatttttgtttctgggttttaaatttatcatcttttatgaatctggtgaaatgataaattagctcaagtaacctaatttcagaacccaatcgctttgatttgcaaaaaaagaaaaactcctccttagttccaattaggtaactcctaaaattatagctgaaaagggttcgctagtgattctcttcttgatgataatttatctcaaaaacagtttttttaggattcatgagttaaaagagtatgttcgatacttgtggcccaaaaggagtcaaatctcaagtcatcagtggccaacgcgagaactttgtgaggtatatataacaatttttgaatctcatgaaattgtatgaatagtattaagctttttgagtattcctgaattcaaataggttagatagtatggactcaaggtactcgcaaagttccgaaacgggtctaaacaaatgcacattgaatatacaaggaggacctaaacgttttgctcaaggaagcaaaacatcatctggatcttttaagaaagggtttagaaaaggatcagaggggctttggtctataggtcggtcgattggactcggtgtttcgcgcgctgggttccagaagatct

SEQ ID NO: 10645 - DNA, 782 bp, Arabidopsis thaliana landsberg
attaaaaattctagactttgctttagatttatctcttctttagatgttacaagctcaagctccgattttgggtactgggtttaacttaaatctctagttaggtttcagattacagatttgagttgtgtattgctttgtaggttttactcagaggggaaagaaagcaaagaagctaaatgggcagtgaatgatccaatgagcaaatcttataagctctctttaccttcagcactaagacctgataatctcttacctggaaatagacttagatacactgatgcttctaagtccaaatcttctaaagtctcatggtacaagactattcttgatccaggaagtgagattgtcttgaaatggaattgggtcttcattgtctcatgtatggttgctctcttcatcgacccgttgtacttctttgtcccagctataggaggagataaaaactatccttgtgcaaggactgatacaagtttaagcatccttgttactttcttcaggacaatagcggatcttttctacttgctgcacattttcattaagtttaggactggtttcattgcgcctaattcaagtactagagtgtttggtagaggtgagcttgtgatggatcctaaggctattgcttggaggtatattaaatctgacttcatcatcgatctcattgcgacgttaccacttccacagatagttatctggtttgttatatcgactacaaaaagttaccggtttgatcataacaacaatgctattgctttgattgtgctcctcctaatacgatccca

SEQ ID NO: 10646 - DNA, 511 bp, Arabidopsis thaliana landsberg
agtggtcttggacatctaccaatcaaagagcaaatagtacggttttataagatatattatttttattcaaccttattgagtcaactgatcagtatgttaaattattcaccattgttagttgaaaaactattcttttatatagttattttgatatgatttcaataataaatggtttctataaatacttcaaatgataaaaatatatgatttttctttttgttcttgagcatagtgacaatagtctatactttatcttgaaatctttctttttttaaataagatacttacgtcctgtttgtttggggggggggatgaaccatctcaatgaatattaaaactaatgtttgcttttcatgttttaatagatcatctgaatgattcagttgaatgattatttttaaactcatctagaaaatgaataaaatcatactgcgttcgatccgttcattctgctgaagatgattcagtcaataattttaaaatgttaaataatacccttatttaatttatg

SEQ ID NO: 10647 - DNA, 1201 bp, Arabidopsis thaliana landsberg
ccgacataaccagagatcataacattccatgactcaacaacttccttttgtgtctttgaaaagacggtttcagccaaatttgcttcaccacacttgaagtagagatcaatcaaggaacagttcaaatagatatctgcatctacaacgctcctaaccacataaccgtgaacaaattttccatgtgagagattccgtgagcgagagcaagccatcaaaatactggtcaaggttgtctgactcggtcgagttccttctacaatcattctattaaaaaactcaacacatgacttactatctcctttagcgacataacctttgatcatagaattccaagcaaccaaactctttctagtcatttgctgaaaaacctctctagccatctccaagcagtcacatttcccatacatatcaacaagggcagagtttacatactcatctaactcaaaccctttcttcacatactttctatggatctccttccctctctccaaatacaacagcctcgaacaggccgataaagctaccgtaattgaaattgaatttggttcaaaaccagaactttccattctttcaaacaactccaaagccttctctgtctctccactttgataaaaacacgaaataaccgtgttccaagacgcaacatctctctcaggcatttcgtcgaacacttgtagtgaattctcaaacaagttaaactttgcatacataccaaccaaagaactcgccacaaccacatcacaaacattaaccactcttcaccacaagagtatgaatcatcctaccaggaaactctctacccaacgcaccataagccttaatcacattcgggtaagtaaacgaatcagggacacaacttgggcaattcaacaacctcttgaaaacctcaagagtctcatgaaacattgagttctttgaataaccagacactaaagagttccatatgtaaacatccgatcgtatatcgaagctctcgaagacgtgtttcgctgagcaatggtctttacaagtaaagtagacattgatgagacttttgcataaaacgacgtctcttcgtaaccccaacgtgaatattctctgatgaacaagcttggcttgtcttagagacttggtggtattggcacactctcgcaataaagacaacaactttgaagaaaccatttaaagttcacatttttattttcagagattgaaatgtgat

SEQ ID NO: 10648 - DNA, 1370 bp, Arabidopsis thaliana landsberg
  unsure (1)..(1370): unsure at all n locations
ggctggttattctttttgaaaagtttatgccattttttaaggtttattaagcaacttgaattctatcagtattatttaaaaacgaagacgtgaaatgttgggaaaagaatgcgttatatagcgaccggctgacgattagagatttaacaacaaatgcaagttgaattatataaaagcaagattgattgtgacttgattaagttttatttctatccaagtagactcattgattaagttaggatcatgttgggtattaaatttagatcaagttacaatttggatgaataatttacttacccacgaggaatttaatagttagttcttgtctttttatattccgaaacgtgccatttcttgaaagtatttgtatgatcactattttccccagtgtgtttggctttatgcagatttgttcattgttgatgaatctaatgttaagagtcgtccactttagcatagctagatctgagtgtttcctagtttgataaaatctaaagacatttgctcatgtttcagccccaagtagaggtatgatggattggtcattctcaagcaaagtcggttctggtcctcagtttctttcttttgggacatcccaacaagaaacgcgtgtaaacacagtcaatgatcatttgctttcttctgctgcaatggatcaaaaccagagaacttacttcagctcactacaggttaggctatttcttgaaaagaaaaaaagtagtgataaagtgtgatttagtgaccttgtaagaaagcttggcaattggtttagtttcttctggtctcaaaattgatacaaaatgatctcaggaagacagagtgttcccaggttccagtcagcaagaccaaacaaccatcacagtctccatgtccgaaccaaactacatcaacagtttcataaaccaccaacatttaggaggatctcctatcatggcacctccagtttcagtatttcctgctccaaccactattaggcatgcactgcattctatcttcttctgtttaacatcagatacagaacctctttacttctatagttgactcgagctcctttatgttcatctccagatcttcttcaaaaccacttccccctcagttgacaatcttttatgccggttcagtattagtttaccaagacatagctcctgaaaaggtaaccaaatttccttcaatatgtgttacattacagtccaagctatccactgactaagtattcaatcaaagaaataagtttcacgtatagacatgctgaagttatagaaagttactaacctggtttcaacatacagtatgttaatgattcatagatatgataaatctttgtccttacttcttcatttatttngcattcataggcccaagctatcatg

SEQ ID NO: 10649 - DNA, 1720 bp, Arabidopsis thaliana landsberg
acccggttttcttacatcgtcttcatcttcatcatcatgatggcttgaaaaagcttgtctatttggctcaccaaattcatcattctttgcaaatcttcctctaactcttggtcgactatctgccaacgtcttcctacatgcatactacaacaaaatataacaaaaaaaacatgtgaacaaatcggtatatggatcaccactggtttaatccggttatgatggttaagcacaaagaccttgattttcttgctgaaattcctctcgttcctcttcttcatatacctatgaatcttctcttttctctgctctgccgagagttttccgactttgttgaaactcgggtcgtctaaaccggttatctccgtccctaactgcgggagaaccggctctgccaccatgtggttctggttctcgacaccgtcaagtccctattaagaaaacaaaccccataaccggttagtatcagaccggtttactaatctggtttcattacacaatttgtttgccagcaatacctttcattatttatatataaggtttggaatatatacctggagatgatgatctcctggattaaagatgggtttaatcggatctggacagaacaatccaccattatcagcttgaatttccatcaattgatcatgtgatggtttgaaatcagaaccgagatggatattcccggagtaaaaaccagatcctaaaccggtgttcatcatattcccggttacggtcatgtaagtcggtaaaccggtattacccaaaaaagagcaagaaggagaagaagggtttatggaaccaagattgtaacttggcacagaagaaagacaatcttcttcgaaaaccgataaaggcggaggcagaaggtcaccagaggaggaagagtagagagtgttcggaggctggtgaagttgaattccggtgaaatcaaactgctcttggagttgatcggaggctgggaactggatggatgaagagaaatcgatagaagctgtgatatcgttatcgaaatcatcttgtgaatcgaatatgattgataaatcagcgttgtcgttgttgtcttcatgatcttgattcgaaccactgttggatttgtctggaaagttgttggtgttgttgttttcgacatagccacaaccgtttgaagcagaggtcacttcagaagtttgattgaaggtttcttgaaataactgtgaatcgcagaaatcgaagatctgtgcggtgagaggacttgtgatctcatcctacaaaataacaacagcaggagaaagatcaaattagcagaaaatagaacaagtaaatatatgcatctaattgtttgtttattgacatacgttgaaggcttgcataaaaagctaattggtgggattttcttgtgaaacaagaaacaataactttgaataaacctaaggttagttttaacttaacacagtcgtttagagagaactatgtatttatacgattagatcttgttccttctatgtggttttcatcaagagggaatctagagaagaaattaacgataaggcgggagagtttccataacaggaaagtttttggattcttgcgtttctttagaaccaaaacgttccctaatttaaactaacatctgattttttaacaacaaataaaggccgaggtaagagcaagaatcattgcttttgatatactcattatatatttctaataaaaattcgtgtgattactattcgaaagtata

SEQ ID NO: 10650 - DNA, 1323 bp, Arabidopsis thaliana landsberg
aactatttcaaattcaatataaggaaccaatgtttaactttcttttattttgatatttaacaccatataagtgagataacaagttcgggaagcctcttgatctcccctaatcgtttctacaccacttggggttggaaatttgacgcattgatgataggttgatggtactgcattcatttggtagatcaacagagtccagaggataatgttataagccgctggcctatccaaaacggtaagttccacgatctttgacacttttcccaagaatagggagtttgatcgtcccaagagacatggcggtgtcacttgtaaaagcgacaagcgaagatggcggtccaattatgtcagctcagcttattctcattctttctaaagtgcttaagaatattaggtccaccgaacttcttgtatcgatgaggattcttgagactttaaaattggcgacatcgagtgtcaagactaatgcatcgtcgtttgcctctcgagatggcgtgtttcttcttcatcgaatgaaattgaagctcccaggatgtcgatttcctggctaaaatttgcttttataagaaaattacgcctatgcttcttgatagcactgacagaatcccgacaaagctacgatcctccaatgattatatttatctttccttttgaactccttggctcttcatcatttgctgaccttgaccttttagttattggagtttgattttcggcggtgactcttgcttcatgatacttctttacaaaactttcaatatcaaattttgcgagatcaccattcttcctaactccgccaaatgtatttttaatacgctgcaatccttcgtcatgtgcctgttcactctatggatgtcgcaatatgaaatttcatctcaagtccacgttgtgggttttctctttccttggaatggtcttccgacattgttgttggatgggttgactccgaacctctttgatcctcgattatctcttggttcaaacttctttggaggaaaagtaaccactagcttaacttgcttagttcttttatcaaagctttccttctcatcctccacttccatccacttgttagctcaaaatagtgcatctaggattgtgggcggtttatggactatcaattcttccttgaatcttgattcctacacaaatctttttcttagggcagataaagtcaattgatgtgacacctttgggagcttagtgagcatggctttgaaccttggtgatgtaagttcggagcgaatcgtttggtccttgtgacaagttctaaagatcagcatccgaagtgcttttccccataaggatagaatattgcttctg

SEQ ID NO: 10651 - DNA, 911 bp, Arabidopsis thaliana landsberg
aattccgtcaagtcattataatgaaaatatttcactgtgatggcttatttttatgcaccatcctaaaagacactagaatcgtggtttggaatccgtgtactggtcaaaagaagtggatccaaaccggcgaaaatctcgacgaaaacggtcaagactttgttcttggatattaccaagacaataaatcaagcgataagagctacaagatattgagctacaagggttataattatggcgaccaagaattcaaaatctatgacataaaatctaatacatggaggaatcttgatgtcactccgattccaggcaactacttcacttgttctgattaccgtgtgtctttgaagggaaatacttactggtttgcttatgatttgaaagacgagcagttagggttaatcagttttgattataccacagagagatttgaacgtctatggcttccctttcagtgtgatatttctgatcatgattattctctatcagttgttggagaagaaaaactttcggtggtattacagcttaaggatgcaccaagaagagagatatggataacaaataagatggatgatgagaccaaagagatgtcgtggagaaagcttttcgaagtggaagtcggtactagatattatatgtggagcggtagacctttcttggtcgacgaggaaaagaagattgtcgtgtgttgtgagaaatgccaaaaaaaatgccaaccggttataacagtatccatggttgaggcggatagtaatgccacacgagtgtattttccagtagtgacaatgacttcatattggccacattttgttgattatgttccaagtttgattcaaatccaacaatcggaggcaaacgaaaaagagctgaatagttagtttatggaacgaaaaaaaagacatgatagtgttttg

SEQ ID NO: 10652 - DNA, 1591 bp, Arabidopsis thaliana landsberg
taaccatctttctgttattgggttgacacaaatccagctatctctttcacctgcaaatccatagttttctatttatcacctccagcaaaatctatcatatgaacaaacattcttttcgccatattaccacttgcacacatcgaggcatgcgtacttttgtattgtttcagtcggcttaagattacttattgaaattgacataagtgttattgaatggggagggattagcttacatcgactgaagcacgttgtaatatcatactcatttcttcaggagttacaaaacttgaccactggtgtgtgcctttaggaagctgcaaggtgatttattatacaaacaacaaaatgagtaaccaagaacacatgaagtaaaaatgatgtttaagtgttaacagaagataaataaagtgtgaaactaaagattacccaacgtagaatgtactctgctccaacaatggttgatgcatatgctcgcatagtgcgattgattgtagaaagtactgtagccccgttggggatagtcaatgctgacaacgacttacagaactctgcagggtttgctacatgctcgatgaccttcattattaaaaatcagaaaatttgccatatatattagaaaagagacatggaatagtataaatatcaggaagtttgacaaagacgaagggacttgctgaagtatagatggaccagaaaaaggtacctctaaagaaagaacagcatcaaacttcctgccttcatccgctagcttttctgcacaagaaaattttagttcatatttatgcaaaggagaggtaacagacaatcagcttctgtagaagaagattccatgtcactttcattgatcatcatctacgattaaaaaataatacctgctgtagtacataagtattcaatcgttgaagtcactggatccatatcctgcagagacattttattgacataaaagaaagaatagaagtcagatagagaaggggtttcatgaactttagtcctatgccataatgtgaaaacatgttcataactgctcaagcattctgaaagttgccaaccttgacaggactgaagtgtacagttcaaataaataggtattcaagaaaactacttcaccatatggagcacacaattgcatgtaacataaccatacagccactgtataagttatctgaaaaatttaatgatatgcaattaaagtaagagaccttacagcgtgaagacgagcaattttgacattcttatcaacagcatcaactcctgtgacagttgctcccatccgtgctagaggcttcaaagaaagaaaaaacaagccaccgctcaccaaatattctttataactaacaacaatgtcaaccccaagtgtacccgtcaaacgctcaaccaacaagcccaaaaggagagattaccaaactcaaaactattaccagtataatcctactcgttagtccctagaggcgcctagaccggtctattataggttgacaaaagtgaatcatttgccacttacggtttgcaggaccttatgaaaaaaacccccccaaagttatcttccacctcaacctatattgataaattcccctcccttaaaaaggct

SEQ ID NO: 10653 - DNA, 822 bp, Arabidopsis thaliana landsberg
  unsure (1)..(822): unsure at all n locations
tcgtatacttagtcaggggtaggtctatgatgtgtggccgtcttgcacagctcatcacattagagaagtcaagatctttatagtattttgcttgaggaccagtgatgcaatccgacgaatcgacaacacttggataagctcctttggttgagaagagaaactcatctttcatccacataaaacttagatcccaattgtcaagccgaccaagcaggttatgattctcgatagtgacctgcgctgagtaactcgactgatatgctctggtcacatcgtacattatggttagatctccttcttgcctaggaaggaacttttgaccaattttgcttgttgtaatgttcggattcggtgtgcaacatacttgcagaacattactacctggaaaaagccatagagaagaaaagaaatgtcagtgaaacacaaaggaaacatttatgctcgcagcaataagagtcttattatgatcaagaagtaaaagaaaaacaaatatgcaaactgaacagcttaaattccaaaatgtttaatcagatattccacacatttatcagaaaagccaagcatgagatagtttcctaagtaaacttaaggtctaatctcaattgctaataagactagttcaaactnttagtttacaagaaatctatataaacaatagaatttttcaaccactctattgatcacaaatagacctggtcaatgtgatcatattgctcgacttttaaaactctttggcatgccttcataagcaacccaagatcacataatatttaaaattgcaacanttcattaaaaaaattatgaacaattaaacgagaaatg

SEQ ID NO: 10654 - DNA, 1217 bp, Arabidopsis thaliana landsberg
actagcaagtacaaactgtattaatttggtcaaatgctgtcaagatgtatgtgctagtatccaacaagatttgagtaaatcccctttaattctattactactcacgagtagatcacactgtgaaaaaattatggctccaactgtcacgttgtaatgacaaattgggcctagactttgtatattaagattcataaagcccaataattttataattttataggtacaaagattccatcccatcaaggaaacttctaactcgccaagaggaggaactaacgcctgggacacatctacaatcttaaaactcacataaatacctcttacataaaagctaaatattatgtatagtagatatgtgagtcccacttaatatctgtaactccacaatgacatatcttcataacacatctcttcttccgtgtaaacattagtaggagtcatgtcttccatatacgatcgcggcggcgacattagcggcccctccgcgagtctcatcatcgtcgttgagacttcttcgtagtctccaaatccatacgaagaagaattcctctcctccgatcccgaaccagagccggaacccgaaccaaaacccaaatctacatcatctcccgcacaaggcaaaaccgtaattccactttctaaatccaccggcctaaacatctccgcagcttccgccgcaactcttcttatcacatccggatcattggattccggcaccgggagccgccaagcggagtcggcgaaattcaaacatgcggatctcccacgcagagctaaaaccgccacgtcgtgtgcacgcgctgccatatctgctgtgggataagtcccgagccaaatgcggcgttggtgcgtcggttctctgacttcgcagacccatttgtcaccgttcctccgccgtattcctctgtaaactgggtgacgtgtctccttaaacactctccttcccgcacgcttcttaggcctcatctccgccagaataatatcatcattattcataactcaaagtaccaaaaattcgccggaaaacaaaaagaaactccggttaacttaaattactgttgaaaacgtgtttattttttcttgtaagtatttagttacaaaaaaagattaaagatttgttcgaattaagagtctttcttctgacttaggctctgttttttgtttttgctgggagttgagaaacagagaagtgagaaagaggggtatatatagggtat

SEQ ID NO: 10655 - DNA, 791 bp, Arabidopsis thaliana landsberg
agcaccgacagccaacttgtgtgtgtacgtagctagtcacacctattatattaatttaaaggcatgcatgcaattaggttgacaaatatactctgtctgcttaagtgtataaacctaattataatgtgtcgaaaacctccttgaacggttcagtcaagtgcttatatatagatgaatatagacatcaaactttgtaaccatttcatttgattagttgtggtacgttacgtacgtacctttgaatcttccaagccgaaagctagttccataagctgcttgttcgatatctctgcctgcgttccaaacgccacgtacaaaaccggacgcccttcctctcgcttctgatccaaccaatgaatccaagccggtttagcactcccctgtttaggaggatctgtcaaacacagtggcccaacacaccacgactttggtttatcaccagagttgttgttgtaatcaacaaatgctgactcgagctcgtagaagctattgactaaaaacccatggcttgtggtggtcgacttgatttggtccatagatagttcgagggctgcacctgattcttccggctcggtagtgccatggtcgaaatcacacttcttgaccttgatccatggaaagtctggtacagtgaccggttcggtatcagatttactttccggttcggtaaagagttcgtgtttgaaaacagagatggagacagcggcggagtaagagttcatgccgtaggagacaaatcttggaatgttgaacttagctgcagactccgatgtccaccagaggaatccatc

SEQ ID NO: 10656 - DNA, 524 bp, Arabidopsis thaliana landsberg
gaaaaaagaaaactccttattaatgtgagaaaacctccttgaacttttaaatcagaagcttctacatagaggaacggggcaatacatttcattggatatgcaccacataatgacatatttatgatatttaaatctagtacgcaccttggaatcatccgagcctaaagctaattccttgagctgcttagcttattcgatatctttgcctgcgttccaaacgccacatacaaaaccggacacatttcttctcctttccggttcacccaatgaaaccaagccggtttagcactccccggtttaggaggatctgtcaaacacagtggcccaacacaccacgactttggtctatcatcagatttgttggttgttatcaacaaatgttgaccgagctcgtagaagctgttgacccgtggcttgtgttggtcgaaatcgtttggtccatgaacagttcttgagctggacgtgattgtttcggatcggtaagaccatggtcgaaatcacacttcttacctggatccatgaaa

SEQ ID NO: 10657 - DNA, 1199 bp, Arabidopsis thaliana landsberg
atgataacacgtggatgattttttatataaaatgttgtggtaaataccatgggttaaatttatgaatcttggtcttagtcaggtggatgggccggctctgattctgatatctctaagaaaccccctggctgtttctggcactttttaatttttctttctaataaactgatatactagcccaacacaaatgggaaattaaaataaaatagatccaaactgttaaaataaggccgtgcaacgcaccggccgaagacactagtttctcataagagaaaagttcactaaacgatcttggtaacaaaatttggaagataatgtaagaaaaatttgttagtggaaatttaatctaattagatctttaggaattgaaatatctggatttttctgatgtattttctcactattttaagaccagctaaaagtttttgttttcttctccatatgaaagatttgtctagtctacaaaaatgaaaaaaatgttataagaaaagaaaaaacattatggattataatgaggattaagatatacggatgttaatttagataggtgattataaaaacacagaatctcaaacataaaaattaaaattaaaatgaagaacaaagattatcttcccgtcctgccccacccacgacgtcttcccttctccgttgttcgctttcctacttgacagaattaaatagatatagattggtgaataaaccacaaaagactaaaactttacggatagaaaatcaagcaaacacgaacttgtggcatgctcatgatcgtgatgatgatgatcatggtcgtgtttgtgtcattgctagaggcgagcaaagtttggaatgaaataagaaaaatatttgtttgatgaatctagtagttgagtaaagtaaagattggtatttatagagaaggtagacgtcttggattatggtttagatgatatgagaatatcttggtaagcacgtagaaaatcaaagatactaataaggaaaatggttatcataatgaatgatagtaataactaagcaaaaattaggaaattgagagataacaaacttgatctctagaagattgatagtgattatgtttaagcaacgttagtttctagaatatgtcatagaatatataaagaaaatgccattaatttgtttcttatttcagttaattaaacgactcaatatggaggcaaatatccgaaattaaaggcaaa

SEQ ID NO: 10658 - DNA, 1097 bp, Arabidopsis thaliana landsberg
ctaattttgtagatgttaatgttaagattatagaaacctcgcaaatttaatgatgaaactccctttgtgatatattatatagataattaaaaattgtaaaagaataatctacttaaactattagcttatccactatactatttcttttaacagaacgaaccgatttagtatcaagtttgtagcatcaagcttcaagaatcctaaattgcattgaggatcgtttctcaatgcctttaaaaacagagtaataatcatgaacaaacaaaaagacctaagaaaaacagagcaaacaaatttagtatcaagttggtagcatcaagctttacgtttttctaagaggaaagacgttcgacttttttgagtagaccttcgttctcgacttctttgagtagaccttcgtattctttcaggaatagacactccattcaacaggtgtaaaagatccccggtaataatcccatgcctagtggctagccaatccacacacgcttcttcttttgtttcagcccaaacaacgattttcaaggtaggagaaaccattgatccagcaggtccaagctcggtagtgtaagctctactcattccatgtcgacgttgtagaacatactagagagggtatttgttcgttttctggtaaagatcaacattatagttcagagaatcagaaatgtaaattagaaaatgtcgaatgttaccagacttctccaacgaggtcatcaattcaccatagtcaccatcggatgttgtaagtaacatcgtgccttttctacaagtctcagcccatgccttaatctgggttatgatctcctcatcagctacttgtttctcttctggctttcccatagagtttattacaacctccctcattcgtaagcttttgccaaaggcttttgataatcttttaggaatgttatgagatgtaaaatgggggccacaaaattttcagtaaactcccctgggaggcttcaggcctttgatgtatatcactgaatagagctccactgctttatcatatgcagaagccgccatctcttgctcagttgctctccccctctccctctctatccgttctctctttttcgcgaaatctgaaaaaa

SEQ ID NO: 10659 - DNA, 1140 bp, Arabidopsis thaliana landsberg
tgcgaccaccggcagctaccagcgcatttcagatcctttattagtcgcctcagaccaaccgtaccttctccatcctctacccaaacgagcctcaactagggtttcagttattgagccttttcccatccttgagcccattacctttctaccggcccactcccaattgcaatggcccaactctctcttttgaatggcccaggtctgttctttattcccctttaccaatttcagtccgatggttgctctgtctctctgctctgtgtggccaaggcgtacactagagaggtgtagcattttcgatgttttggttttgtgtatgtcgtgttaaaaccttcgcgtcaatctcacttttggccttgttctttgaaaagatttacttgttgatctccttttggcgacgtaacttttgtcctggatattctcgggtttcttaccttaagccgtcaaccgaccttaagcccattacaacctccgttacctcatcgtgtcggatcatgctctcatatagagctactcgaactttcctttgcgatcccgaattgtattcacagcctctttcagaattggaaatattgggtttaaccaccactccaaaagcctcggattgaagaagaccgactttaccggagtttgttcaatccttcatctccattccctctcaatctgaagtttcatcaagtgctaaccaacgactttaaggatcctcttcatgaaaatcgacgatggaagaagagcggcattatgatcccgcctccaaggagcggtgattcccgacacttcttcaaatcgtcatctctgctgcgcctatttatcgaacccttccttttgctattgttttttagcatcttcagagatctccctattgaatttacaagattgcagaagaagggcattatgatcccgcatcaaacgagcggtgattacccaaccttctccaaactctgttcttcgatcctaatggtttttgaactcaagagcatacccgaatttatctatatctatcaggatattcaaccctttgtcccaatgtcctcgctgcgtttcgcgtcgacgaaccaagaggtacaggactctttctcaacgtcattttatcattgcttgatagtgactatctcataattccccgacttgttcgtggac

SEQ ID NO: 10660 - DNA, 899 bp, Arabidopsis thaliana landsberg
atattcactatccctatttagatcaattgaattcataccaggggaaggtgatgactcggtattgattgtaaatgataaagatgacgtaacatcacgaccctctccttggaatgcagcggttgtcttcatgttatcattagcaaatttctcgatgcctttaagaataggccatacatgatcaaatttgaatcctcttttgtatttttcatattgagttaataacatcttgacaataacaaataaaaataagttagtaaacgcaataatttataattgagtacttacaaagtcttcttcggaagcactgctaggatctttatactcaatttggttaacacatcctctcagctttgagactgtagaaagaattgacgtcattcgagtttgtaaagatctttttgatcttcgttgaagacgaaaaggatcagatttatgatactcggcttaaactcttgtccatagttgatctcctgattgatttattcttattattaaattttgggaaacatcaagatacacatgacacaattgtatatcttcttgaatagaatatgacaaagagcgacttgaactcatttttgaaaaatataagaagtaagaaaatgagttggagatgtgtgattattcatagagtaatatatatttataacgagaacataaagcaatactaacagttagatcttggtaaattcaacggttaagattaacttatttttttctaaagaagtgatacttgatacacaacatgaaatgactaatcaatgcagcgataagatcttgatcaaaaaaattcaacaactaagatgaactcttctttttctcatgaggtattaattgatttacgatatgaaatgactaatcaatgcaatggttagatcctcttcaaaagaattcaatgg

SEQ ID NO: 10661 - DNA, 1953 bp, Arabidopsis thaliana landsberg
cgtaacatttggtatggtcaagggatgaacatccgattatatcattgcttgcgttgaaattcaacggcgcatcatctaagtttatcccttcgcatagatccaaaccagaacattcctgcatatagaacggaatataaatgaaaaacattgttctttatcataaatgaatcattttgatatattacttaaacaacacgtcacctcttctatcactttcggaagattagattccataggaaagaaagaagaatagtctttaaggttctgagtttgtgtaaccacggaagttgatgaaccattccaatcgtctaattcctggagcagggtatcagaaaatggagaatccaaatttgtgacagaaggttctaaagttgaagaccagatcttgccgaaatctgatggagaaggacaatcacagtaagggttcagactctgaagtctgtgtcctaaagcagtgcagttactagcggtccactgacatccttggcaaagagaaacattttcgttcatacagtgtattgccgtgggttgcaaggaacatttctcgcagagtaaagatcgcgtgtgtctttgagacagaggattcgctgagtgtacattaacgtcacagtttaaacaaagtttagccgaatcagatttgcagtagattaatgctttttcggttccacaaaagtcacatcgagcctccatacttcttcgaagacaaaactccaaagaaataacgatttctcaatcccaatcgctacacacacctaaaatcctgtagcatagaaggatcgtgagacaaaaacagaacattcagagatcaaacaaaattacgattcattataggttcatgtatctttttaatgtgtgattgtgactaatacatggttgtgtgtgaatgttagagaaacactcacaaactaagaaaatgtggattctcgagaccgaatcagtactaaaatcacaatgtctagaaactcataaccagttaattacagagttttttctaaacaagagtataacaataatcgtgtaaaattgtttatgtttcagggttccagagattagaagctttacaagggtgtgtgagagtccagtgagaaggagatgagaaagaacagagaagggttttgctctgtttttatcctgtgtggggtccaccttgttaagcgggtttgccacgcggggtatcttttgtcacgtgtggttttattgttccttagattttgttgatgtcataatgtggttgaccatacaattcggagtttttgtttgattctttaggtactttctgtggctcgcaagaatttcgagaattgttaataaaaaaacgtgtaaatgtcattaattttgaacacgtttttcttgttattcaaaacatccgagtaataagactagttcgaagcaatttattccgagtgttggtttaatggatctaggagtttgcagcatactagtccggtttcattaaccggtggctatggatagttattgtatctatttctcactaattttactaagtgtgttttcacaacttaaaatatgagatgttagaagcacttaaatgattgaaattctagtgagcgatcatgttttaagagagaaaaatttgtaacaacgattgatattcgtttacgattttttaccagcctcagtaaaaaggctaaatgtactatttttgaaacatctcacaatgcattccataccaaaaaaggctaaatgtacttgtaagcaattcaacagaaggtaactgctgctgtgctgcattagctgacaagatcgttcatggcatgaccagtctggttgtcattgtttgtttgccaaaagttttcattagatgtccaaaaaacagctaattcgaccaaacatttgtttcctgataagtcaattgttttgttaatcaatttcatggttatgctaaattcattatatgttcaaaaatcagcccatagttttcaattggtttca

SEQ ID NO: 10662 - DNA, 1523 bp, Arabidopsis thaliana landsberg
tgtatgaatttgaacgttgtgttaaaatcgttactagggagatcatttagacaacaatctatttctggtgggttttggttcctctgttgacaaaacacattgattgtattgataatttcagacattgccaagaacgtattctgtcctgatgaacagcccaaatcagctactttaatgtatgtaggaaagtttaagtttatcatcaggtcctttgtgttcttaaccaataccggtttagcctttgataacactcttctctgaaaacacaaaaatataaaaagaaacaaattaacaacttgttagtttagtagagaaccactgtaatgtaaactcaaccaaattaactaaattaattatttttgtttttaactcgttgtatccaaaatcgcaccaaaacaaactgatgaaccaatttggttctacaaaagaaaattcggtttcagtttaatcatggattcaacaaaccgaaaaaaaccaaaacaacaaaataactaatgtgactctaaatttcggcatggataagtcttatcaaaatgaaagaaatatatataaaaaaaatacctgaagaagagaattgctggagtaactattgtatccatctcctccacgcatacacagtggactcacaaaggagtatttactaattctttcttcatcgccgtttttcctctcattttcactcttaccattacatctgcatgcatcacataaacaaatacgtatacaatcataccaatatgaatacatctatgtcaaattcacatatacaactatatgatgtgaagatgaattggtgagaagaaccttaaggtagttgtggaatcggtgaatcttgaatccatttctccactatttgaagacaaaaaatttctaaaacgagaattattataatatgggtatgttgtttagggaggctacctcttagtcgttttatttatagaggtgggactgggacatatcttgaacgtgaaacacgacgagttgttgcgatacacagttccacattcaatcatacccaatcttgcaatctttccagagattaatataatttaaaaaaattcaaataaataaataagcaaaaaatggatatagtggcaaattagaataacgagtgtttctatataagagaaaacttagtgtagtgtttttttttttacgatgagttttttatgatgatttcaaagttcatatcgtatctctattcatagatagagaatcaaaacactatgtaaagtgagtgacattggtcgtaaagtaggataatatagtgaagatcatgaagaataagtacgacaccccatgatattctcaaacaaccatgatattctcgataatgttaaacgaaaacttggaaagaaaaatatgttgaagacacgtgtttgtagaactcgaccttttctttaatatgttgtatcttctttttagaaatctgaaagaaacagagagtagaagatggactacgcggcacatcaaaggagtacgtggcattatattatttttagttcttagttaaaaaagaagtt

SEQ ID NO: 10663 - DNA, 1481 bp, Arabidopsis thaliana landsberg
gaaaagcctctctcactttcttcgttaagtttccaagcttgttcttactcatattttttgatgcttggtttcaaagctttgagcttcttcgagaacctgtagatagcagaagtcgagtgataaagagcatctgttgtgtcccagtaattcttaaccatctgcagaaaatctggatctgtagccaaagcatttgtaaacttgaaaggttttctaatgataggcttatctgctcccatttttattttgcagcgaaggtgatcagaacagcctcctgcctcataaactccataagcttgttgataacatgtggaccacttatcatttactagaacacggtctagttttttacaaatgagctcatcaccatcccttttgttactccaagtaaacagaggcccatgagattgcagatcgctgagagagcagtattgaaagacatcttgaaaatctctcataccaggcgtaagaatcggttgagtgttaaaacctgagtgctcacttccttttaaaatttcgttgaaatcaccataaatcatccacggtttgttcctaaacatgggtgagaatcgtgatgatttcgcagatcttcccataagacttttctctcctccacaaaattagatgcataaacaaatgagcagaagaactcattgtctgtaccctccacctgaacagaacaagtgatcatttgactacttgtaaagcacggcgttaatctcacatttggactccacactacccaaattcgacctaatctatgagaatcatagttagatagaaatgaccagtcttgaaatactttcctgataatactctctgctttactttctctaattcttgtttctagtagacaaccaaactgaaatcattctctttgtatccagttcttcactacggaatgtttagtaattttattgaaacctcgaacattccagaagaagctcgacataaaaactaggaatgggtggaccttgaaggaaagtccggtacgacttttgtagatgggttagagacgaatttgtgggtggtctttgagccacgaggcagatagtgtcgtggttgcacacttgctttcaacccccgagactgcttcgtacccgcatcctgtgatttcactgtttgctcctccactttatttcccctgctggtttgaggcttagatttgattcttatgaagtattcatacgtctcgcgccgtagtgcatacgtgtagcatcataatcgtcattagaaatgattgagttcaacgtgttacggttcatattttgctggaaagtggaagaaattgttatcttttctactgtcccattcatttagctaattcttattttctcaatttagctgatcctaccaaaaaagtcaagaaatttgcgggttttttttactcatcaaatctgcttaaatcgggacccaccaaaataatttacaaaaatggcaacacggttttatttatttattaaacttcgatagcaataaataca

SEQ ID NO: 10664 - DNA, 954 bp, Arabidopsis thaliana landsberg
ggaagccttttacgtggactaatccttcttctctcgtaccattcgtattatctcttacctattcgtatccgaatctcttggtatccagatcctcatcttcatctcattcgctggtctcaaaatccgcgatatcgaacttgtctctcgcgcagttcttccacggtacgagatctaacatagagtgttttcttgttagtagatcactttagtttttttctgatgaactttgtttaggttttacgcggcggatgtgaggaaagacagttttgagttgtttgataagtgtaagagaaaagtggtagtgacggcgaatccgattgtgatggtggaggcgtttgtgaaggattatcttggaggtgataaagttttgggaacagagattgaagttaaccctaaaaccaatagagccactggatttgtgaagaagcctggtgttcttgttggtgatcttaagaggttagccattttaaaagagtttggtaacgaatcacctgatctcggcctcggtgatcgaacctctgatcatgatttcatgtctctctgcaaggtactgttccaatcttggtcgattatagggtaaagttaagttgaattattgagtgttgattggtttagtgtaagatgtgttttggaggtaacttgagaatctaagcaaacgtttgatttgcttgttgattaagctagataatctaatttaacttgttgactggtttagtgtcattatgtctacgcgtgaatcttataaaaataatgaaaattttgatttggaagcaattagtaaggttcataaatgtatccaaccaatcacttcacgtgaccctctggattgtttttctatccccaaccaccttactagttccaccaacattttgggctgtccatttaatgaacacatacttgaaatatcataaacaatcttctgttgtttaatgcttagttttttgaatcttgatt

SEQ ID NO: 10665 - DNA, 478 bp, Arabidopsis thaliana landsberg
tatactgtttagctacgggctctgcgcatcaagaaccggatcctttaaaaacagaaagacatcctccccgccaagcgccagcgtgccaccgtgcaagccaaggtgcgccagatgatacgggacgaggagcagagagcccaggagctcgagcaagagatcacgctcatgcagagcgaaagccagcatgatctgcagcacggcccacccctccaacagcgcgcaccagccagagacttattcaggctccagcacgggcccttcgtcccgcatgccgcagctttccaaggcatcaattaccttgatgagcgaagccccctagcttctcaactccaagcatcaccgtggcccaccaacttcaaggcagggacctacccaaagtacaacggcagcaccgacccaacacagtacattatgagctaccaagtcgccatctcatcggccggaggggatgacgccacaatggccaaatcttttatca

SEQ ID NO: 10666 - DNA, 512 bp, Arabidopsis thaliana landsberg
aaaatcggcaggtattcgccgcaaaaaagatgtctccggagaagaagagccgaagttttcctccgataagcgagtgtaaaagcagagagtatgattcgatcgctgcggatctcgacgggactctgcttctgtcaagaagctctttcccttacttcatgctggtggccattgaagcaggtagtctcttccgtggattgatccttcttctttctcttcccatcgtcatcatcgcttatctcttcgtctccgaatctctcggaatccaaatccttatcttcatctccttcgccggtatcaagatcaagaacatcgaactcgtctctcgcgccgttcttacacggtaaccacaatcaccggatctttattcttttcgattttggaaccctttcgatttttaatcttcgttttcaaatgttaggttttacgcggcggatgtgaggacagatagttttgaggtgtttgataaatgtacgaagaggaaagtagtggtgactgcgaatccgatagtgatg

SEQ ID NO: 10667 - DNA, 671 bp, Arabidopsis thaliana landsberg
ttattcatgggaaaatcttataaccatttaaaaatactacttgatcaatagcatttccccacattttaaagattgctctattttcacttaaatcaatcatggtgataccaattggtggtaacgtcaagtttgtcaagccaaactgtagggattttcttaattgtgtcaaataatttttaaaacaatcattgtgatttattttctgttttcccacatatttgatagttatttaaaatcgtagtttcgactatcacaatttttaccaattggttataaaaatttattagtcaaagtccttacaaaaaaagtttttccagtcaaagtctctacatccaacattaacaattgttatcaatcaaccataactatgcggataatcaatattaccaaccttccaaacattaatctaagaattgactaacttttatgcaatttaaattactaccatttttccatctatataaaccctatcttgcacccacaaaaaaaacatattccttggctaaagccaaaaacagcaaacaaatacttagtttaaatttctcttatttttttatagccaaaaaactcataattttgtttttctccaaaatgaaacccaagaaaaccaaaggaaaacaaaggattaacatcaagaaaattgaaaaagacgaagacagattggtcacatt

SEQ ID NO: 10668 - DNA, 256 bp, Arabidopsis thaliana landsberg
taaaattgtagttcatacaatcacagtctttaccaattaatttaaaaatcatacagtcaaattccttacatcaaaaatccttataacctttaactatgcgaacaacaaagattaccaaacttccaaacattgatctacagattgactaatttttatgcaatttaaattactaccatttttccatctatataaacccaatcttgcacccacaaaaaaaaaaaaaaaaaagagaaacacatacttaatctaaatttct

SEQ ID NO: 10669 - DNA, 771 bp, Arabidopsis thaliana landsberg
  unsure (1)..(771): unsure at all n locations
acttaccattcaggatattcctgatggtcccatttggacttctccacatctgcttcaagccaaattccgtgacacggccttcatctgcagagagcaaagatcaacactaagtaaaataaaaacactggtaaaaaaaatgttcaactgcaaaacatctgttgacatacctggagtgatggtggcacacttgatcgccacattgtacctaaaacaaaacaaaatcataaactttaaagattaacagaatattccacacagagatgcaacatcattctagtatgtttcaagctcaaacacacatacttcttagtagcttcagcactttcaatagtaactttgtcatccgtagcatcacggtgaggaagaccaaggtcgaagtacttgatatccaactccacaaaaggagtaataagctgaaaacgtttcaccagaaaaaattcaaaatacgccgaaaacacgaaccacactcattcatcaaaaaaagtaagcttaataccttatccttgatagacttccaaataaccctggtcatttcatcacctacattacacaaaccaatgaagcttaaatatcgaaactatttcgccgaatcaaagctgtaaatcaaatccacacttgaannnnnnnnnnnnnnnnnnnnnnnncaatcaatctcatgaacagagcttaaaggttttatcgattttatccccctgtaacgtaatcatacaccaaaaccaaatcaaacaacgagtaaacacatgcgtagattccagagatcagatcagaaca

SEQ ID NO: 10670 - DNA, 531 bp, Arabidopsis thaliana landsberg
tgtctgaccactagatgatcttagtgttaacgatttggacatactcaatcattcaatgctccatttgtgatgacagaagaatcatatccatattattcagattcagaatcagaaggagaagaagatagagacgacgattggagttatgtgaaagcaatgtgcatgtcatttgttttgttggtcaaccttagataatctattcgtttatgctcttttgatatgtacccttttcattttacatattttaataaagtaagttttgtttcaaatcaacctttagacgcttagaattcaatatttgattggcgagaagaattcaataatgactacaaacatggactgtgaacataaaggctattagaatatgtgaaagaagtttgtaaccccgagagacgaatacgatcaagatatgtgaactgatgttttgtaaccgcctttgagcatctttacgttcagatgctggattgggtacaagaccccttcctatatgtgaactgattggcatgttcttttcgttgagcttcttcatca

SEQ ID NO: 10671 - DNA, 530 bp, Arabidopsis thaliana landsberg
caatcaatctcatgaacagagcttaaaggttttatcgattttatcgatctgtaacgtaatcatacaccaaaaccaaatcaatcaacgagtttacacatgcgtagattccagagatcagatcagaacaaacaacgaaacttcgttacaatctaggcaagcgaaagtaaatcatttcgtatccaatcaacgaaaatatctgattatagatagcgaaagagatcgagagaggagaaggagaagtaagatctcaccatccatctcgacgatgggatttgccaccttgatcttctcaaacgccatggtttttttttggttttcggtttttgtgtgattgacagaattaatcgatcggatttgatattccgatcgtcggagatctagaaacgagagaagatcaagccggagaagaagatgcgaagctggtgatgagtgatgaagtaggtgaaatagcttgtacaggtcttgagagttgttggatttatgctatttaaaagtttggattatgttattttgaccccgtaatacgattt

SEQ ID NO: 10672 - DNA, 568 bp, Arabidopsis thaliana landsberg
taccatacggcaaacaccatctaaaaaactgaatgaatcaatccaagttctcaaaagatatgataggaagcttccatatctcgaaacctatgcagtaacaattacttgctcatgactgaaaaaagttgattgcattttttaaaataatccgtactgaaaaagtaaacatgttttggcatctcaacctctattgttaagactctatgttttgttgttgaaggaattcaagatccttcatctgcatttgaatagcttctttaggcaaccgtttcgccataacattctcttcctctcctccttcctcaacccttgtcgccttctctttgatgattctctctatctcagacttctcaaccgatgggaaaaccgctattaacatcactttaagaagcttctcatcctcctcttcaataagtcctctccgaaagcaacaagcataaataccttcaagagccttttcaactcttagttccatcggtattgttggcgcatcaatgttcaactatgctcttctctgtataacccaacaaaagtatcaacctttctgacacatgagtgacatttagta

SEQ ID NO: 10673 - DNA, 629 bp, Arabidopsis thaliana landsberg
gctcctttatacaatttttttgccataacattctcttcctctcctccttccgcaacccttgtcgccttctctctgatgattttctctatctcagacttctcaaccgatggaaaactcgctattagcatcacttgaagaagctttttcatgcggcaaattttgctatattaaaaatgtgacttctacacaaccttaattttcgttagaggaataaaaggtagtggacatagaaagatgagaatgctacatcattgatgaaacaaagcatttgattggatgagacaaagttcgtctttgacgttgccttgacaatcccattttagtgttttgtattgttgccaatccaactacaattaaagaaaataatggagagagagccacactttacaccaaaaaccaatcaattgaacggtccaaatcctatttgttatccattcgtcacaataatagagttgataacgacaaaaccgaaatcattaacaaagaaaacaataacgttaaacgcggcccagaccgtgcatcgcttccaaatatcatctggaagacattgctgtcaatcccgatgctgctgctgcttcctattcgcgtccctccccataacgtccattccctcccacggttgcttccca

SEQ ID NO: 10674 - DNA, 1205 bp, Arabidopsis thaliana landsberg
ccaacaacaatggaatttcaaatagtggcgaatggtttatgtttttctaggaattgccaaattttccatctatccacatgtgacaagtgatatattaacaaacttttttggaccaagtctaatcttctcaggccacgaacttcttatttggtttcacttattaataaaacagagattaacaaactctttgttccaagttttctcttctcattccacggaaatttcattagttttcttgctctgcttgttcttaattctcagtgccacaccagcttctttgactacatcatgataataacaacaagtttggcgaaactcaactggacctaacatttatttttcacaattagctgagttttgttctaattccactcatacgacaattaatagtacaaaagatctattggaaaatataatatgaacgaaatcttccattttaacataacaacatatcttatatacatatatgatgcgttttgaatgaatgaaaataatcatgcaaaacaattttacacctaatttcttattcattcaaaatgttgctttaggttcatgccaaacccaataatcatttgtttattcagagaattaataaactaattaaacaaaaaaatcaaacaaaacaaaacaaacaacaaatgcccttcgcatacaacacaaacactataaatacaatccataaccgttaaaactcccacaccaccaccactactccactcctcttctctctctatctttatcactaaacaatcgtacgttagcgaaaaacacaatggcttcacttcttgtcctcttcgttttcttcttcatctcttcttgttctgctcaatcctacaatgtattgtcttttggagctaagccggacggaaagacagacgcaaccaaagcttttatggcggtttggcaaaccgcttgtgcatcgtctcgtcctgttaccattgtggttcccaaaggccggttcttgttaagaagcgttactttcgatggttccaaatgcaagcccaagcccgttacgttccgtatcgacggtacattggtggctccagctgattatcgagttataggaaatgaagactattggattttcttccagcatcttgacggcatcaccgtatacggcggagttcttgacgctcgaggagcttctttatggggatgtaaaaaagtccgccaagaattgccccagtggcgcaacggtacgtgca

SEQ ID NO: 10675 - DNA, 1729 bp, Arabidopsis thaliana landsberg
ctttttttttttctctctcagtctaagcccacaaaaattatatcattaaggaaattaagcgaaaaaatagaaattaggaaaatcagattgtatactttcattaagggtagcaacgtgcgctcatattttgagagagaacgtgagcactttaaatatttgctttaatatataagatggttgatagattttataataaacaataatttagtaaattttaaaagtattgaaaatctaacaacaacattcttatctaataaaattggagcatatacacaaaaaaataaaataacaaacatgctttagcactgagtatcaaatatttttttcttgggtaggcaaacgaggaaatcatcatttcacttgctgcttggatcgtacgatggcgaacaatgaatggcacaccttattcttggaatcaaaaactgtcttctaagaatttggggaatcagatcagcgaccattggtcacacagattttagcgcaaaaagaaaaaagacggggtttctttaattatgatagtagactcactcacaaaaaaggttttagagatacaatccttcataactggcatagagatgacaacatagagaatcatgctgctcttctacacaaaaagctggttaattgtagaagagtaatatctaaatggaagaaggataaccgaatgaatgctgaggaaaatattagattgatccgccataagcttgataaggccattgcgacaagaaactccacagtaaatgaaaaaagaactttctaacgggaactgaaccaggtatacattgatgaggagctcttttggaagacaaagagtaggaacagatggcttaatacaggaggtcgaaacacaagatacttttactccactactaaaacaggatgagtacgaaatagaatcttatcaatccaagatgaagcatgtgtgatacatagaggagatcaaaacatagcaagggttgggactaataactttgagaatatgtacactgcaatgcctgtaagagaggctaactacaatgacgcttttcaaggatacactagcaagataacatcacatattaacaatgatctcacaagactaatgactaagcaggaaatcgaagaatccatatttgcagtggaaccattgaaagcaccaggctcggatggtttcactggcgagttctatcagcatttttggtcgaaaataaaaggctccattattcaagaggtaaacaacgtttttgaagaaaacaagctatacgagaatcgtaaccacactaatctctgtctcatccccaaagtggaagccttgtcaccaatgggtgatttcagaccaatagctttgtgtaatgtaagctataagataatctctaagattctgggtaatcaactaaagaaacatcttacaggagtgataacagataatcaagcggcttttgttctggggcgaatgctaaccggtaacatcattatggctcatgaagtttattatgctctaaaagcaagaaagggtcgagcgtcctcaaacatggcaataaagaccgatattactaaagcctatgatcggttggattgggattttttggaggaaactatcaggccaatgggattcgatgacaaatggatatcttggatcatgacctgcgtgacattagtgagacactcagttttgattaatggagcctcacaagggcactataaacccgaatgaggtatacgttaaaggagacatactctcaccatacct

SEQ ID NO: 10676 - DNA, 1265 bp, Arabidopsis thaliana landsberg
tcaagtggagctcctcgcgtcaccttctgatactctttttcgtcgggaacatgttgcccgcaagcaatggatcttctttgctgctgctttagagtcattctttcgacaaaaatccagaataagatggcttcatgaaggtgatgctaatactagattttttcacagagctgtgattgctcaccaagcgactaatcttatcaagtttcttagaggagatgatggttttagggtcgagaatgtggatcagataaaagggatgttgattgcttattattcgcatcttcttggcattccttcagagaatgtcaccccattctctgttgaaaaaatcaaaggtcttctcccctttcgttgtgattccttcctggcttctcagttgactactattccttcggaagaggaaataactcaggtgctcttctctatgccccgtaacaaagcaccgggtccagatgggtttccagttgaattcttcatcgaagcttgggcgattgtgaagtctagtgttgtggctgcgatcagggaattctttatctctgggaatcttccaaggggctttaatgctacagccatcactctgattccaaaggtaacaggggcagatcgtctaactcaatttcgccctgtggcttgttgcactactatttataaggtcattactcgcatcatttccagaaggctaaagcttttcattgaccaagcggttcaggcaaatcaggttgggttcattaagggtcggcttctatgtgagaatgttcttcttgcatctgagttggtggataatttcgaggctgatggagagactactagaggctgtcttcaggtggatatatctaaagcctatgataatgtcaactgggagtttctcatcaatattttgaaggctcttgatcttcctttagtctttatccattggatttgggtctgtatatcctcagcctcctacagcatagcgtttaatggagaattgattggttttttccaaggaaaaaagggcattcggcaaggagatccaatgtcttctcacctatttgttcttgtgatggatgtgctatctaaatcgttggacttgggagctttgaatggtctctttaaccttcatcctaattgtttggctcccatcatcactcacttaagttttgcagatgatgttcttgttttctcagatggtgctgcttcttctatcgctggaattttgactattttggatgattttagacagggttcaggtcttggaattaatagggagaagactgagttgcttt

SEQ ID NO: 10677 - DNA, 1207 bp, Arabidopsis thaliana landsberg
taaacatatgttgtcagaacaatttgtagatagggaaataactatacacgaagcagtgttattacatgacatatgatcttacttgtatacatgactctttcgcaacaaaacttctccagtggaaattggatcttctgaggtatatagcaccatgtacatggttcaaacaactaatattaagcactcgaagttgtggcctgtcacaagtcttcaaaatgatgatccgtctcatcgaatatctcttcctacagtcacattcacaaaacaaatgacaactgaattgaaataaaataataagcaaacgttaagagaattgaagaggtaatatttgtttaagtacctgtaaaagttcttcaatgacatcttccattgtaatgataccaacagcatcttcctcctcatctagctttggaagtggatgttcgttaagttgcagaatatcagcatcattatctttggaccacctcttgctcctcgaccctaacgaatttgctcggtttggaaagctcttccatttctgtaatgatctccttctctttaacttcgtttcctgtggggatctctcataatccacatccactctgacttcatttacagtctctattcaaagtggaaaggaaattattagtctctgtaagaaatctccatccccattgttactcccacgacgaaaaactagttaccgtttgcagcatcattactctgtaacgggtggattttgtcacactgtctcacaacaacagccatgtggctatgtcctttctggaactcgtttaatatatcatataacggtaacgtttctggaactctggagcaaacaagcaatcaaaagcatattcaacaagtcttcaatcgtttatatttggtaatcaaaatctaaatggtaaagttaccttgggattcttcgtatagtcacattttttacttgtatttcttcatctggattgatagtcaataagttcttcacctagagataaatttgggagccgttgaatgcagatacaggaggacaataatgaaaatacagaagagttttgttttacccatcatgagatagaaacttaccaaaacaagtccaattatgttggtacgttgctcatagtatactgggactctgctatgacctttatcaagaatcaaattcatcaaatccctggcgaaggaaaaagaactaagttttgtatgatttagaggattaaggaatgtg

SEQ ID NO: 10678 - DNA, 815 bp, Arabidopsis thaliana landsberg
tttgggattgtgacttatagattagtacaactgtagcagagatatgcataattggatagtgtcagttaacttagaatgctctgatgcttaagattcctatatctgcttcacttgccttttgagtcaatctataactatgccttagtagttgtgttgttgactttatcctcgacattctagtctcatgagtctctggacaaacattctttgtaactggctttcatatctcttatcttcttctttttgagaatgtctatggaatccatcaatgactgatctgagtttttaatgttgcatagaaatattcggggtttttttgccttctgttgtgttttccctgattgcatcaaatagatgaggttagtggagaaacatatacttattggtcttgcaaccttaaagttccattggatgtatgacgaacctcataacttcagcataattttgaacctgaaaatagaagaagacctgtcaattcttagtttgttaatcgttacagatcatcttgtcacaagagagacatatccagaggctaaacgaccttgtacgaagtcttcaaatgcagttacagcgatgcaaaggagagaacgagacacgatacgccactgaaacctcccataataacaaacagtttattgagctcgagaggaaacacatcgtggaagactagtatttcctccggttacatcaattctaataaataaccccaaatggtacgtaaaaactggtgtaatttacttttgttgagttaaaaaccttgctgatgttttgattagaaggatgatttactttattcacgtgtaagaatgagatat

SEQ ID NO: 10679 - DNA, 1202 bp, Arabidopsis thaliana landsberg
aacacctcttcgacaacatcaggagtacgttgtttccttcttttttgttatatttgatatgtgtgtgtttgggactatctatgttctaagttggtgacattttctgattgcagagtttacatcagagaatcatggaatgtctgccaatgttataactaaagcgtttttagctacggaagaagattttctttctcttgtccggcggcagtggcagattaaaccacagattgcttctgttggagcttgttgtctggtagggatcatatgtagtggattgttgtatattgcaaacgctggagattctcgggttgtgctaggaagactggaaaaagcgtttaaaattgtcaaggccgttcagttatcgtctgagcataatgcaagtcttgaatctgtgagagaggagttgcgctcgttgcatccaaatgatcctcagattgtggtcttgaagcacaaagtttggcgtgtcaaaggtattatacaggtaaaaatactttcacggtaatgcgagttgctgacttctagactcttttcttgcaagtagcttgactgtgaaagatacaactaagtaagccctatgcatgtataagaagaggatttttcgctagatataacccgtggctggttcttgaaggtttcacggtcgattggtgatgcatacttaaagaaagcagaattcaaccgggaaccattgttggcaaagttcagggtccctgaggttttccataagcccatccttagagcagagccggcaattacagtacacaaaatccatccagaagatcagtttcttatatttgcatcagacggcttgtgggagcacttgtccaatcaagaagctgttgacattgtgaacacatgcccgcgcaatgtaagattgccacttgctctttcttactctctctcgttttatgtgcaaatagatagaaagattgattgagaacatgtgggtatgcaggggattgcaaggaagctcataaaaacagctctaagagaggcagcaaagaagagagagatgagatattcggatctaaaaaagatcgatagaggagtgcggagacattttcatgatgatataacagtcatagttgtgtttcttgattcacatctcgtcagtcgcagtacctcacgcagacctctcctctccatctcaggtggtggtgatttagctggaccttctacttgactctactctcaccctgaga

SEQ ID NO: 10680 - DNA, 1044 bp, Arabidopsis thaliana landsberg
ggagggcgattaaacccaaacgaagacccaaatatttcatttgagaaacatgtcaataccgactgtggccaggaaactacgaaaaagctacaaaaagaagaaatgtcccgttccaagatgcaaggagtacctaactttctccaacaccatcaagtgccgagattgcaatgtcgatcactgcttgaaacatcgttttggacctgatcacacttgccctggaccaagaaaactcccattcatgggtttcttgagtagtagtaccaccagaaaagaagctaagacaacaagacccaacaaagctcatccatcaacttcttcatcttcttcttcttcgagatggtctaatctcctatcttcagcagaagcaggaattagcaggctcggtaatgacattagccagaagctacagttttcgagcagcaaagataatggtatcgtggaggtgtgtccacagtgcggtgcgaaattctcttcggttacttctcttgtggaacatgtagagaaaacacatgagaggaacaagaagcagaatcatggcaatgtcacggtcgatgtctgccctagatgtagcagaggattccgcgatccagtagatcttgtgaaccatatcgaaagagatcaccgaggcacttcgaaagcataggaacatatgcgtttacaagccacacatcacaacataacttgtgaaaggtactcaaacatctttgtatttttcttttcatatttgtactggttttaaacaaccaaaaaaaatgtcacattctttgaaaagtcatggactcatgtccagaagtgtagccagaagtgtagtagactaatgttatcattatccttgggccttggcccttgggctttgggtgatatggttttttcaatgaacaatatgagaagaaattcaacggcgaccaatgtggttaagtccgttaaaaaataagggtaaaaccgtaaaaggttacaattggcgagttcgcgggaaattttaccctctttccgcggtaagaaaaaaaaaacagattgctgaccccacgtgaccgtcatgtgcag

SEQ ID NO: 10681 - DNA, 1484 bp, Arabidopsis thaliana landsberg
  unsure (1)..(1484): unsure at all n locations
tgaagccacatttccaaaatatcagaagcatataacttcctagagaagagaatcataattggccaggtgattgtcttctcaaatattcctcagaaggttgcttaatttcagaaaaatccaaggagaaccacagatataaaagaaactagaaactgagggaatctaagtataacaagatgtgtatatctaagggacaatgcttataagttccataccttcaatgtgactgaaagtcgtgttgattgctgcaagccatttctccctttcaccatttatcttatctagaagcattcttctattctgctcctcagtgagtttagcttcatgagctcgccttcagcctcagccatagctttcacgcgaattgtttctcgctcaagttccgctctctctttctcagtctcgcgctgctgtgcttgaatctgttcttccgtggcaattcttgctttctctttccgtatagaagatgcttcttgcatcgaaaccaattcagcattatgccgtctctgagcttcattatctgtctgcaaaatttccaagtcaaagacttcttctcagtaaagaaccctcacaagaccttaaaatgttacacataggttcacagtttctttctaaaaatgtacctgcattctcttcctggccaactcatcctcatatctaagattttgcgctttcgcttgggcctgttgctgcactaaatttctctgatcctctgccaatttccgctgtctttcctgctcattcaaagccccataaaacaatcatatttgtcgcttcccagacttaaaatgttacaacataataaatttcagattctgcaacgaatgttcagcaaaactttgaagcaggaaacaacaaagacaccgaaaagacagttgattccaacatcctaataagatttagagaatgtaacttgaaagacaatgcaatggaacatcatatcaaaacctccatgctcaaattttcaatatataacataaggaagagcaagttactaacaatgtccttgctagcttgaatagcttcattatgttctttctcagccgctaattcagctaatcgagtcttctcctgctttcgcattagatcaaacacctggtgaacacaataacatgtaagcaacgtctcaaaacacaagaatcaacgacgctagagcttgttgatttctcgaaagagattcaattatcacctgtttggaatgaggagagctattgatttcacgaagagctttagcacctctttccaatgactcaggatcgaaaccagatcctttaggctcatcggagtcaggtttagtctccgatttagaattcgaagaagacttatgatcggttggaaattcttctgccggaggtgaagaagagaagaaaggaaagcgaaatcgcgagtcagcgtacgcnnggttctgtgacattgacattgaagtgaacgcagcagctatcgccgcgcggaacataatctagaagcagccattgaaatacgac

SEQ ID NO: 10682 - DNA, 534 bp, Arabidopsis thaliana landsberg
aataagtgtggcatgtaatggctcaatctattgtagattcctgaacttggctcaggttctctgttgcatttagaaaacaaactcaccgacttccgagcaatctccctcgccaccatagtttttccggtacctggaggcccataaaacatcatgtttcggaatggtgctttatgtgacttggtatttgctgtggctcttgcaagacgctcaattctcgtcttcaaagaacgatggagaattacattttcaagaggcttttctccttctgcagatgctgctgcccctgcagctgtgctaagtttgttcttaaactgagacactgagcctgcccatgggaatcggcccatggaagattctctgatcagtgatggctgcccaagaattctattaatataaccccaggtaaccctagcaccttctctgttgtcaagaaaagaacgattaggcttcttaaatcacagctgtataagttttaaaaatgcgataataatcaatttacttatgttaggcttcttaaatcatgttaagcaatgc

SEQ ID NO: 10683 - DNA, 932 bp, Arabidopsis thaliana landsberg
aagatggtgatctatccccaaaagttcggaaggtaaataattctttattgtaagctttgattctaggatcaataaaaagataattacccttccttgttcttatcatctacgcatactcagtttataaatcaatatgttttgtcttaaaagacttatttaatttggtatttccttgagcctaactgtgttttgttctttggtatatcattatagtacaaaggacgagggacaaaaacctttctcgttccaaatcggtaaaggtgctgtgatcaaaggtataaacttacttactctgttttatggttaatcatatcatatctctgaacctatttgcctcttttttggcgagtgaacatcatatgattcgattgtttaactttgcttacaggatgggatgaaggcgttatcggaatgcaaattggagaggttgctcgcttgcgggtatgtatactctgcttctctcatcatgttcctctttgccatctatgcttttatggctctctgttgaagcacttttgtctttcatgatagtttgggtgtttcgttatatgtttaacatctttggcttgcgatcttatctgcttctgcagtgctcatcggattacgcatatggcgctggtggatttccggcatgggggatccagccaaactctgttctcgactttgaaatcgaagtactgagcgtgcagtaatgatctccccagctcctaaactgtgggtagattattaaacaaccctttatgtttattgcttctgggatctttatgcaacaaaactttgtgatgtcattgctcttctaaaactcttggacaacgtttttatctaaataaaagaaaagacccgtctcgtgtttcagttggaatgttagtactatattatgatattattcccgtttttttattttgattaaaatggttttgtttattcaatca

SEQ ID NO: 10684 - DNA, 973 bp, Arabidopsis thaliana landsberg
gcgctgcgtttttcttttccattgatcaagaaacaagtgacaccttcttaagtgtagccttcttatctgctttgaagttccatagctctgttgtaatataccttccactcgggttatactcgtttatctccaacaaagctttcgtgaccgcattgtaaggaccatctcccaaatctgcctttagctccctcagcttttcgtctctatcatctatcacttcctaaacacaattaacaacaacaccaaaaaagctttttaatctttcagagagattcaacataacaaacagagtcaagaaggcggtcttaccacttctctatcttcattttcgagcttgacccgcttgaatggatgccaatctgaatctttgagatagtgttcccaaagttggagaacttcaactgctcggtcctccacatcttgctgacaatacttctgctgcattgcatccacgaatggtttcgtcacgagctctcccattctcttaacaccgatatttgtgttccattctttcataatctatgaaggcacatgaaacaaacaaaaccaagattttagtaaaatgtcaagctttctcatagcttttcgatgtgattgaaaagaacaacactttgaatgatacatacgtttaccaattctttatgagcttcttgaagctcatcgttggtcctgcgctctctaaggataagagtttggttaaatttatcgagatctgcgagttgtgcttccttctcacctaaatctttgaagatgatgtccacctctttcacaacttcagcatcgccatctgatgccatgtgcttcatcacattgagctgtcctttcaactgctcaacttctagctcaatcgcttgtttctgatctctctgtctttctagtcttatgattttctcatgaagctcctccttttgcctctgttaggtacagaaatttctcagtaatcacgaaaataagccccaccatttttacaaag

SEQ ID NO: 10685 - DNA, 816 bp, Arabidopsis thaliana landsberg
tatgttatatactaacatattacttatttatcaaatgtaattttattataaaggtggattactaaagaaaatgccgtttcttgctggatttggcaaagatattgttacaaaatcatataaggtgattttgatatattcaagaaataaaaattatgaccattatttcaaggccaaggttctatcccttgataatggtgagcaaagagacacaagtttttataatttacatcattgcatcttctgcgatgagcaaacatcagtctacgcaaacggatccctcttttggttgacattgaagaagcttaagcaaacatcttaccaggtattagctatcgatcttcacactgaagaatttcgatggatagtattaccagagtgtgacaccaaatatgctactagtatagaaatgtggaatctaaatgaacgtttgtgtctatcggatgtgctagaatgttcaaatttggtcgtttggagtttacaccaaaaatatcctaccgaaaaatgggagaaaatatattctattaatattgaagttataataaccaacaagttaaataaaaagttttggatgtttggtctagcggcggcctatttttcaagtattagaaatcatcaagatcaagtgtctttttttagacaaagaactatttcatattcgccaacaatgatttctccttcaagtttgatgctttgatgttgtttatatcttcatcatttggtaaactcaaaactcttaagttcttaacaatattacatatacattaaaaagaatgtttaaaaatatggctataatatatctatatatatatatatata

SEQ ID NO: 10686 - DNA, 1620 bp, Arabidopsis thaliana landsberg
tggcaaaagcggacaaaacggtctaatgttttaaaaaaaaaaaatttgtattaaattttttctgaacaactattaatttttttttagtaccacaacatattgaaaaatgtatcaaaaatacaaattcaaatgtaaaatcaaatattttgattttccgataacatatttgcaatcgtttctcgaatatttgccatatgcattttctgcttcatcaagctcaaatgatgcattgttctgatcttcagtttaagtctcggtaaaatattcaacaaaatatgcatttgtaaaattagaaactcttataaaattatggaaactcattgttgcgataattagtctccttggaacatccaaatcatatcttggaaaatcagttaaaattctccatttcttcttccatactccgaaagtgcgttcaattatagaccaaagagatgcatgagatcagttaaacaattcttccttgtttttcggaggaggaccggtatagaactgtgacatgtggtatctcagaagtctattttgtgttgacctataaggcgctaaaaacccttgcttattaggatatcgagagtcaactacataattgtctcccggggtaaaggaaactcagaatcaccattttacgtgagtgaaaggacagctgtatcatggcatgcactcggtgctccattccatacatatgtgaataacatatttatatcacatattgccattacattgatacttgcgtagttgtgtcggttccaataaatggcttgtaactcaggctttactttgacacacacatgagttccatccataactccaacaaaaccacttaaatatggccaatatcgtcgatcaacttgtagacgttgaggaatccgaagtaattgttgtgttgttggtgtcttgatgtaatctgaggcaagaagttatgtagcttccaacacttcactaaactttctattcacggtttcttggtttcgtccgaatcgtaaaccaatatctcgttgaatttcattgtgtccacacactcgtagaaacattgcaacactctcttcaacacttgcattcaatgaagattgtaacccataattttcttttaaaatagagcatagtcctgtgaaggtagcaaacgacattctcaataattgtagacatgcagcattgtcattttgaatacgatcccaaagaattagccatcccaatcctccacctgttttggatagtcctttttgaaagtgctgctcatagtaatccaacgttggatttattaaaaattcttctatttgctcattttccaaagtctataactcaaatctttctacgtcagataagttgtgaatttcttgtgaatgtagttgacaaattcgaaaagcctgaaataacattaaaatacataagtaacaagaaaaaaaaaactcaatcacaactaattccatattgagaaattttactcaaacataagtacttcatcaaactaatagaaattttacatatataaataaactaacataataaactactcttcctcagtttcgctcatgtcgttatcaactaagttttgtcgaggaagaggttgcgatgtggatgggttgttttctcctaaagtgctaaataaggccgaatgatctt

SEQ ID NO: 10687 - DNA, 1087 bp, Arabidopsis thaliana landsberg
tgcttgtgattgcttgggatcgaattcaatcaattctagtcctgatcagaaagaaataagcagtaaactcatctagtcctgaagggattcaatcaattctaaaacttaaccgttctacagactacggattccacaactactctatcccatccctaagaattctaagtcactactcagacaacatgctcaaagacataaacgctattaaatgataatattgcataagtaaagagataaagagtagagaaacaagatgacagatgaaatcaaatgcggaatctgaataacttggagaaatctcgaattacaggttgcaggagaaaaagcggcgcagcagagtaaaagagaaaataaaactgaagcaaaaactcaatgtcgactagatgtctcaggacagaaccctaaaacatctatttataccaaacgaaataaaatgatagtagacgggccaatatcctaatcgcccggcccatagaatggtaatgggccgagatgggcttcgtgatccgaggaggtccaggctgcttccaaacactttgtcttctcttcttctcttccttgtgctcagcttgtctggttgagtgcggatttaagtagagtgtaaagacgtgatcgagtgtccgatcgagtgatggtgatggtggtgagtgatgatactcgaccagggagtcaagtaacttggtagagtgaatggtcgagtgtggtcaggtggtgtggcgaagtgatactcgaccagggggtcgagtggcgtcatcgagtggcctgagctgaggatactcgaccagggggtcgagtaggtgggaagaatggctccaaagttactcgacttgggggtcgagtatggtgttggatgcacacgacctggtggtcgagtatgtcttctagttctggctcgtttcttccaatttgctcgcaaacagctccaaatcacctgaaaacaactgagaaatgcaatatgtatgcaaagctatcctaatcatgcaaagtacgcaagaatgataagaaatgatataaaacagtgatgaatgatacgaaactggactcaaaacgatgatgaatggacctgaaaacagcaaattttagcata

SEQ ID NO: 10688 - DNA, 1641 bp, Arabidopsis thaliana landsberg
caggattatgttgttgatgttgaaaataatcatatgctgctgaattgatgtcccaatttgttttcggagaagaaagaaagatctaaattatagtcctaaaatgataaattgtgagtagttggagtaggagaaattaaataggtcaataaataaaaaataaagatactcccatctacatcctacattttagtccataataatttcagcaaacttttgaatttctgaatttacttgccctttttatataaaagaaaaatgtgatgtcaatactcaggagaccaaaaactaggagacagtctaatacacttgtattgggaaagaatcaattttcaaaatgaatttcttcataaatatttttttttcctttcactcctttcattgataaaaaaaaatcctgcacctctctaatgatgaatacttgaatagagtcagatatttattctattaaataatttagttatttatttagaacctacctttatttgctttgatggttattctcatctgagttttcttcttctctcttatttctctcccaagtttcttattttttttcctctttactttacacaaaggaacaacaaataatgtggaaccttaacgactcacccgatcatcacgaagaatccgacagtagagggaatccggtcggacacgtgtcaaacgggatgagtcaatctgcaacgtggctaccgtttgtgcttccggtgaccaggaatttctttccggctcaaagcatggaaccgggagttcgttggtccggtttcaatagtgtcggtaagtcggatccaagcggatcgggtcgaccagaagagccggagatatcaccgccgataaagaagagccgacgtggtcctcgctcacgtagctctcagtatcgaggagttacgttttaccgacgaaccggaagatgggagtcacatatttggtaaatcacataataccttttaaaaccatatgtagtgttatcatttgaattattttcataaaatgttttggaatattatgcagggactgtgggaagcaagtgtacttaggtatggttcatatacataaaaattacgatttaacttttgtgtcttcgatttatttgacaaaacaaagggttttgtttccttctaattgttgttacatatatatgcaggtggatttgacactgcacatgctgctgctcggtatattttcgaacctagctaacgcattactatactagtatcattttttgttcattattttgttattggctataatatgggtcaataaatatttgagacagagcctatgatcgagcggcgattaaattcagaggtgtagatgcagatattaatttcgacattgaagactaccttgacgatttgaaacaggttctatataagtcttttatggatatatctactttaggttatactagtaatttaattacttactactcagaagaaaacacaatgaaatattggttttttttttttgcagatgggaaatttgacaaaggaagagtttatgcatgtacttaaaaggcaaagcactgggttttcaagaggcagttctaaatacagaggtgttactttgcacaaatgtggaagatgggagtcacgtttgggtcaattcctcaacaaaaagtatttaaattttttccttttt

SEQ ID NO: 10689 - DNA, 543 bp, Arabidopsis thaliana landsberg
tttcgatcattccaatttccaaattcatgatctttctcaaccaagaaacaaacttaccatttctatcatcttaatgatgttgtccatatgctcgctgacacgaggctggtgggtgggagggaggcactgaagagcacccatatctaccaaatattcatcgcaaaaccgattactcaaatctaacgggtcttctccattcttattagcacgatcaataatctgcagagttccaaaattcagatactaacaaaatgtttgtctaccttagcataagaaatgtaactatcattcaaatgttcaatgcagttgtgaataagccatattcaataccttgtcatcaacatcagtgaaattgcggacaaaagtaacatcataacccaaatgcttcaagtatctgcataaccagtagaaacaaaattcaaactatataagaagctaaccaacatgcaaaacttcaaaatgagatcgggtccaaccacatcgatctaatagattctattcaacaaaaccctaatttataagagaggaagaagaagagagaga

SEQ ID NO: 10690 - DNA, 1464 bp, Arabidopsis thaliana landsberg
gttatataagaaactatttggaatgatctgtatagtgaaattttggatgtttatttccctgaacgcgagcatttacatgtcagtttcttctttttacacggagcgccacatgtgtaacagaactcgtgtttgcaatgtctgccaggaacaaaaagacagatagttaaagtcaaataatataaaagtaggctcaataaataacaaatgtccaatacctgcaagtcatttgttggcagccgccaccatgttgaacgatgctctgacactgggaacactttttccatccttgtgtcttcacaaaagactccaaaatcgccgcgtcagatttcaggtaagactccgacttcttgaactcatcgcatgtcttcttgtagtgccacggaacatggcattttttgcagaaagacaagccgcactccatgcacttccgtgcttcttctgagtgccgaggatttttgcttatgtgcctaatgaggtcgaggtccgacatcagaaaagaacaagatgggttgggacaatagactctgtctttaacggggatagccttctccttcttgcgctggatcataagagtaatagcatcagcatcagcaaaagctctacaatcctctggcacaagatcattctcgcaatccgggtaagggcagattgctgtgttccctcgtagtatttgttcggatgagaagggcttcctcatgcacgtaacgcagatgcggtggaagcagccttgcacctcaaacttatcattaggtgaaacgtaagcgtagcagactggacaactctcatactcggtgtcgccttcacaccatctagtttgggaagctatagcatcttttgctagcttaatgacagaaacgatgtcgtctctgcttacagttgcaagtgcctgacatgacgtgaatcttgtctgaagaagagacacatgctccaaaagttttgctacaatggactcgttaggtgcagctttacgagtaacctgtaaaaacaacatgagaggtgtacaaacaggatactggattcagggtaaaagaagaaagagagagaaacatacgtaggccaagatattggagtcgtcacagaagaattggatacgttcgataccaagttccaaggcccatttcaagccgtgaatgatggcagccagttccgcagcttctgggtgtgccgccagcttttggtttctcagagctttattaatctcctgtttcgtgttatcgtgcgagtcacagagggacaaacctagaccaacgaccagcatcgtatcatccttaataagctcttcactcaccaaacccttggagtataaccgatatgtatgagttgtggcccgaggaggattctccaaggaatcaagatcaagctcctgagctaacaaagggtgttgactttcttgatccacacgtttaagatcattcgcggggaatgcatcctttatcgctaattccaagtgattattcatggcga

SEQ ID NO: 10691 - DNA, 1187 bp, Arabidopsis thaliana landsberg
aacccaattaaatctagcatattaaaaagtctggttttctacttttcttagtacaatatggttttttaggagaaaatataaagtgtatatcaatttcgaaatcataaattgaataatttttgaggatttaaaatcatctcaagttctcagccaagatggggtacataaaggatttcttcctacgaaataaaggcaaataagacaaaggaaaggaaatgctaataattaacacagatggaaggaaatgctacctaggaaaaggacacaatatcaactaaataaaggtaaataaaattaaaaatgaataaggataaactcacaaattgcaattacttatatatatgtataatccttaatacaatctagcgcctctatatataagaagacaaagaaaagaaaccctaaaccttgattcactatttttctttctctttgatagctatggaagcggaaatatcctttggcggcgaaatagacctcaaaccgaaatcacaagatgctggatcattcaaaatctgcgtaagtgcccgaagatcggacacatcaattagtcttccaccatatttcgttctctcgtacaatgactacgaaggtgtcatatcctcctaccctaatgacgtgaaaaaactgaatgaatggttgtactcagcagggctctccgaacaatatgttgacattgctaactctcaactcactgaacgaatctgtaagtcgatttctatggtagactcttcagtttgtgctacgttagtttacatgtactgtaaagtcattgttccacctcctcctcggattgactcgtttgatgagaccaccaataatatcgagttaattagaccggcaaataagtttgtggttgaccgtttggcaaggaaagtatgtaataataagaagaaatccaactctgacgccagtgtgtgcacaattcgtttggaggagtttgaaaagggagaaatagtggtgaccttaccatgtggccacgagtttgacgatggatgtattgggaagtggtttttgaaagaccatgtttgtccattgtgccgattcgagttgccgcgttaagaaatgaactaatacttggtgccttgggggacaaacaagttaaggggaacaaagaagcttaaggttttcaatattgggctatttaatttagaggtaatgttttcaattacgcataacaagcttgc

SEQ ID NO: 10692 - DNA, 1016 bp, Arabidopsis thaliana landsberg
tgcccgttcaagaagcttaactcgcaacccatttctccagtcttgctcattattcaatgtagctacctgcacccaattttaaaagttgctaaccacacacattccttacaaagagaaaatctactgcgcctaagacttttttttatactaaccgctttttcagctgcctccaccgtttcatactccacaaaggcatgtaactatcgccaaaagaaaaagaagctaattacttacacgtaaacacatatatgtgcttgtgattccaaataagaaagttttccacaacgtctcttactctggttctgatgaaatgttccttcttcccacccttctctgattcttcagtagcatttggatcacatatggatacacttttaatgctgcaattgcagaaaaatgggtttttagtatgtaaagggatataacaggagaaatggagtaacaagataacaaaatagataacaccatagcctaccttccagctttaccaaatatctctcgaatattctcatctgaatgatcctctggcaaattttctaccaaaacagtgaaaatctatgggacacaaataagaaacggatatatcacaaaagaagcaaaagacacaacacaatagtcagactgaaaaacaagagtcatgtttgagacgattgatacctttggatctttgatctcaggaagaggactcagccgcttcaccattcttctcatcagcgctaacaacctgcaggttgaccaaaaagatactcaacctctgattttactccaataacttccattaatactactgtaaagaaacttacaagaagcgatgattcctttaaggctgatactatcaaagcatgatctcgagtaagcttcttcattttgtggaacgtagcaatggtagaaataggaactgcacaatgaaaagaaagctattgaaattgttctcaacagttccataatcaagtggctatagatagaaatggagtaatcaatacagaactactttatttcctcaaaatgtagtatat

SEQ ID NO: 10693 - DNA, 786 bp, Arabidopsis thaliana landsberg
cgttttattttgctttggcatggttacaaaatataaactttagatgcaaaagtaagctataacattatttttattaaatctacctgaactcgttttatgagaaatccgacaccatacatgattttataattagttaagaagactaagagataaactaaatgcaaaaaagaaaaaaaatacccaataacttccattcatacaacttatctacgttatatgatttctccagtaacttccattcatacaactgtaaagagcttacaagaaacgatgactcctttaaggctgatactatcaaagcatgatctcgagtacgcttcttcattttgtagaagcaatggtagaaataggaactacacaatgaaaagaaagccactttgatatatcaactgcaatttttgaagatgcagattctgatgacatcaaggagctgatggacatcagggagcagatggacatcagggagctgttagttcatatattcattatacaattttagatgaaaatatatattataatattaaattttataataactaaatgaaatatatattgttttttcactttttctttatgttatttatattaattaaaatattgtaattagataattaaatgttattatattaaaaaaacgacagctcttaaagcacaaaaaaatgtgttgtaaaaaatttaaaagttacatgtaaaaaaacgaaaaaaaattgttttgagctgtgaaatttgttaggaaagttaaagattgattgggttcaaaattagggactgtaagttcaaaaaaag

SEQ ID NO: 10694 - DNA, 1474 bp, Arabidopsis thaliana landsberg
tttgataatttccatgaaaccggggacccaagcatattgattatactcgccaggacgcacgttccctatggagaaatagccagcctcatccgcaatcgcccaaaattggtatccctgattggcaaagatttagtgtgtaaccaatgctcaaaatgttgtactctttacagacaaatctttattttgttggtaattccatcataaatctctttcttgatatctttgaactgacttctatttttgctcgttgcaactaattaagaatggagaaggaagaaatcaccttgcattcaatttgccaagaaccagaatcaccaggcggagccaaaccaacataagcacctcttgctgaaatcaaatcattgtttatgaacctatacaaaaattcaacatgttaatatacactaagaaatattacagaagcaatataaaataaaggaagatgcaggaaaaataaaaaaaaattagaatgtaaaaaacacaaatacctgtcacggataagtaatctaccacgggctgtgccacgttcttcagactttggatagtcgtcagatgccacaaagctataaggccacctttcaacctcagccatcatctgcagattacctcatacaagtgagcccttcacaaatctttttctgtattcagcaagtccaatagcgatttgcttcactcgtacctttatcttagcatcgtcccataagcaaagtggatcatctccattggctgtggaatttaggtaaatgaaaacagggccatagactttcttccaaggctcacgtgttcaaaacgaggcatcatggtttttccagcataatgagtactgtgaaacacctgaaataaccattacggaaatcaacacttctaagtattatactgaaacattctccacatatgtcacagggacacttactgcaagagtggttgggccaacatgtgaagtcaggttttgtttgagtggtccgcctgagcggaactcattactgggcgtaatttgccaaaatcctactggtggatcgaaggatatccatccatgtactctcagatccttattctcacacgaatattggtatttatcatctacctgtcagagaagaaaaatgatttagttatctgtgaaacagtatttaccggattcataatttgaagttgtaatacatcacaaaacgagcataagttcataatatacgcattcatgtatcagtaaatgggagaataaacagctcaacaacgcatgagaaagaacaaaatgttgtaatttctaaacgatggaaaaaatatggaacttatacttcgccttgtaggcgtggatcacaaggagcagtgagcagagaagcttcctggtaatctagagtttggcatcttcctttgcatagatcatctggaaaaggcattatcctttttctgtcatctgccacagccatgtaatggaatctgtaaaaaaagaatcgcaacaggttgaatatatccgtgt

SEQ ID NO: 10695 - DNA, 1792 bp, Arabidopsis thaliana landsberg
agcttccatagattccgttgggcttttactgtgtttgattgatcggatcgattgcgattacggagaagatatggctcaggctgtagaagaatggtataaacagatgccgattatcactcgctcgtatctcacggcggctgttatcaccaccgtcggatgttccctcgatgtacgtgcttgcttgcttattcgcgaatcttttttggggttctctgaaattctctaaattagggtttcatattctgattgtttttgttttgcagatcatatctccatataacctttatttgaatccgacacttgtggtgaagcaataccaatattggcgtctcgttactaatttcttgtatttccggaagatgggtaattttcccttaacactactctatgaaactggatacaacatttgtgtgcttattactttcatatgaagctcttgtctttgtcacattattagctctaggctgctacttgttaatagcgttgtgactgattgattgcttataaacaaatatgtgtttggcgttgttgtagatttggacttcatgttccatatgttctttctcgcacgatactgcaaactccttgaagaaaactcattcaggggaaagactgctgatttcctatacatgctcctatttggagcatctgttttaaccggtattgttcttatcggtggaatgataccttacttgtcagcatcatttgctaaaatcatcttcctcagcaactcattaactttcatgatggttggtaacttctgtttcccacaaatctaagtcgcctctaaatatcagcttatagtctcttgtgttccacaggtctatgtatggagcaaacaaaatccttatattcacatgagtttccttggtctgttcaccttcacagcagcttacctaccatgggtgagtttaactctctcgtttccctaaacttccaccggaatgaataaataacatcttctgcaaattctggcttttgcaggtgcttcttggcttctctatccttgttggtgccagtgcttgggtggatcttttggtatatactcagattatcccaaaaattttcttctccagtctcttttgatcttttgtcacccaagttaacttcagtctgatcaaaacatttcagggtatgatagcaggtcacgcttactactttctggctgaggtttatccgcgaatgactaatcgtcgtccattaaagactccatcattcctcaaagcgttatttgcagatgaaccagttgtggttgcacggccagaagatgtgaggtttgctgcggcgcctttcgatgaaatccaccaagactgattctgtcatcttacatttcccaaacctaaacacccgaatcagtggtttggcttgtggatcagatataaatggtgcaaaggcagatgatacacaaaagtctattttgactctgacacgtaggtgcgacccacacaccctagtttctagtagttgggtgtgttttgggtccttctctttcctcccatctcttcatctttttgtgtatacaaacatcgcttgctgttagtgggtattgatatgaacacactcaatttgtacacaacctctactagtgtcgcaatgttttagcgagggaacatgttttgaattcactgcccgactcagatatcagaagaaatgtacttttgttcagatatcagaacaaatgtttgattgctcttagcacatttttttttcttttctatttcagttagcagtataaaacagagagagctgcgtattcctgaaaacaacaagacatgttcaagcttctttaata

SEQ ID NO: 10696 - DNA, 791 bp, Arabidopsis thaliana landsberg
  unsure (1)..(791): unsure at all n locations
ttagaattggaagctagcaactagtctaaacttgtagatcaacaattattcttgcttttagttatgtgtaggagattttgggacaatacgcgcacaaatatccttgaggagaggagggaaaaacggattcaacggaaacatttggggccaacagttggcatctaaggccgaaaacgccttgcaacatgcgccttcaatattttcaaatttgccggagaaaactgatttannnnnnnnnnnnnnnnnnnnnnnaacgttggagagagacgacatacattttacaagatcaacgggtgagccgggttggaaaagtcctggaaacatcggtggcttttgcatttcagctactccttgtgtaacaaaaatggtaccacaaagggatgccattaacaagactgatacaatagctttgcttcccatctttcttcttttttcctttcgtttgtcttggatttggtttagactttagacttagattgttgggatggttttagatatggaaaaaactttagaatttataggatcaggaaacaagatttttatcaataaattgacaagtaacagatcagtctaaagttttgtttcagaatgtaactcatgttgatgttcaacgtattaaattttattacattaagttaagttgactaatgtaaatgtattgtgtttactacttcaaattatgtaacagaagatgagtaaactatgatattcttttgacccacttaatttgttgtgaattactttctttatgatttcaaacttgaagattgatttgtctaaaccctagtgaa

SEQ ID NO: 10697 - DNA, 1687 bp, Arabidopsis thaliana landsberg
agagtggaacaagactctttgttggaggcttatatggctgttgttcaacaactcatggttcttatgtgggcatcttggcattgtcatcattaccttaaaaacaagtctttttggaagattgaggcatcgcaaagggatccgtggtcttggaaaatgcttttaaacctaaggcctttaactgaacagtttgtgaggagcaaggttggtaatagattaaaaacttccttttggcacgacagttggacatctttgggacctttaatcaaatgcttgggtgattttggttctaggatccttcgtatccctataagtgcaagagttgtagatgcttatggcccaaatggttggagactacctttgtcgagatcaccaccagccctagccatctatgagcacatttccacccttcctgccccttcgagtgctttaactcatgatccttactattggtgtgttgggaatgttgtgtgtaaaggtttctctacggctgtgacttggaatgctctacagccgagagcaacagaaaaagattgggttacatctgtctggttcaaaggagcggttccaagacatgcttttaatatgtgggtagctcatcttgacagactgccaactagacagtgtctgcttagtggggacagatttcttctaatgcttgttgtctttgtactattgctttggagtcccatgaccatcttcttttgtcctctgagtttgttcgcaggtttggaagcaggttttcagccgtctctgcccgcgacaatgtctcttctgctcctgggtagaattgctctcttgcactagactctcctcaactaaagctccttctcttctgaggaagattactgcacaaactgtgatctataacagctggcgtcaacggaataataatttgcataattctactcgcttggcaccttttatcatcttcaaattggtggatcatgatcttcgcaacctcattacttctcaacgacatcgcaagcattggcagcggctaatgcttttatggatttgctaaacacacccaaatcttttcaaattctattgtagccttgtttttattctttttgcctccgttacttttgtataggtcgtacgttattgtatttcctgaactctcattttaatgatattaacagatttagtacaaaaaaaaaacatcacttcattgttaaagtaaaaaaaaaaaacccagaaaaacaaaaatatggattctaactcatttgtgctatgtatttttttaacgtacgtaaatctgttaacgtaaatttttttttaaaaaataattaacaaagtttactagaagatgaacaacactttatcactagtaaaaaatgacgaacatcatttacaaaactaagataaaaaacaatcgattagtttatttaaaatatggaaaaagagatctgaccaggatcaaaatcaataggataattattgatatcactagaaaaatcttcattgccgccatttccacaagtttcttcttgcgttgatattttgttcaaatcgaacaagtattcattctcataatttggaggtggaaaattcaaatcaatattagaatccatgaactgctgaataaaccattgttcaattgattagattatttggagaaaaaaaattaagtttttcggttttgttttggcctctattggcaacatttaaacctttttagaattta

SEQ ID NO: 10698 - DNA, 532 bp, Arabidopsis thaliana landsberg
  unsure (1)..(532): unsure at all n locations
tctttttgttcttcaatatcgctcgcaacattgtagaggatgtgnnnnnnnnnnnnnnnnnnnnnnnnnnnnnnnnnnnnnnnnnnnnnnnagaaaacaacaactttgtccccaatttgttccatagtgtgcaccaaaagtgactcaaaaattttgcatcacgatctgaaacaatagtagaaggcataccatgcaagcgcacaatctctttgaaaaagaggttagcaatatgaacgacatcatccgttttatgacaaggtataatgtgccatcttagaaaaacgatcaaccaccacaaaaacactatcgctccccctcttcgttcgaggcaatcccaaaacaaagtccatcgaaatatccgcccatggaaccgaaggaatagggagaggcatatacaaaccatgtggattcaaccatgacttggccttttgacacgttgtgcatctagcaacatagcactcaacatcacgtctcaaatggngccaaaagatgtgtgcggacaacacaatcctcgtcttcttagcaccaaagt

SEQ ID NO: 10699 - DNA, 1122 bp, Arabidopsis thaliana landsberg
gacactcgcaagttcgttgatgatcaatggggtccagtgttttgtttcttttggtttgctactcatggcactgcgatgaggcgtacaaatgccttgatcagcggggacaataaaggcactgcagcacgtatcatggaagactggtttgaacgagaaaacggttgtatatcagttgatgttgaatctcatagaagagtctcaagtataatcagtgatccttatggtgagcgtaaataaccatagctccaagagttttagtaatggcttgttattgtaaaactaactttttgttgcttttattgcagatcaagatttgatggaaatggcatcctcgttactgtctactggcggtaaaaccgttacaaggatgtcaagcgttgctagacgggtcagaagtggacttagacacgctgacaaacctagatttgtctctgccttctgtcaaactaactgcggtgatgttagtccgaatgtgttgggagccttctgtatagacacaggccttccttgtgaattcaaccacagtacttgtggtggaaagaatgagcaatgctacggccgcggaccagggtacgtcttattcctaactgcacacttttactttcagcaatgcggaaaccaatcacagaaaattatgttctctcttagttcaatatggtatttagagagtcaagcttgttagatttataacttggcatgactaaatgtttcagctaccctgatgaatttgagagtacccgcattattggagagaggcagttcaagaaggctgcggatcttttcactaaagcctctgaggagatacaaggaaaagttgactatcgtcatgcatatgttgatttctctcagcttgaagtgacgattaatggacaaaatggaggttccgaagtggtgaaaacatgtccagctgcaatgggttttggtttcgctgcaggaacaactgatggacctggagcatttgactttaaacaaggagatgatcaggtaaaacccaaattctccttctaacttggtaatgaaagatgtttagtactatactttatgttgtgactttgtgttagggaaatcctttctggaggcttgtaaggaaccttctcaagaatccaactgaggaacaagtac

SEQ ID NO: 10700 - DNA, 959 bp, Arabidopsis thaliana landsberg
  unsure (1)..(959): unsure at all n locations
ctaacattaagttcacatcatttctaatgacaatcaggtataatagaatctgactacagttcctatcatatataaatacccataatggctataaagtttagagaatttattattagtaaagcaacatatatgttcataaaggtaagaaatttacctgcacgccagaatcaagtctgccctttggtcatgacccacatacttatattcagccagggcatcacaaacaacgtttacaaatatttcacgagaaacaacaacggttgttcgccttttgtacacctcaaacggcttacttttactcttatcaacatcatcagtagccaaactattaactttgttagccttttctacattagcacaagctgaagaatcacctgtcttctgaaattcagattctttactatgcgagggtgaaagcgagggagaaaggattaaagatccctcacttcttattaactcaaacaccctgcggctaatctgtccacaacccaaacaaacaaacaaaaaacagaacttcaggatcaatcaaaatcaacaaggcatgaatcagaaccaccataaatctagaagctttgtctttagcataacctttaaaggataccaagcaagctcattaatgacaacattgaaacacacaaagtaagaacacaacgaaacttaatctcatactttaccgtatcctgattcttaaacacacaaaagtaacagccatgaaattccaaattagaaaagttaacaccatgattaaaaattcatactttactgtatcctgattcttgacaattattctccaattagaagacaataattgagaatagaacatgtcggtcgacagaataatgccaaataacgagattaagaccaaagtgctaagtactgttcaattccagacacatcactgttccagaatcccaatacataagccaggtcgttacttncaaaaaaaaaaaaaaaaacac

SEQ ID NO: 10701 - DNA, 1271 bp, Arabidopsis thaliana landsberg
caaacaatgcaagatactgacaaatatatgggatgggggcaacgacaccagaccattcaatcgtcccgcaaattctcatctgcaaccctattcaacgcgatcaatgcataccaaatcttctcattccttcttcttggtattattatcattattctttgtggcattaatactagtactaatgtatcttatctctccagaaaatagctagctttccataatattccgccattgcagagccatacaactttcgatgcagtggctgcacatcaccagcaaccactcttcatacgtcgttaagctttgtgtcaagccacagtagcccatatttggtgaaaaaagcatagagcacattgtttgtcacacacatgcacgaaacccacctatcatcaattggcagctccagtttctgctttcttgtaccttgtctcagattgtagacactgatactttcaaaatccttagcataaaccttcccctccaatgacacacttgacaccatattcggtctactatccgctttctcgtcagggacagggactcccacgactttccaagtttgcgtttctaggtcgtaaacctgttcttcggtctcatcttgtttcaagtcttggatcacatgtatctttccgtcgaatactcccacggcgctgctcgacgcaattcgttggaactccggcttgatcgggccctgacgtaacttgccagaccgggtatcaaggatccacaactcggtcgggtttggacgtccgcccacaaagtatatctctgaatccaccgcgacggtggaagctcggaacatgaaattatgactagggaacgagagcgggaccaattgatactccatcgtcgctgtcgtgggacggagagtgaaccaaagataggtggcatcagtcgaataattctccctatcgcagaagcagacgtagatggaattcttgtggaggagggatcgcatccggtagagctcaggggtacgcacaagggacctgagccttacggagacgcaagagatgttttcgtagtagcgtctcgggacgcgggctaggcagttcagaaccatctcgtcgggcaaacaagaaagggatgaccacgacgatacgtttctagccattgatcaaacgtcttttcagattttctttttgactatataagttagagaaactaaacagccatgcaaggggcaggtctgcgcagggttaataatacctaattttttaagaaatatagttttggatctagttctaatagaattgggagtaattagttgcaaa

SEQ ID NO: 10702 - DNA, 649 bp, Arabidopsis thaliana landsberg
gaaaatcaagtggaagaactcacttcaaattgggagcttgagaaacagatgagggtacacattatttcatcaatgatatcatgctggacaacacaatacctgtgacgcaaatatttttcgttgtaaactggatcactttgttggttctgtatgaggcatctgatcagtgtactggtgcagatggagatcgaggaagccaaatctcaagaaatcgaagcattacagtccgtgttaacagatattaaacttcagctcagggacactcaagaaaccaaaagtaaggagatctcagacttacagtccgtgttaacagatattaaacttcagctcagggacactcaagaaaccaaaagtaaggagatctcagacttgcagtccgctttgcaagacatgcaacttgagattgaagaactctctaagggacttgagatgactaacgatctcgctgctgagaatgaacagcttaaggttagtcataaaattctatgtccgaactttttactcctcttgtcggtgtctgtgttgaagactatgtttatgattttatatgtatcatcgtcgttatttgtcttatcctctttacataaaaggagtcggtgagttcgttgcaaaacaaaattgatgaatctgagagaaaatataagaaatc

SEQ ID NO: 10703 - DNA, 1266 bp, Arabidopsis thaliana landsberg
tcttctctctccaaagccgagaagatttgtcggcgataatacgttaccagatcccattaatcaatatgaagacatattcgacattaattgcttaaatagtgtatagtattgattatacattaatgattactattttctctcttttcccacaatcaatttctttctctatatatcttattttatattcctatttcgcattattaacaaaatcaatttatttgcgcatataaggctgtcatttcggcgtcaatcttcttccttccttatttttctttcttctaaaaattatttatttatgtttctgtaaataaaaattcgtttttttctgtcaatcatactgttttgtctcagaataaaaaaaaaaaaccttcactgttttgtgtggtgtggttacgaagaaagaactcttctccttctccttcttattctttctcttcttcttctctctctctctctctctgagtgtctggttacatttggcgcgaaaagttcttcactttatagcttttttatctctttaattatccgacagcttcgttacaaataaagatgtcagtaagtgcgttctctctttttgcttctctcttaactaccattacattacatacctcttctttctaggttgtccctttctcggaattgctcttcttcatcgtttctttaactatttacttctctatttttcatcattccgttggatcggattctaaacagtttgacaaacctggatctgtaattctaactcagattcttctgttgtagcaggtggtaacaatcttgatactggcattaaccagtgttattcccatttacgcaaacgttcacggcgccgggaaaatatgcgacgaacttggccggcgatcattgagtacaagaccacacagtgtctccattacagattttggagctgttggagatggcaaaacgctcaacactcttgcgtttcaaaacgccgttttctatcttatgtctttcgccgacaaaggtggggcccagctctatgttccgccgggacattggctcaccgggagttttagcctcaccagccacctcactctctttctcgaaaacggcgccgttatagtcgcttctcaggtatattacaatgcttctttctcattctcacatttatcccaaacttttaaatttatccaaaaaccccaaatttttacttcaaaaggatccatagcattgggaagtggttgatcctttaccttcatacggaaggggaattgatttgcctgccaagcgatacaagagtttgat

SEQ ID NO: 10704 - DNA, 878 bp, Arabidopsis thaliana landsberg
tagacactctggtttccattacgtggacattgttttcttagtgtggctaggtaagatttatcaagggttgggtcgggtaaaccggtttcaccgaagttgtaaagacgatccattatgaactgacattggcttttgccaaaagtgtgaccacctaaaccaatatagtcatatagagttagttattagtgattacaactataaagatgaaaatgtttcaaatgagataataacataccggaaagagcaactagatcagaagaacggtcgagtccgacatttttgaatctatccttaagttgtttaagtgtagaagatggacctggaaggttatcattagcaagatccataaaacctcttaagctgtctcttcttccatttggaaccatccatgaaggacctcccgcctaaagtaaacatatttggttaaacattaacaaaatggtctacaaaaaccatttggatagcatagtagaagatgcataccaaaacgatagattctttagctgcgatggcgagcatatcagcacatgaaacggttctaggacatgctttctcgatggcagccttcattttgtcgattacatcgaaacctcgagctgaattagcgttcccaaacgcatctttctccgtcctaaacgatgttgtgttgtctaacaatatcgatgcatcacatcccttgatccaaacaaaatatttttattgtcaattagtgttagatcaagttagtacttgcacatatatatattttacctgcatctactgattagttattctctttttccgcaagaaaaatagtacatctagttattaatgcgctactatactacgccacaacatatacgtgattttttttttggcgatcaaagacatctatgtaa

SEQ ID NO: 10705 - DNA, 733 bp, Arabidopsis thaliana landsberg
ttggaaccctgatgaaggacctcccgcctaaagtaacaattatatttggtctatttatctctcatcttccttaaaaattaaacaaaatggtctagaaaccatttggatagcatagtaaaagatgcataccaaaacgacagattcttgagccgcgatggcgagcaaatcagcacatgaaacagttttaggacatgctttctccacggcagccttcattttgtcgatcacatcgaaacctcgagcggaattagcgttcccaaacgcatctttctccgtcctaaacgatgtggtgttgtctaacaatatcgatgcatcacatccctttttcaaaacaaaatatttttcttcacatttagtaactaaccacattgtttacataaagaaaatcttaacatccgtaaacagttgatcttagattctttgaatgtaaatataaacaagttatactactacatgtatcacactatcgatagcataatcttttcacgtgaatccgaagacagaatatttgaaatccaaaaaatatgagttcactataaacatatgcgagtatactttgacacagaatctgaaactcgagataagaaagcactacaatctatggagacttgtactaataatatcaaattaatgtctttgagaagttgttggtacattttaatatatagcctcttcagtctgcataattcaaccaaaactagtcaaaataagtataattaaacttccaaaaaat

SEQ ID NO: 10706 - DNA, 1373 bp, Arabidopsis thaliana landsberg
cattttgattctgtctgacagattagcccggagctatccggagacactaacccaagattcttcacctattggacggtatacatttccatccaacttcaaaacttgcactatcttttgactaaaacctttttgtttttctgtttttcaagagtttattgatgaaaagctactattttgtgttgttgcagtcggatgcttaccaagcaacaggatgctataacctactatgttctggttttgttcaaacaaacaatcgaatcgcaattggagcggcaatttcgcccatttcatcgtataaaggtggacaattcgatataagcttattgatatggaaggtatatttccttatcagtatatcaaaactattttacatatcataatatgcattggtataattgagatttctctattttataatcacaattaagtttaaattcatactaaatattatttcattccttgtatatttagattctgattgcattggtagggcgtaaataaggcctttaactcgagttttgagtactcaagtgtctaccaaataattattgcacgtcatattttatttaatagaattgtctcctaacaatttaaacccaattaatttagcactaatttagtgtctcccgtgtaaggcttatccatcatattcatatgacttacacggtcaatacagctcactcaacttttatatgtgtttatatgaatttcatctttgataatgtagaattattccaatacgtaacacaacaaactaatcaaaatcccacgtgtaggacccaaagcatggacattggtggctccaattcgggtcgggtacactagtcggatattggcccgtatctctgttcacacacctgagggagcatggaaacatggtccagtttggtggcgagatcgtgaacacacgacctggtggttcacatacttcgactcaaatgggcagtggccattttgccggtgaaggttttggaaaagcgtcttactttaggaatcttcaaatggtagattgggacaatactcttattccgatatctaatcttaaagttcttgcagatcatccgaattgttatgatataagaggaggagtaaaccgtgtttggggtaactttttttattacggaggaccgggtaaaaactcaaaatgtccatagagaaaaaaagaagtggatagtgttgttttgagcttaagtaaatgagattttttgggatttagagctcaggacaatgatgaaagatccataggtttttttttgtttgtaagaaaagaaatgtatcgattgattgatatgttatcaaatgtgtaaatgtagaatatggtgttaagtggaagtaggcgtttatattttttttcctatgtctatctatgtttg

SEQ ID NO: 10707 - DNA, 825 bp, Arabidopsis thaliana landsberg
atggactaattcgacttcatggatcagcaaatctttaacggacgcttcatgaagcttcaaactcacgttctcaaccaaatcttctctcaccgtctcatcagctccaaccaagatcgaaactttaaggagttttagcaagaagctgcaagaagagtagctcattgctctgtttaccttcggcaacaagaaaacaaccgtctcaacgagatctttgtttgaagaagcttctgatgtcaaagactccatagattctggtaaccaccttgcaacatagtatctaagagcttcagcaattacgccattattcatccttccactagatttcacaacacttatcaccctcttgaacatatcaatctctagctcacatacatcttcgacccaccaatctttcggaatcacattctcttctctcttctcccgatgatattcgactatcttatcaggtccagataacttcctgttgaatgtataagaccaagtgatagtctcagggttcaccaagatcttagctgaaacagaatctatgcatctaccaacaagcttcagatcttcagaccaaggaagaagagatcttgttgtctgaagcacaatgattgtgtctttccagcttctgaatatgcctgagttgaggaaaacttcgatcttgtatatgaggttaccgcggtcagcatcttcagtcatttcaagatactcagctgcacatcgcaccgcggttatgttgtaagcattgagcgtaacagtcatcccatagcaaaacttggcacagatctcaaacgctttgtatcctcctggcatgtctagtatagtgatctcatcggtttt

SEQ ID NO: 10708 - DNA, 1335 bp, Arabidopsis thaliana landsberg
tggtccattcaaagttatctataaaaatgattatactctatattttacatttactcgcactgtgcacgcaataccattatgcaaccgggaacagtatatctgtttagagtttaagattctttttcgaagatttcttaaaaaacataaatgaatttcgttttcttttctcgtttttttgtcaccaagactttttattaataaatatgaatatttctaaactttttctctacatctcttgataacttagttttttctttttagtgggcagatatgtgtacaacgtttttgaaagaggcaaagtggtataaaagtggttacaaacctaacttcgaagaatacatgcaaaatggttggatctcaagctcagtccctacaatacttctacacttgttctgtctcttatccgaccaaaccttatacattcttggctcctacaatcactctgtagttcgaagctccgccaccatcctccgtctcgctaacgatctcgccacttcttcggtcagtcatggtttcacaacgtacaatactgtaaataatttattgacagatcaaaggcgattatatctaagcaaactttttcagactaaataaacaaagtcaaccaacatatggggactcacacatgtgtttcaaagttatgctcaaagcggtcctataaatatagttattttaacaggaggaattagcgagaggcgacactatgaaatccgtacaatgtcacatgcatgaaactggagcttcggaggcagagtcacgcgcgtacattcaaggaattatcggtgtggcttgggatgacttaaacatggagaaaaagagttgtaggctacatcaaggtttcctagaagctgcggctaatcttggacgtgtggctcagtgcgtttatcagtacggtgatggccatggctgtcctgacaaggctaagaccgtcaatcatgtccggtccttgctcgtccaccctcttccactcaattaattaattagtttctaataataagtcttaaatcacacaagtattggattagacgctcaaagagttgagagatgcatatgtattctctactcaaattatataatgcatgtaaacatttgttagtttttatcaacatcaagagcttgtaaaatcaagttagatgaatattttgtaaaatatatatatgagcaaataatattcacttgatcagtatatactagtgcttttttaaaaaaaaaaaattcctatatacaggttttaacattttcgaagcaaaaggaaatcagccttaaaatgtaaagccttttgtgaagataaaagaataaattttggaaaaaggaaccaaaaaacctggatttttt

SEQ ID NO: 10709 - DNA, 574 bp, Arabidopsis thaliana landsberg
  unsure (1)..(574): unsure at all n locations
tcttttacaactctgagccattcaaaattcaggaacaaaacaaaaaatttaagaaaatacaaaaaaggtattctacagacggagagatcagacgccgggaaaaaagtcttggcagtcataatctccggtgaaaaaccaaaattgagattaaggcgtacgcagagttcagaaatcgacaagatgagaagaaaaatctggaacaggtgaggatctaggaggacaaggcagagagaaaccgccaatacgtataacatttctgtcgccttgccgtctcggaagaaccccggcggtgagtttagcaagagccgtcgtgtactccaaaagtaactcagtgatgattacaacagatatcatgattaggatgcaccggaataaaaatggccctagaagtttctgaagtttgttatctctttatagaaaattgaatggtggttgaaaatctgaagccagaccactcgagggtttatatagaccataactttaagctccagtggtccagaagttnnnnnnnnnnnnnnnnnnttctttaatttgtggctttatngactaacagccacgtgtcacgcgttgtgga

SEQ ID NO: 10710 - DNA, 1165 bp, Arabidopsis thaliana landsberg
ttgacataggccttgataaatatatttcatatttggtatattctgggccttagttagattatttatatttaacttgatcaaaaagttcaaaatatttaaacttttcaactaggaaatagatttcatagttcatactgagataaattagtgtttcatataaaagatcaattattttaagtcaaagtagtatattgtgttttgttgttgtaagaccaaatgaaaagaaaagcaattagtcctttatatcatgtgttggttagaactttaggttctcgtacaaaagtccatatatgccatatctcaagagtcttgacagcaaatatgatagtaacattatgtaactgcccatagagtcatagacaatagttgaccaaaataatgaattgttcataacgaagaattggggaaagaaacccatctaaattaaccaaaatttgattttatgaaattctaaaacccgaccagcagaagatcgatgctctgtctccaaataatttcttgatgtgtagtaaaacctcatgagccaaattccaaccctaaatagttaaatggctgcataatggtcaccaccgccactaaggcactaacaaccacaccgtatcgaattgtggaaatccgtacggtccatccggtggtcaaaaaaatactttcagtcttaatctcaccgcccattatatattgttgcttatctacaagatttggatcctacataagaactcaacaagtataacaaagttttgctttccagtctattttttgaacttatacgttccttggttcaagaactcatgtgtgtaatttaatattatttgcaaagaaacataattaagaattgaatagtttaacgtatataaacatgaattaagaattgaatagtataacgtatataaacatgaattatgatattatttcattcttttggtcaactttccttgtcgttgtgggtagtgaaagttataaaaaaaacttctatgcaaaataaattaaaatagtaaaaactaattgaaaccccaagaattaaaatttaatggaaaaatatgtgcatagagcaaattaacaatcatcaataataatggaaagagaaatgtagatgaatttttcggcaaggagccaagtcttcaagcgggagaggatggaagaacaaagatgtgatgagatccttgag

SEQ ID NO: 10711 - DNA, 1173 bp, Arabidopsis thaliana landsberg
gccataccgcctatagaaaaaccctgacaacaccgaccatgcatggtccaaattgatttttattattctagtttaaatacgacggaattgggcagcatcgtttagtcttcttcttgattaattaaccttggcggccttggtgcttagtaacggtgatccagagtacgccactgtcaacactaatcttagcatgctccgaatcgtaaaccgctgggaacttgacgaagccgatgtatgtacgtacggtgtgattgttctggtctacttcttctgtttgaaaccctacgtgggtttcctatgtgacatgagaagtaaaaaaaaggcttattcgaggtgcagtattcatttggataagaaattgcttctactataattctatgatagatagaacaagtaaatcttattccaaatgcactgctggtctaataagtaggtggcatttctctaaatcgttgaatcgatcgatcatgtttaaacatacaaatgtttacaactttttcttaatgagtccaccagcactcaacaacttaacaagtacacttcccaattttcagattttaactttcccttgtcacatttcaatcatcttcccgaattgataaactaagaagaacaatcttggttcggtttcaatttggcgaactcgcggtacacttcttcgatgagttgatcatcgtcccatcgatcgcgatagctgtcgccaccaaagaaaactttcttgatggcgacattgtataatcgctctctccaacgttctatggacgtgcaaccacactgttttgcgatccagttgaagtaatcactttgagagatcacaactgcatcctccggtttaaacgtcccgagcattggattccctcgaggatcggttagaaaatgtgtatatctcttaggaatccccaaaccttcaagcttagagtagaaagctatagcctcttccatcatcttatcctctgctggaagcttaacacgacccgacaaaaccgaagcaacccacttgctctggatttcaaacataaagaactggagcccctggattattagaacaaagatcaaaccaagtaatgagccctacaactaaaatctaagtcgctatttgagtatcgggagatttcagacttacctattcatacaaatatattcccatatatataattcattatgttgaacttt

SEQ ID NO: 10712 - DNA, 1329 bp, Arabidopsis thaliana landsberg
gatatttcccaagactacacggtttgactcatctaactatgatcctctcgttgggtggattcatggggctcaaatggttgccttcaatatgcaagtaatagttttaacactatcctctatagtatataagcagagattcttaatagtaaataccaactatgttttgtgtaaatgcagagccatgggaggtatctgtggatgatgcaaggaatgtttaaagccaatggtggatgtggctatgtgaaaaagcctgatgttttgctctccaatggtcctgaaggtgaaatctttgacccttgtagtcaaaacctcccgatcaagacaactcttaaggtttggtctttgtctcagtttctgtttcctgttcttgaaaagtaaggaaacatcttagcttcgtgtctttgtggtgtatgattaggtgaagatctacactggagaaggatggaatatggactttcctttagatcactttgaccgatactctcctcctgatttctacgcaaaggcaagtgttcattcatatgtagaaaacgcaataagaacatggtttaatagccctatgaagaagcttataaaccctaattaggtttcttggctatcaagtcattggatatatctcaaatgtagttgttttcctttcaggtcggaatcgcaggggttccattggacacagcaagttacagaacagaaatagataaagacgaatggtttccgatttgggacaaggagtttgagttcccattacgtgttcctgagttatctcttctgtgtatcacagtcaaagattacgacagtaacactcagaacgatttcgctggccagacatgttttccgttgtcggaggtaaggccaggtattcgtgccgttcggctccacgatcgtgccggagaggtctacaagcacgtgagactgctcatgcggtttgtcttggagcctcgttagcgcttcgtggataatgttcatttcatcactcgtgtcaatgtcggtacacgttttttatgtttgtaatgttaaggtgtcggtatacattagtcagtcatactaagccatacgataataagagatgtgaaaagaaaaaattaaacgtaattaagatcagcaaaattatgaaacgtatgactttaatataaacaatttgtttgaacagttgataaagataattttgtttaagctgttgttatggtccactaaccactaacgccaattgctaaattatggcaattcacactaatgcgaaatttcattatggcaattcacactatgacactaattaaagcaaaactgcttcataatggcaattatcgctaaagcagaaatgtttacaatgcg

SEQ ID NO: 10713 - DNA, 974 bp, Arabidopsis thaliana landsberg
ttccagattagtcatttctgtataattatgattctcattgattaggtcggatatgggttgtttggagttcaaatgtgagacttgcccctgttttcacaagcggtcagatgattacagtatcagtattaatggaaggcatggagaatgaatttttctgttcattcgtttatgcttccaactttgtagaggaaagaaagatattatgggaagatttacgtgctcaccaagcttctcctctgttttttaataaaccatggatgatttatggtgattttattgaaacactaaagattgaagaacactctctgtctcagaataatcctttaatcatggcaggaatgaggaattttcaagatacagttcgatactgctctcttagcaacatgaagtttcatggccctttgtttacatggtgtaataaaagagataatgatgagcttatctgcaacaaactagaccgagttctagttaatgatcagtggattttggattactagcaaacatatggagtttttgaagcaagcggatgctcagatcatcttagatgccgaatacaattgggggctgagaagccacgcactcgtaaacctttcaaatttacaaattttctcgcaaaggatcccgattttttgtagttggttgaggaccattgggggaacacaaatgctctattccattctacggtggcgatgtataagttctcaaaaaaaaattgaaacacttaaaaccaaagataaaagctatgggaaaggataagcttggtgacttgacgacaaaggcaagggaagcttttgcacaactctgccaatgtcaaaaagatactatgacgaatccatcttctggcgccaagcgaaaagaagttgctgcttatgctagatggtcacatgtttctgcactagaaagagaaatttttgaagcagacatcaaagctacaccggataaagattagagatggcaacaataaagtgttccat

SEQ ID NO: 10714 - DNA, 839 bp, Arabidopsis thaliana landsberg
aaacaggcaattcaaggtgtcatacaagtaattttatgtaaaacatgtcatacaagaaggcagattaacaatgaaatcaaaatccaatgctagcgaaggccaaagtcataagaaacaaaatgcaaaagaggtacagaaagatcgcaattcataatctctgagaaactatcatcatatgtaaaattctagtaccaaatctcaactctgctgaagttttaccataaaaaccaaccaaccatagactcaatttatctcagatctgaatgaacgaagaaattcacaatccgaaacgataacataacaaaacaaaaaaaaatcgtaaccctaaaattcagtcaaaaaaacaatccgtctacgttcaaatcccaagttctcagaaacgcgactccaataataaaacaatactcaaaacaaactaacgattgagcgcaaaacaataaaacgaagagagaatcaaaatcgcatcagtcaaaacacgagaaacaaaaaaaaccaggcgatctcgagtttacctcaggagccaataggcataaactccgtctccgacgacgggaagagactgtatccagagcttctcccttatcacgactccaccgctctctctctctctctctctatctttctctctctttgccgcgtatttgtgtggttctcgtgataataacaaattaaaccctactttataatatctcagctaaaaaggaatatattattaagctatttattatggtagtgtcttgttggtgctaagctcgaatctcctgcatctcgacctacagtacttatccacagataaaccgtcaatatttcataaatgacgccatctcaaatctgaaccg

SEQ ID NO: 10715 - DNA, 1305 bp, Arabidopsis thaliana landsberg
  unsure (1)..(1305): unsure at all n locations
agaatttcctcaatgctccacatttcctagctttgcaagctttctctgtatcgcctattgttcggcttcctggaagtgctaaccgttcgagtttctcacagtttgaagcaatggctgctaaactcatatgtgttgcattaacaccaatcagcacaagttcttgcaagtttaaacagtgtttggctacagaaagtaaaccttcatcacctatcctattagtcctccaaccatcaatatgaagcttcctcagcagcttacatctnnnnnnnnnnnnnnnnnnnnnnnnnnntgaacattctggagttttcactatatgcaatgtctcaacatttgagcatttagatatcgcagatagcccaatgtcactaacttggagcctctctaagtgaatttcacttaaagaactcttaccatttgcaatcatctgaagaactttatcccaatcacccaaacaacgaatgattttcagtgttttcagtgttcttgtagtagcaagcaacggttcaaatacctggccattaacgagctccttcaagcaaatagacctgagcgaagaagatgaagcatcatcaggtaggtgaatcaactcagctgcttcatgaattcctcgaagtcgcttcaccgacaattcctccagaagcttacaatgttcgagcatcgcgttcacgcctttagctccgaaattgcaagatccaacagatagcttcttaagatttttacaattcttagcgaagtcttccattcccagatccgtaatctcgcgacaaccacgaagcttaacacgagtcagattcaaacaacgaacagagatcatagccaaagcttcatcgctcaagctaacagacttccgatcacatcggagagcaagcttcgtcaccgaatcgaatcgattgaacatagaggtaaggaaagagaagatctcatccttagcatctagagataaccgatgacgactctgaccgtcgacgagcaaccaccgtttacaaacaagagagcatcgcttccgatctccagctccaagaaactgaaacacatgagctaaacactcatccggcagatctccggtgaaatcccgatccacaacattccccacagccatcgattcacctccagcaacaatcaccggagaccataacctcaaatctaactctcgtccgttcgattccgccgtagacgacggcgcttggcccatcaccaaccgaatggtttcgatttcctcctttctcttcctctccaatttttttttttccctttattttattttttgttgtttttttggtttgaggaattataaagtacaaacag

SEQ ID NO: 10716 - DNA, 733 bp, Arabidopsis thaliana landsberg
tgaaatctttattcaaatttaaacgccaacaaaaacgatataaagacgggtactataactccctaacgaatacgagatatatatcaccagatatagacccaactaaatatctttattttcctcaccggagatctatgctcctttaattctctctcatttgaagcccaccgacggccgccgctctccaagtcgatatgtgtcaatcagaaggaacctagggtttcaactgatgggcctctcccaatctggcccgtgaagacccataaagcccattccgtttgatggtggcccaaaccattacccactaaaggccaggtctgttttaatctctcctttgtcgaacctttgttttaaacgtagctcactaaaaccaattgattggggatttcttttggaacgttatgtgacttcgttgctttggttgtacaagaactctctgcctttagagtcagctaggtttctgatcatgtgttttttaccttcacggcaaaaggttctatgtgcttaatctcttgttttgtgagaaccttacttaaagatcatggttttatttgctggaaaaagattggcattatgctcccacctctttgtagtggtgagtaccaatgtttatccaaccccttttgcccattagttgtgtgtcttcgctacctcaaggatttctatcttattacacacttgaaactcatgtttgaatttcccatccggaggtataccgactataaactttgtg

SEQ ID NO: 10717 - DNA, 514 bp, Arabidopsis thaliana landsberg
tttgatttttacgaaaaatatgggttctgaagagggcaaggcaagagacaagaatattgtgatcaattggaatgtgttatttttacaagtaactcgttcatctgagtaatctgatgcaagagttgagctattctctgcagaaacacacaaataagaaacttgttagtaacaataggtgtttcattgacatttcgtcgaacacttggtaggaattataaaaaaaacagagcaagaatgagaatacaaacctcgtctctctctttgattgtatctctgagatgagcagcgatgatttcacctttttcaagtcgtcggcgagttcggttacgcttccaccaccaaaggaatatgaccataaccgaataaaatgaccggagagtctttgagaaggaacagagactatttctggagaagcaggtaaccaaattctggaaatttgacattactcgagcgagaagaatcttccaccaaccttggataatatcaatctcaattacggatttccacggagatt

SEQ ID NO: 10718 - DNA, 1169 bp, Arabidopsis thaliana landsberg
tgaatctctacattgacctctgtttttctcacaacgttaactatcatgtcctctgtaccaactccaccaactgtggcttgtctatgctcatcacaaaccctacgacaatgacagctttcaacctcattcagcagcatcatctccgtagctctaaaccttgtcaaagccgtttctggtgtagtcctcctcgtgccggcgagatcccagactttgacgccttctttgaagtcaaactgtctattgaccatggctatttggtcctccagtgtttcacgcttggacgatttatcgctaattcttgacctcacatgtaccatcatgcctcaccgcttgtggctcaaagctctcaagattgtattatcgattacccttgtttatccttttatcttttttatgttggcattggggaatgccttctttgttgtaaactaaactttgggatctctgaatcccttcgtctttgtcttgatctttgggtttttacttgatggaatgtaacaagttgttgtccaaaaaaaaaggatttaaggaatcaaaatcttctaatttatttgccaatagagatttttaaggtatatgctcgatttgttatattttgtaaatataattactgaattttgtatcgtagagatctatatttattgaatacggttactgcaaatttggaggtgctcctcatattttctgatttctttagcaggtttcttaaaataattggaatgttggttgatttatttagttgtatacttatttactatttagtaatcgcaagtaattagattagttagttgtagaaatatctttaaatgataattaagatctttggcaaatatttatgtaagaggttcaggaaataactgcaaacaacattaatatctgaacaataaacaattaatgataaactaaacggatcgactctaggatccgtgtccaggaccgtacctcgtctttatccgacctaaagcccaggatccaaatttgtaattgtctaatgtaaccttttatgattctttttgtttattctttaaatccaatagtatcaatggcattctatataatattgtactctttataaaattatttatttttaagtgattctcaattaatagtatagataatcaattacttattttcgtttataaacttaataaaataggtaatttcatttt

SEQ ID NO: 10719 - DNA, 1693 bp, Arabidopsis thaliana landsberg
taaccgcaaccgggtaagctaattcactttcggtttagtttcatttttgttcacattttcctcttttgaagaatcttgagttagttgtgtttgcttgtttttatcgagcagagcggtagtgacattcggtttaaacgctttgcgtgggagacacaaactccgcggaaaggcgtggggtggtgcatgggatcacataaacactcaagatttcttaaactacacagtctcgaagggttacgttattgattcttgggaattcggtaacaacaaacatttaaaaagtcgccttcttttactcggtcttttttcttagctttccttgttctcggtataggaaacgagctgagtggaagcggagttggtgcgagcgtgagcgcagagctttacgggaaagacttgattgtacttaaagatgtaatcaacaaagtttataaaaattcttggttacacaagcctatacttgtcgctcctggagggttctatgaacaacaatggtacaccaaacttcttgaaatttccggtcctagtgttgtcgacgttgtgactcatcatatatacaatcttggttcaggtctggttttgtataatataatcaaaataaactcaaaaccattacttatatatatcatatctgaggaatcatctgccttctctgtttgagtcttgcaggaaatgatcccgcgctggtgaagaagataatggatccgagttatttaagccaggtatcaaaaacattcaaggacgtgaaccagacgattcaagaacatggaccgtgggcttctccttgggttggagaatctggtggagcttacaatagtggtggccgtcatgtttctgacacattcatagatagcttctggtaaaacaaaacaaatatccatttcggatatcttgattttagcccctgatttctattactgaatgaactaaaagaggcatctttggatccaatctttttgaaggtatctagatcagcttggaatgtcagcgagacacaacactaaagtttactgcagacagactttggttggagggttttacggcttgctcgaaaagggaacgtttgttccaaatcctgattactataggtgagagtcccaaacaaaatccggactttgaaattttatggttgattgatcttgaagttttatctgactttttccgccaatctttctctttcggtcgggtttcgggacagcgcgctgctttggcatcgtttaatgggaaaaggggttcttgtggtgcagacagatggaccgccacagctacgggtttacgcacattgttcaaaaggaagagtgagttgctcatatcatcttttatatcgcagtttccaaacgtctttttcggttagagtttgctttaaatgctttggttttttcttggttttaggccggtgtgacattgctactgataaatctaagcaatcaatcggattttacggttagtgtcagcaatggcataaacgtggttttgaatgcggaatcaaggaagaagaagtcattgttggatactttaaaaagaccattttcttggattggaagcaaagcttctgatggatatttgaatagagaagagtatcatctgacaccagaaaacggcgtgttgcgcagcaaaacaatggtcttgaatggtaaatcgttaaaaccgacggcaacaggagatatcccgagccttgaacgggtcttccgta

SEQ ID NO: 10720 - DNA, 677 bp, Arabidopsis thaliana landsberg
aaggtatataactacaagaaaacacggttataacgactatacatggcgactgtgtatgtagtcgtcaaatttagcgacaaagtaaggactatttaacgactgttttacgactaaactaaaaacgacgttatatagtcgctaaatgacgacactaacacatagttgttaaataacgactacagtaacgactataagtaagtcggggaaacaatagtcgcatataagtcgttaaaattgtaaatataatgaattaatatttattatgatattcagactattagttttgtaattatcaaaatacaagtaaacattcaagcagattttattttaaagctttattttgaaaatgctctctttaaaatattgtacaatatatttatatatatatatatatatatatagattaattcactctaattaattaattaaaaaggaatatatagtgattgaataatttttttggtatgaaatgttaatcacatatatattctttatattggtatacataaaaatcaaattttggatactagcaaatattatggaccaaagttatgaagacctatgatttttaaaattttaaaatattgtgcgactgattaccgacttatttgcgactataatcaagaatattgggcttaattcaaaccctggaaaattttcgctacccaaacaatatt

SEQ ID NO: 10721 - DNA, 1070 bp, Arabidopsis thaliana landsberg
ggcaaagctttcgctttcttatttatggaattttctttcattctttagtttagtctctctctcttttccttttttgtcaattcagagacagagaggagagagagaccaagaaaaggagacttttgttgatcatgggacaagaaagacctaacgacgaagagagacccgagtcacgtgatcttggggtctacggatgttcaccgcctcattcgccgcgtctcggtccgaccaggttctacgtctttgctggagacccgaatccaaaacaaacgataaagcgatgcaagaggaagagaatccaagcttgtaacgatcaaagaacggctaaaacagccattggcgttatggcgattttgggtttcttttgcctcgttaattggttcatgctctctcgccttcacgaaggtcgggtctggcttcgaagaggactctctgagaacccaaaacatgtttctgcacaggtccaatgatcgtaatcttcattgacatgtttccttgattactgacgtttcttgcgctacactcattttcacatacaacaaaaaaagctttttatttataaaaacagagaagataagaaaaatgatatcttagttgaaataaaatattgtgttgcataactgaattattatatggtggtaattgactatatgaagagtagtgttttgtgcttaaagtttcatttgatctaaactttttgttgtgtgaatcagaatgaagagcgtaaaaagtttgaaaaacagaagatgaaatataatggaacatatggtagaatgttgagtttggctactgatgctttggcagaggtaaatatattcttcacaaaccaatcttatccttcctaattctcagtaacattgttttgttctttttaatagggaatgcgtgataaccgttattgtaatggttttgattttgagcagaacaaacttgagaccaaagacttatggcaggagccgaaggaacaagcttcggcgtggaagccttgtgcggatcaaagatcttagactcctgacggtctcattcaatctctctctttataaaattaggttaaagcttgatcctatgac

SEQ ID NO: 10722 - DNA, 1481 bp, Arabidopsis thaliana landsberg
cctatatagaccttatgcactcatacgcaggcacacgtaaatgttcatgattacaacacatataacgcaaggatacacactgtaaccgaacatagatgtatgtatagagtgtggaatcagttatgaagaccaaagccggcagggatcatactgatgatgctgaggagctcggtgagactattgccgatcatggctaaccgtgagacgaggttgccaacggaacgggaggttggcgttgcatgtggagagagcggtcgtgacgacgacccgacaatcagagagaagtgtggaaagtaacatctgaattgagtccgtaggaagcgagaataatccggcagcattcgtggtcgctgttgaaacgaccctgttttgccttccgcactggagctcaactcctgcatctgttagtttgcagtattagaattagtaaatatatatatacgttgagaaatttattaaactgtatattaattatttcgtgaatctttatcttagtccgtatctgtaggttaactcatacttccatttgaatttataactttgagtgtgtaggaacaatagaagaaaaaaattcgtgcatttttagaattctaagcaattgttttgtataatatcatttgtacgattgtatatttgacataatctacaacaaaacccgcctggttaacagaacctaagcaatttttgttgggctggttttgcatgattgatcaaaggtgaaagtagaagaatggaaagcttactagcgaaagcaggagtggaagtgccactgggagcaccattgagagagcaaaagacaaccccattgatattgacgagattgagaataccccctacaagaccaccaaccagaccaccgagacccccaacaagacccccaataagaccaccaagaccaccactaccaccaagaccaagctgagcctcagccattggagacaccacaacgagacacaccaagatcaatgagacggtcatgtgtttgttctttaacattgccatgcttgagttaaaagtaaatgctttttttttttttttggtgtgtgtgtttgtgttgcttttggttttggatgtgataaagtgtcttcccccatgcagctctatttatagaagaagttttattgatcttgcccctcctatttattttgcacttttctatatatttaaagtcgctaataatgcgtttactttattctacaatttgaattgtccctaggtttgatcgtaaacccgggtcctaaaatgtagtttcaactgtgtatgattctaacattatataatttgtccaataatatccatgcaactttttttttgaagaaatatcatacgattagtcgtttattaataaaaaccaatgtatacctacatcatctcacacgtttaattgctattttcggtaagctataatctttgaaatttagtactgcatgcacgatgtggtgatattaacttcgacaactcaacgagtatgtgtttagata

SEQ ID NO: 10723 - DNA, 1127 bp, Arabidopsis thaliana landsberg
ctaggagtgtttgtcagacatctcatgcttcttcgcatcaggtttagttacagtcttttagcttctctgtaatatcttttggcgtgtggtctcatgttccatacattattcctattttgataagcagagtggtcctgattatcgatcagatgagtcaaggcggatacactgtacaaaatgtggtaattcacacatatggatatgtaccaataggacaaaagcaaaggcaagatggtgccaggtgatgaatccaaccaactcagaaacagttaaagaatattgttcttgcattttcgttatttcaaacctctcttacagataatctaatttgttaaatgtaggattgtggccaatatcatcaagcaaaagatggagatggatgggtcgaactcaaagggacattacccttcgagagagcacataaggtataaaaaagcttctttctcgccttgtcaaatgttataatgaatttggttttgcctcagtatcctcagctcaatcactttctttttcatgtccattaagattgaaataccgcgtgcttttgtttgcgcggagagcaaaatatttgacgtctcagaatgggccatttgtcaggtcagttctcttaccggttcctctgcggattacttaaatgcgaagatgacttgagatacattaacatgttttgattggattaaatagggaatggcttgtagaccaaacacgcatagaccaagctttcatgtgaacatggttgggttagaaaagacaacacagagatcaaactcaagtaggttcccatgggatctagatgtggagatgatggatgaggacgaagaagagtttgagctatggcttcaacaagctcttgcttcaggtctcttctgcgaaacctcaaaacgtagaaaaagctggagccctttcaagttgggccagatgaaaagcaagaaacagtggcgaagaacttccacttgattcaaatttgatcgaaaccataaacaaaattttcatatagctcaccacggtgaatccaaagccttgaagatcataatttttttaggggagtctttctctgtaaatagcatctgtcgattgttcttccaaaagaataaaaaaagaatctttggatttttcattgtggtaaa

SEQ ID NO: 10724 - DNA, 1256 bp, Arabidopsis thaliana landsberg
tacttccagctaaacccttaatgttcacaggaaggatctgtttatcaaacaacaaacaaagcaagcaaaggtagagttcaataagtttttcgcttttcggttcttacaacacttagttctaacttctaaccaactcattacctcagacataatgagcccggtattgggtcccattcccaatgagaaaaagacaaccattgcctataacgattcaacagagttaaggcacaaataatcattcattgcattctagaaagttccgctatataactaacttaccacaactccaactactgacaatatgctcagccaactgtacatgtctgaatcaggagacacaaattcctaaaagaagagatgtaaaactcagaaagtcgaatcttggatttgttgcagaagatgaaatgatgtgtatggaagttcaagattttaaaaagtaccttaagatagaaagcagctgcaacaattacaaggctaatcgtcatcccaaccgaagagatctggaaaatattttccatttgcattagttaatcttggatatgtcttaaatctttctgtagagggaagtcggaaagatatgaaagtaatgagttaatactcacagtaagcagaagccgacgacctgctttgtccaccaaccaagtggatattgcagtcgctactacctgaatagccccgaccccaaatgttgctgcgttactcgatgtaactcctaaacatgaaaacacggaaaatgaaaaattaaagtaataatatgaaacaagaagcttcaggtgttagaaaaaccctacctgcagattcaaatattgtactggaatagaataggacaccattaattccaccaagttgttgaagtacaagcaaccctataccaacctgttacacacacacacacaacaaaaaagaagttttaagataatgtttcttatgatagacaaagtatattccaaggaaagatattcaatatttgtaccataagtgggaaatagtatctcctgcgtttgagatctacaaaccgaactgtatttcgctttgtagatgatgccacagatctctgcagatttgcagaaaagatgaaaaattagcgtttgaaaaccagtcttcatgtaactcttggaaggaaagattttaagtggtagtgttaccttgatttcattaacttcagcggtaatatcagtctcaaatcctcgaagaacttgatatgaagtttcaaattcatctgtcatacccatttttggctacattttaacgaaatc

SEQ ID NO: 10725 - DNA, 807 bp, Arabidopsis thaliana landsberg
gttccttccacgaccaatctacgtagtctggcggtttgagcgttaaaaagtctctgaagtatcgaactgtctctgcttttatttgctgctgatatgatgcaatatgtacatcatcacacttaatactcaaatctaatatattaatactcaaatctaagacttacttttgaaaacaaaagaatatcttgtcaaattgacactttttaatgttcaaaagagatagtaagaaatttcgcctaaccaagaaaacaataaaaacaaagaatttcagtctcaatactatatatatatatttctgttattcacttatatatttggatgtgatagaatacttttttaagaacacacagatcttatcttcaccgatatattagctgatacattttttacattcctttttattattattattcttatttattttctattcacatgtacttacaaacaaaaacttaaagactttgcaatttgcgttacgaatatttttcgtcaggctgtaatttgaaaagtcttctagatgatttcaagtctctgcttaatgtgccaactaggctctatgtcactactttgtgttgtctctaattctcattcttcttgacaagaccaaacatatcactaatgatgaagagatgactaatatttgtttatatatttgcttgtaatgaagacatctagtatagcagagcaccatataatttagtgatagcattctattaatttgttcttttttacagccaaagaagaagagtaaaagaaacatgtttaagattcagccttaaacaagtgaagaaaaaaataaaaagaaag

SEQ ID NO: 10726 - DNA, 1190 bp, Arabidopsis thaliana landsberg
  unsure (1)..(1190): unsure at all n locations
tcaactctctcgcaaggcgatggaacgagttagtatgtcatctgtacctgagtgtttgctaacatccctagagtttgttgaattcaaagcaccaatttgcggacttggtccagagatgatgctagtatggtacttcctaaagaattctcccaccctcaagaaactcactctacctttgaagtctcattcaaccaaagatgactttttcaagaaactcctcgaaatcccgagatgctctaccgaatgtgaaatcgtcatcctctgatttggtaaaagagcagagagaacattgtgaggtttcgtggttttatgtaaagacgatgtgaacatgcattgtagtttcatggttggtttggctttggatttcatttgcgtcttaggagtaaaatgaatgcaactatttaggtacttggctggagatatcagttgttcttagaagcaatttgtatcttttggtgattttgtgtaaagccaatgtggatcgtcgtagcagtttcattactacttggtctaatgatattatgatagcttaattattttgctcattcgatagtgaattttctatggcacttcatggatctatctatatctgttcaattgttataaaactctaagcaatgtcaagctcttcaagggaaaaccttctagatgattccaagtctctgcttaatgtgccaactagcctctacgtcactactttgtgtcgtctccaattctcatccttcttgacaagaccaaacgtatcactaatgttggagagatgaccaatgtttgttcatacatttgtttgtaatgaagacatatagcacaacaccatataacatatgatccattctattaattttgctatttttacagccgaagaagaagagtataagaaacatgtttaagattcagccttacacaagtgtagcagaagcaaaaaagaaaggctatcaacgaatgggaactttgatccaaccattggcaaaagcaatggctaagatgacgaatggcgttgacataccgaagatgataatgtaaggaagaggcgtcttcatcggattctctccttctctttctccaacgctttgccaatacctataaagttgtaatgcaaatctcatccataaccatntcttcagtcacaatattgcatgtttatgaaaaatgtgcatgctaagagtttaagattcttttgactaacttac

SEQ ID NO: 10727 - DNA, 1580 bp, Arabidopsis thaliana landsberg
atatatcaatatgcaatttcaatccactaaatttataccaatacaaagataaccaaacagcaacaaaataaagttacgaaatctattcgtcaaattttctatgcatgaaagattacaaatctacatctaaatctatgagtctccctcttaacccaaaagaattgaaattcaaatacatataagatttgccacgggacaaaaactaacgacttatttttattgcgtcagcatttcatcatcacataaacccaaacccaccaacttgccccgaatacccaaacgagtcaacaccataacccttttgagctaactcgcccgagttaataaacccgtgactgctctcgacttcctcctccgtcttcaggtagccacagttgtactcgagattaggaacaacatgactcattccgagttccggtaccgagttattatgctcaacattaccggcaaaactagcccaatcgaagttagaagtatccgcaagaccgtggaacccggttttctgttcggttaagtccggtctgagcgacgagatgcggtttgggttagaaaactggaaatttctgttgtcgatctcttgatgaaacgaatcaagaacgtcttcaaagtgagaagaagacgacgtcgtggacgaagtaccgttgttgctgaattctctagcattcgcgattccattatcgtaaacttgtttttgtgcacttgattgcttcttgtatattcgacatagaacccaatcatccaactaaagaaaattaacaagaatattaattataggtcattcaaaacactacaagaagaaaatataagatatagtatttattattgtttagattttatttgttaccttagtgcttccgtttctacgagaaggttcaatgagacgatactcatgcatgatccaattggttttagtacctttaggagcttttccgatgtaaaacaccaaagcttttttaataccaactctttgtccttccgtcgagattattttatccgtacccgtagctttccaataacccgatccggcaacccggttaggtcttgacccgtttggatattttctatccctaggactaaaaaaataccattctttttctccaaataatgctttatctataaatcacaaaagaagaaaaaccaagaaaattatgaatctctgttaagaaaaataaacattttttgagaagggtttcaattagtatatacttacttggtaaaacccatggatcgaatttgtaaagatctatttcggcgatgagctgaagagagaaatcgtaaccagctgcttttctacagagatattgaaccataagctcttcatcggtcgggtaaaatcggaaacccggtggtaaactcaattgcgttaacgggtcagtttcttggatacccatatttttttctttctttcttatttttgacaataatgtttgggtctcgtgctacttatatatggacgcagtgtataggtgaatccaccgccgctgattaacgtgtgtactgaatatgggacccatttttgtgtttatctataaacacttttgaattctgacacgtgtgtcagttagatcgtcgtgatttat

SEQ ID NO: 10728 - DNA, 818 bp, Arabidopsis thaliana landsberg
ctattttttgctttaatgttttttcacacgttcattcgaactataatttgacaacaaattataaccaaaaaagaaattgagaagaaaaaaacaaacgaagagttttatgttcaaaacaataaccacttaataaatcatataatggagcatgtactgttcttaaagctttgtacaacaaacaactggatttttaacttttcaacatataaccatcactctaaaacttcttataacaaaacaaatgaaaaatctgaggtcaaaaataataaatgaaagaatagttgagaattacagctccacaacaaagatgaatttacactttttcccatcttctttccttttggttcaggaaggcccctactcttccacctcaaaactaaaacaatcacagaggaagagagcttttcagaatctgagcttctcaactttcaggaacttagtgcaagaatacaaatgctggattttcaagaagttcttctgctggtttgattcctacaaaatccttctcttccatcgaacttgaaatatcatcgattgagaaaggaatgctgtcaaaattagtagtaaaacagttagttgtatctcatacactccataaaacaataacttgacgtaaaggatggatcttagatcatttccaatccgacacgttaaaacttcttataagattataagtagtttgtttatcataacagaattttcacctggaatcatcatccaacaagaaggaatcactgtctgcatcattggattcctctgtcatgagtgtccgcatactcgatatcacctgcaataaatatttgaattttgttcagcat

SEQ ID NO: 10729 - DNA, 1608 bp, Arabidopsis thaliana landsberg
catgctttaagctttgatgaagcatggcaccacaaggaagagttttctgttcatggcagcatttactggtgttctcagtggtttctttccgcttttatttgggcttggtttagacccataaagagcttcttgctctgttatgagttgtccatgaagtttcttcatatcttgagatgaaagtaacaatgtcaaattgccaatgatgcttttggctcatagtgaccttggttcctagtaaaaaacagttttccttactctctgtctctgtttttcatgctctttctcttcccatacagtcttgtactgaccaagcatcgataagactcggacctgaaatatttacgtgcttttgtgtaaagatgctgatttgataattgtgtagaacagatcattgatcagtaaaaaaccacttaccccatcatataagaattcatttcctctttcattctcccaagcagtgactttggcggtcaaagcttccaccatccctgcatcaatagcagcagaaagcaatagacaaaaaagatcataagttatgagtttgtaggtttctgtaatataatctaaagagcaagaatgctaccaggaagtttattgacaagtaaacgggctttttctgcacgcttcaatgtaagatgagctcctcttccagcgttgtaccggttatcatcctgcgaagccaacgatgtgagaacaaaacaaaaaaaagattgaggcaaaggaatagatttagatttaaatgtctaacccgattgtactcttccagccaagactcttcttcacaagctgacatccatttctccactttttcaagaatctccttcctgcttgaagcttcctctttgacctttgcaatctcggaatcaatttgctctaacaactgctcaggatccttgacacctaaaagatgagtggaaacatgttattattagcatgttcatgttatctaccagtataatgagcataacatttctggagtttgtgcacatcatattatgtaaagaataagctgttcctaataatggcttaccagattctatagcttcaactgaaaagttttctgatttaagacttcggtggccatgtgcatcttccttgatatttcctcaagctcaagcttcttcctcagtatcacctctttgatcttagttattttgatcttgctaagcctaatgacttcatcctcaacctgtaaaacaaactcacattataaaaaagattgttcctatactattataaacggatagactaaacaatacagggagaaaacacagaaaggtttggtcctgtgcactcacgcgtttaatggaagcaacagaaagtatgttggcctcagttatttcagactcagtcaaagcgatgctacatgtgacattgtgaaatatcttttgctcttccgcaggcgtgtccagcagattccagagctccaacaaggacactgcaagatcttgaacctagaaaaacaaagtgatgaaagtcagaaaccataatcacgcagaaaaacttgcactacattacaaagaagagctcagacttgtaaccttctgcattcgcttgaacttggcctctcgtaaattcacaatcatcatatccaacttatcaagagta

SEQ ID NO: 10730 - DNA, 1636 bp, Arabidopsis thaliana landsberg
tgtttctcagttgatctgttgtctatcattacgatcctttttttattttcttttgtttggatttctttttgtaacttatctcttacttttcagggtgctgttggtaagagaaggtctaggttccaaggaattcaatttcctgtaacaacaaacattgctcgtaaagcttctactgctgctccactcgatttccgcggtagagcttttaatggtggaaggatgactagtgccaatcagtcaaggtctagaatgctggataactctctgacctgtttgttaatctgaagtccttatagtatcttcgattgtgtctgattcaagaagcttcttttctaagctcctggtcactagatgactgcatagctatacagatttatgtagttgagtttatgatgatgcttgaaggagtcagttcatattttgggattggagatttgggttagaagaaaacaattcagaacgttaaggttgagcataaactttgctgatgagtggctagggtgtttttctcaagactgggttggcctttgatatgaccttgggtggttatggctaggttgagcataaactttgcttttggttgaagttggtgtttttagttattgtcagagtaacaagtcaagcaatctgatactgtgcttggcctttgattttacctcagtggattcatgaaactcatttgcattcattcagtctcctaggtgttatgtttcatcttcttgctacatcctgaagattatagcttcctctctgaggttgtgacactgtcttggtaaatacctgttactgggaaaagagtcagactcaggatcttcgtcaatatacattaattgttacttcgttgtacttcgggtcatctctcgagctactctcttagtcactgataagttgctttgtcggaacaaatgccatcttttggtctgttgaccaggagatctgtcaagagcatgcactttttctgtctagtttaattggaatttggagttgtgtcagtgtcttggcgcttttaacactggaagtgaagtgttgcatccttataatgccatccttctttgttacttggataactggatttcgcttagatccttctatgtatgaagaggttcagcttttgttgctaacaactcgataacagatcattttatctgttgatgccagtaccgtctgtacgtcttttctcggttcctcagcacttcttctttgtttttttgtgcaggcttattgctccaccagttcaaaatatatctgtacaggctagagtcaacgcaaaggtaacttactcatgattatctgttaggttgcattagactagcttcttagtatctctcccttggacgagtattcgttttgatatgtttatgggggaccataagatgtgcattttagccttctgctgttctgcatccgtagctatatctgcctgttgatggtagggagtatctgaaaggtttatgaattgaatgtggttgtaaatctttataggtttgtaaatcccagaccatggaatgtgataggggcttgatctggtaaatgcttggtgtgataactgaatcgaatatcactatatccaataactttatactgaatgtttggagggctaataacaattgatcttcttaatctgcagaggcatgag

SEQ ID NO: 10731 - DNA, 1122 bp, Arabidopsis thaliana landsberg
tttattattccttttatcatattaaatcatgtattagggaaacaatttcatgatagaatttataaatattgaagaatgtagtatattatagaattcccaaaaatttatccaaccacacaaatttttttttatgtccattctggccgtttttatttatttattaatattaaatatggtgaccgtttttaagtttgagagagaaaataaagagtaaacaatgaaagtagaaaaacaagaaaaactacgactaaaagaactacgaatacgagataacacgataagaaaacaaaacgaagcaactaacaaaggtctcaagaggaaacaccgattccgaactgtaaagctctgtcatttttttgtctaggttttatttcattttccctgattccgcagttaccattcaaaagcctcgatggaatggtaggattaaagaaaaacaaaataggaagtagaagctttaggtgaaagttaggtaataaagaatcttgcttgttgtatgcttcttgtcttcttaacttatttggcaattctgatgcatacattctacttgaacacacataaactaacaaaaataaccataacactaatttttaaagattctacaaccactaaagatcttagcttccattcaactccaagcttcgtcttttttttcttcttcctagatctcttacgcaactaatgtccatgcattccccctatatatacacgagctagcagaagtttaacttgaatatatcaaaaccgagttcaattcactaaaccaatgaaaatgcaagcagttcttgttatcttggttttctccggtttactttcggttaagacagcgttagcagcacgacatgtgatcggcgggagccaaggctgggaacaatccgttgattttgattcttggtcttctgatcaatctttcaaagtcggcgaccaaatcggtacgtttctctctaccctcaatttcataatcaaatcgaccggtttaatactaaccaatcttttttgtttcttgttagtttttaagtattcagaactacacagcgttgtggagctaggaagtgaaacagcatacaagagttgtgacctgggaacatcagttaattccttaagctctggaaacgacgtcgt

SEQ ID NO: 10732 - DNA, 578 bp, Arabidopsis thaliana landsberg
ttaggggctagtttaaaagagtttcctttttgtggtaaagaaagagaaagttatgtgccttgttataacataactgggaatttgcttgctgggcttcaagagggtgaggagttagatcgacattgcgagtttgaaagagagaaggaaagatgtgtagttcgtcctccgagagattataaaataccacttaggtggccacttggtagagatatcatatggagtgggaacgtgaagattaccaaagaccagtttctttcttcaggaactgtgacaacgaggtcttttgacatacattttcttcaaattcagttttccccatgtatatggtttctgttctgtgatgtcttatttttcattgtcatcattattaggttaatgttgcttgaagagaatcaaataacctttcactcggaggacggcctggtctttgatggggtcaaagactatgctcgtcaaattgctgagatgataggtttaggaagtgatactgaatttgctcaagcgggtgtaagtattcttaatcttattatcttacacatcaaaattttcagttccagcttctgagatttcttctgatg

SEQ ID NO: 10733 - DNA, 490 bp, Arabidopsis thaliana landsberg
ttattgaatatatgcccttaaaatatgcatcatgggcgatattatttttgtgtgtgcatattatgacaaaataaaaaaaatgtgacaaggaaatatattaaagtccaaagtggaatttaaatttgaactttataagttgaaagggaaagaaaacataaaagaaaaaaagggaaaggaactaattgggctaattctcgcagtcccggcccattaaccaccttctcgcgcgcggccactttttcttcacgttcctgcgctgaccggtcgcttacaggatgggcccacttgccatttgctcagcctcgcactcgtttgtaccatttgtctctgatacgtgggccgcatcgtcagtcaccgttcccccgttcacacgcgcttggtcactgaccggtgggccatgcatgtcagctacgcctctttcaccacattcccaacagaacgcttgctaaattccgcggggtgctcgccggtaaccttcgactccgttacc

SEQ ID NO: 10734 - DNA, 1000 bp, Arabidopsis thaliana landsberg
atatattcaatcaaaagaaaaatggttttgcgatgacttactttttttttttttttttcatacagaagatgaatactatttaacatgagtattcaaaaaatcaaaagtaaaactagtatcatcaaatatttccgttaaattagtaaacatatttctaccggtaacaattaggataagaattctagaattttggttctgtggcaatcacacaaatttccgagtttaatagatttagaattggtgtttttccttgcgatttactggtatgcgctcttgagcaatcgtatacaattagagtagtaatattgttttacttttctgtaaattgctttaatccgttctcatttctctttataacttctgtcaaaaatttaaaatggtataaaatttaacattttaccaaaaaaagaagagattgtaaaaaagaatacagagatttgttttattttatcctttaatcagtcattttataaataataaatttcatttcaagtagtacattaatttttaaattttttatagatttaatatacagatcattctagtatacacaaaaattaggatctatattattatttaaaaaaaaaagcagctcaagtcgatgaactaaatatgggcaaaatcgtcattgaactaaacattcatagtttcagcagaaaccaagaaaaccagcagctacaacgtcctctgttttcaaactccaaaggcacggcactttttgtctgctttctcttcttttataaacaaaacccactttgcttcacttctcattcatcatcaacaaacacaaaatcgaaaccaaatcacttaaacaagaaagaaacaaagagaaatgagctctgcaagcaaaacatggatggttgctgcaagcatcggagccgttgaggcattgaaagaccaactaggggtgtgtcgttggaactacgtgatcccgatctgcgaatcagtatctacgcaacaacttaagatccgtgtcgcaagctaagaaagctctcttcct

SEQ ID NO: 10735 - DNA, 1369 bp, Arabidopsis thaliana landsberg
agttgtcaacaaaaatatgagaatcgtaattccacttaactatgagtccatggatttgcttaccaagacctaacccagaagcacgtatacaacaagtaagaacagtagcgaaagtgaactcatttggtttcccatctgatctcatcatctctgcaaaaacagtgagagcctcagaacaatgcccagtttgagaataacgcgagatcatagcagtccaggaaacgacattcttgtcaggcatttcgtcgagcactttccgtgcatcctctaaacaatcacatttaccatagaagataagcagacgagttcggaggtaagtggcgggtaaataacgggttttgatcatgtgggcatgaactctttgaccatctctaagagcccttttgtccaaacacgcattcaacaaagcatcgtaaccatggaaccccatctcgggacctaacatcaccatctccagtaaagcttcttgaagacgaccgttggagcataattgagagattggaagaatggtttgaagaacatagtttgttggagacgacgagaaagatcgatgaattagtctcatcaagttaaacatttgacgatctcaaatccaacaaattttttaatggttacaacagaaagaaacaaaagtaacttttatgcaaaagtcttcaaataatatgaatagatgtaacaacatctaacatacttgtagtctttaggtaaagcataacattacatagctaaacagaagttgcattaagacctaccagaagagcatctctagttttaaacaggtcaaagaacaaatagccatctcatgctgctcgtagcctttgtatgaaataaacgtctgttgggacttgtagcctctgaagtagacggaatctgtgcacgaatgaaaacatttacgacaaaccagtcgactgttatgactgttgcggaaaacttccaccgttccgtatacgtagttgaatctggaaccaggctgcatataaacagttgacccgaataagcattcacggtggacagtagtgcagcatttgttgcatgtgtagaaccattttgttgtatctagttttttctcacacacttcgcaccagtactttctccgtggcataaggtaagaggatgctcatcgaatttgtagtgtacttcgtttggaatggtagcacatgtataacacatagcaaaatcgcatttagtacactttatatgaggttgccaacatgtcccctgacaagcattacagaggatctcatctgtgtcgctataggatgtggagatgacaacgggatgttcatgacttttatgtgtgaaatactcgggaaccaaaatgcagctaacatctatattgagatttgtgcggacttggcaaatcttttct

SEQ ID NO: 10736 - DNA, 1145 bp, Arabidopsis thaliana landsberg
agcaagccaatactctttgtgtttttgttacaagcataattttggtttcttttgattaggagtgaaggagttgatatgaatcgaataatggataataatcaaaacgtatatttctcataatctcatgataatccttaaaaacttacttaatagaatttattcactgtctgtacctacaggcttacatggagaggttgatactaccagactagctgggacggaggaaaattcgagatttattgtgcaggtaatacaccagattatgtttctcatataaccaaagtcatctgtaatttttctcatctttagatcaggcttgaggactaaccctaagacaaaactgattctataaacttagagggtaatattacagaaaattgtatacagttgggttgaattaccatctcttttcaaagttggaactttttttcctttctcttgcataaaaatttgtggcactcattgcaccaatggtaactatctggtgaaagatttaaacttttaaggcaaactaaaaagcaaagtttaaagaaaaaaggtttagccacagtggcaataatatagtgttttgattcattccttttcgaaaaaagaaaaacttttgaaataaaaagatatagttgtaaagcgtatataccaataccatcatactagaaggccaagtcatcttacaaaacctccactagttaaatttttgtatgtatgtcatctagaaaagcaagacctaatatccatatatagatggctataatacatagtgcaatctaaagtacaactaaagttgataatacaattcaaattttctttttcttttccattttttgggttattgaaatcctaaagctatttcacaacatattaatatgtttgtgtaatgttccacgtttaagtacttcttttcgtagaaaagtttttctctttctctcctctttataaatcccacacacattgatccttagtccataagcaaatatcaaagccaagaaaaacaaaacaaaacaagagtctcattatctctataattctaaagatggagaagaatatatcaataagcaagaagctagggaacattgtacgttttgtcttgtacatgttacacaaaggcatttctaagcaaaagctcctagccgactttaatgccactc

SEQ ID NO: 10737 - DNA, 570 bp, Arabidopsis thaliana landsberg
aataaaattttattcatgataatatgattttatcaagaaatgaggaaataatccccaccggcctcctccaaccaagaatattattccaacttcggaactaaatcagccaaaaatagaggaaatatttaggaagagaaattgagagaaactaaggggaaaggccaaaaaaggagatttaattaggcgaggactcaatcatcttcttttgctgatacaagttcttgtaaaacttctttataaactcatccgctgccttgtccacatgtccgttagccacgtcaccctcttctcttaacgggaatggtgagtccgttacccgtaaaggcctcacggacgaagtactccgtccaaatcccggcaggtagggagataacgccgtcaaggcctcaatggaaaaagccggcgtgttacttccctgatcatgatctccaccgctgttgagcagctctagaacggctctggagacggaagtgtcgtcatcaagggtcggtggcgcttgaccacaggagaagaggctgttgtggtggctcttcttcttgaaggcagccatgttgaaggggaacgtgtagt

SEQ ID NO: 10738 - DNA, 1067 bp, Arabidopsis thaliana landsberg
agtatggtcaatagaggagcacctgtgatttctttgtgcctattagtgatttctcttgctcgtgaatctctatgcaggcgggaagcgttgatgttctacattgttactatgcgcatggacaggacaatgaaaactttcaaagacgcagttactggttgcttcaggagtaagtttattatagcttataacttttacatcatttgtttgtgatcttaaactattatgatagattcaacatgaagtataatacaaaatagctaatatgtcttcgaagctaacaagcacaacacctttactaattctcttgttctttttttctgttggtgactaatgcagagaactttcccacatagtttttgttcactacctcgaagttaaggttagacccatcctattatttgctaatttctctgcctcactagttttcttttcaaggaagttgacattctgagagtgaaatttgtaaatgaatcagggtagtagagtttctacttcttttaaccggatgcaaaggactgaagacgcggctcggtctcctcaagaaactggggacgccttgaccagtgaacatgatggttatgcttcttgcagcttcaatcaaaatgatcatagcaatcattcacaaactactgactcagcaagtgtcaatggttttcactctccagaacttgaagatgctgaatcaggtgcttcttctttcacaactacctattgaggattccttacttaattggtctcttatcttatacatattacatacattcattctgcagcatacaatcagcatggaagttccacagcttactctcatcaagaacttcagcagcctgcaacaggaggaaaccttactggttttgatccttactatcaaatctctttgacgcgtaagttcatggttacctggttttacgttccttttttccctatccagtaaaagataagtgccaaatatccatctgatacctgcaaccggcatatgatttcttacctttttaacagacagggatcgttatcaaaatgagcttcgcacaatccaccggactgattcctcaattatgggagacaaa

SEQ ID NO: 10739 - DNA, 805 bp, Arabidopsis thaliana landsberg
ttgtatttgaacacacaaccatcttatcctcctcgtcaaccaagaaactcatataattcaacgcatctcttgttaatataactttaccaaattccactaccaagaagttggtccaagacaagtctttgtcctcatcgatcttagttttggtcacccatatattcatctttaacgaatctttatcaaaccactgttgtaacaaggcaagtttctcttctctaacaaccgatagagccacagtctgatcagcgtaatatttctgaataggaatacatagacgtccaaatctctcgcttctgaaatcaaatttgtgtaagaattttctttctttatctgaagcataccaatctgaagcaaaccaataagcatttcccttcaaagtcatggctttggatattgcgaagtaaccgggagagacgtggtcaagaattctccatgaatcagagttgaactcatagattttagacttattatcatgagaactgtttaatggaagaatgccaaaattcaagattttgtagctattgcaagatttgttgttgtttacgtatcctagcacataaacgtccattaacatattattggcttggatccacttgatttgaccagtgcaagggttccaaaccacgagtctaccatagtcctcggtcttgcacaataataaaccatcgcagtgagagataatatgacttatcttatcatgtcttggatcctttagaacgttaagtttaacgtagaccccaatggatggatcaaagctgttttggattccacggagattgatgctatgaatcagagaatttat

SEQ ID NO: 10740 - DNA, 570 bp, Arabidopsis thaliana landsberg
ccgcctctttagcaaaataaattctaaccttcctttcaatgggaccaatctctgaaactcacgtaacttaacgtctcacttgttaacgtaactttaccaaaatccactaccaagaatttgctccaagacaagtctttgtcataatcgatcttactttcggtcaaccatatattcatctttgatgaattgtatcaaacctatgtttcatcaaggcaaatttctcttctctaacaactgatgaaccaccttttaatcatcatgattattctcaataggaagcgatagacgtcggaatctctttgttgtgaaatcaaacttgagtatgaatttgccttctttatctgaagaagaccaataagtatttcctttcaaagtcacaccatcaaaatgcaggaaacaattaggagagacgccatcaagaattctccatgaatcagagttgaactcatagatttcaaacttaccaagagaataagctggggagctaagaagaatttcaaaattcaagattttgtagctctcgcaagatttgttggttttcgattctagaacataaccgtaaaggacata

SEQ ID NO: 10741 - DNA, 591 bp, Arabidopsis thaliana landsberg
attgaatctgtatcaaacctttgttgtaacaaggcaagtttctcttgtctaacaactgatagaaccgcaatttgatcattgttctgagaaggaaacgatagacgtaggaatctctctgttgtgaaatcaaacttgagtatgaatttgctttctttatctgaagcaacaaaataagcatttcccttcaaattcacgccatttgagcgtatgacaaacaggagagatgtcatcaagaattctccatgaatcagagttgaactcatagattttaaacttaccaagagaataagctggggatctgagaaaatagtcataagtcaaaattttgtagttatcgcaagatttgttgttgtcgttgttgttgttgttgctgtttccatatcctaaaacataactgttcttgaacacattcttgatttgaatccacctggtttgaccagtacaagggttccaaaccacgagtctagtcttgtccttggtagcgcacaataataaaccatcgcagtgagagataacaccaagtatcttatcatgttcaggatcctttagctcgtaaagtttacgttcaacaccaatggatggatcaaagct

SEQ ID NO: 10742 - DNA, 1632 bp, Arabidopsis thaliana landsberg
acttttcgaagatcgaaactcaaaagcttggagaagggaggaagaagatttagggtgatattagactttacagaaactctttttctttctcacgtactgctaaagtgttaaatccttatcatggttgatataatgatattcatcgtcaaacttaccaactttaaaacaccaatttgatgaaaaagattcagatatatagagaaaggttaaagatcaaccatttattaaacacaaacacagatagatctcacaaaacaaaaaacccattcttcaacttttacctttccgcggttcatcattcatctcatcatcaagctgcttcattcacatccttctctgtttcttcatccggagtcgcagattcttccttcacaaccttctccgtttcctcatccggagtcgtatcaagcgaacccacacttttcttcaaatccttctctgtttcttcatccggagtcgcagagtcttcctccacaagcttctccattttctcatccggaagcgaagccacatttttcttcagatccttgtccgtttcctcatcctgcgtcgtgttggacgaacccacatttttcttctgcttcggcttcatgaccttcatcctcttcttatttccaatcttctccgttttcttcatctgggatgggtcgtcatacttctcacaaacgtaaacttcgaactctccctttgacatagctattatctctgccgttgtttttccatcttcaaacagaggaatttttccaactttccactcatcaaagatgaaaatggctttgtcgggattgttatccaagatctccttcttaacttgtttgtgtaaagtagcagccatcgatctctttctcaaccttattctctcgttttcactcaaacatctcacaaccaaaggggaagaaaacgttttcagaggacggcgagagcatgaagaaacacaagctttgccgaaaaagttggaaatgttttcaaaagctgaagaaactttgagaaaattcttcgccataatgtatgaagctttgaggaatgagagagaagggttttataaatagatttgatcctttgcttttttattgtatacacaacatttctgtgtttcttagatattggacccactaattaattaagaaaagtgtatgatttttatttatgtttagacgattatttatagaagaaataaaataaaaaatttgactaataaagaaaaaagtatgttttaaaattttaataaattcaagggaaaaaaaaaacacaacacagaaatcctcaatttgtttctcggatcttatatttatgaatattggtatctaaattaaaacattactactatatacaatgggtggtttgatatggttacagatttagagtttaacttccaattaggatttcagttaaatatatctttaattaacttaggatcgtgttttattttttcaaatttggactcagtttctttgattaaaaaaaatcaatccattcaaaaaccacattaagatatgggttggttttcaaattgaatattttgattcggttcattttggatctaaaccttgtactcgactgtgtaccaaatgaattctttcaagaaggctagatcattaacaggtaaaaatgtaaaatatatcaaaaaaagtg

SEQ ID NO: 10743 - DNA, 955 bp, Arabidopsis thaliana landsberg
  unsure (1)..(955): unsure at all n locations
cagaaccggcagagccatggtacggagatttctagtccttttttaagttatcaggcttcagaaatttcgggaggcgatctgtggctccagatttgtgatcatagtactccactgcagctgctccagccagnnnnnnnnnnnnnnnnnnntgagcatgcaacctgacataataatataatccaatccagaaatgtgtaaaagatcaaacgccaaacatggtaaagaaccaatctatgaaaaaactaaaactgttatggtcacatttatgttatgtaccaaacatcacaagtacatgtttttaggtacaaaactggatacgagcaagcatatatatgatagaatattgaagagactagatgttgttaacactaaacttgtctagcaatacagaaccaatgggagacaaagcagctcatagtaaagattgaaagataagaattctaaaatgaagaaagacacgaacaagtgattttagagtatccataactgaagatcatgctttctcaagcattagtgttcttaaacgtaattgtttatgcaatatatgagaacacataggtaagtaactttgatgtccattacacggagataagaaccagattcttcaatagcttaagccactgataacttctacaatcaaagaaacattaaggagcagattcttcaatctaaaaaacattaaggagcattaagataagaaaatttacctagcgtggatgattctgacactggttttcatggcaggtttagaccaattataagcaattgaaccagagataccacttagccataagcaacctatcaagagtccaattcagaaccaacaaattttatcagaacaaaacacaaaactcatacatgcatcctcaaaattgtgaagcaaagaggaacttcgattttgtgtaagaaattaaacctaaaattatcaaaaggggatcctctagagtcgacctgc

SEQ ID NO: 10744 - DNA, 1804 bp, Arabidopsis thaliana landsberg
  unsure (1)..(1804): unsure at all n locations
tgctattttacttcacttaatgattgtaggattgattgtgcacttaggtgtaggaattgtttgaaaccctagttgcatgatctcagtaatcctgttgagatggatactagtatgctaggtcgagtagttgctttaattaattaggatctcggtagaagacgagtgatttttctagcactcgcgcgagatcaggaaattgattgtacccactttcatactatcatgatactagtttgtggacaacaatccatgaggattggttgtttacgagatgggaaaatggaataaggattaacgtgcggatacctgtgtcaagcgtttgaacgtactaaacacataccgagaaatatggtaaatcggtaagcctagtacctgattgaacctggcagtagactttgcccctcacgcgacctgagacgtggtctcccattccggttatggtgggtacaagtgcggtcactgcacgacggcagtcggggtcagtgaggcattgtacgccaaggcggtgatccctgatctgctgacggggaatcgatggggacggttgatgtgtgtggggacggagtgcccctgcatgtcgtgtgtttaggtttaccttgcaaggataaaaactcgattcgaatcgtctgcttctcgcagctaatgagactgcttgatccatgctgctacattgagtaataagtggaattgtgctgagatgatacaagatgttgattgctaaaaatgtttgctactatgtatgagtagatagtacatatttagccttaagagagtcacacttaatttgacaaagttaaaaacttgattagaaactcagctagtgcttttggcaaccaaaccccacagccaaacagctgcatgtctagaggtagaggagtagcncctcacaccgggtaagtctagctgagtattagtatcctcaccttgcttgtggcacaattttacaggttctctggaggacatggttgctggagtgacttggccatccaccctgccaccgggttggactgtcgagtgggaccctgcctcggctgaggaggagcatgaggagtgatgggacaggcttccccatccctccatttatttaccgttagtttattttccgctgcactccaaaaacaatgatggttacttttgcgaaaactccgatgatgacaatggtgatgtaataacttaatactctaccatgtatggttttatgctttattgtatttgctctgtgactcaccatcgagtgagactgtggtacttgatcctgtcagtggccgtgtcggactagatccgagggattgacgggttattccatttaagtgtggtctagcctctaaggtcggacttaggcacttaagtcggaataattcgggcagttccgccacaagaagccctcttgatctacgtcgccgctaccactcaggtggtcagcgccgcgatcgtggtcgagagacgagaagaggggcacgcattgcccgtctagaggccggtctacttcatcactgaagtactgtccgagaccaaaatccgctacccgcaaatccagaagctactgtacacggtaattctgacgcggcgaaagttgcgacactacttcgagtctcatccggtgactgtggtgtcatccttccccctgggggagatcatccagtgctgagaggcctcgggtaggatcgtaaagtgggcggtggagatcatgggcgagacaatctcgttcgcctctcggaaggccatcaagtcccaagtcttggtggactttgtgtctgaatgggtcgacacccagcttccagtagctctgatccaaccggaactc

SEQ ID NO: 10745 - DNA, 2034 bp, Arabidopsis thaliana landsberg
  unsure (1)..(2034): unsure at all n locations
tgttatttttctgttagactattctaggagctgacctttatatctttctgttggttctccagcatcctatcactgcgtttgttgaaactgcgatagcgtttgtctgtttctcagcagcagcaatgtcagcagtacgcagggagtatctctaccttgaagaactgctttcatctggcttgtctatgctaatgtggctccagtttgcctcttcgatctctggtggctctgcatctatctttaagtttgaggtaaaccgaatgcctctgttttagaatgatctgttctttgtcttactttctcagacatctcaccattgttatgaatacgtctctggttgcagttgtactttggacttttgatctttgtgggatacatggtggtggacacacaagagattatagaaaaggcacacctcggtgacatggactatgtaaaacattcgttgacccttttcactgactttgtagctgtgtttgttcggattctcatcataatggtaagttcatttgtcgctggtataagaaaatggtacactttatttgttagtaaaccgtcattgacggactcttttgttatgcagttgaagaactcagcagataaagaagagaagaagaagaaaaggagaaactgaggggatgtaaagtaaatttaactttatggttgttatcgtgtgtggccactttgaagatattacttgttagcactctctattggtgaccagacatgtttccactaaaaaggatctgcttgtttcacttctgcacaagtaccatcttcagattgtaaatgactcgagtgttgttcttcttttcataaacttttgttctttaagagtttggttctactgattgcatcttaccaagctaagaataatgtaggaaaatgataatcctgtttaaattttctaaaatgtgtgcatttcagattctcacagttgcaacatttgctattgcttggaagttgtaatcgaaaaataacttgcaatttccatgataagtgtgtaaaaacctgcattctcgtgaaacgtggatttgaaaattgcaaataaatggcgtttagccttttgtcaaacgtctggttggagctttttgtcaaaatttgttcccaatagaatgttgtggtacggcaaatggcaaggaatatacatcagattttccttctcactttaaaaacgacgttatgttttgcatagagtctagacctcggagctcatgacccgatcttaagtttgaatccatccgacaaaccgacgatggagacaatactagttatatacttgcatatgttctgacttctggtccaaggcaatctaggattagcacattaacgtgtgtagcattttcaattgggtttttgatacactccttttgcaatccatgataacatgattgcaacttgcaaaaggatctaaaagaaaagaaaattaaaaatcactggccagaaatgcaaaacatgaanccaacccctagaagttctgttaatacttaatagatgtaacagaaggaaatgaagccaaaaacgagaacaaaatatttgaataaaacaattacatctctgttttttctttgtttgattttttaaaagaactagggaaattggaaccgtaaattcttgcattagttcctttttttttctaggaaacagcaaggaactactctggtcaagagatatttgatcatatgacattggatttgggttcttcattccggtttgctcgttaaccaacgttggtttgcaatttgaccagttgctgactcatctctttcaagatatttcatttgcttctcgacaaaacaactccaacaataaccttgaaaaatcttgaagtggatggctcttaaaggttcgtttcgtggaaaatcaaatttgctttttttgcggccaaatttcaactcatgcaatgcgacatcgacataggtcacaaagggtattattgtctaacaaaagactcgttactctctcaaacaaagaaaacacttgtttttcttcgttctcattatacttgtttactccataaaaatttaccattaaaga

SEQ ID NO: 10746 - DNA, 1274 bp, Arabidopsis thaliana landsberg
agtagtgcataatcttattgagacttttaagagatccataatggaatataaaatccagcttcatatatataagatatataactacggtaaaccattttcatataaaatataataatcccataaaaagtaaaagaaaaaaatccagaattatgaaactcattcatatatttagaccaatgccaaaagtcttccaatacttaaaacgataaaaggtgtttttgtcgtaaagagagaccaaatacttccgtctaggagaaatctgagtaaccgaataaactcgtttgatcgtattcataatttgtccaataaccgttttgcataaactcatccatgttctgatctaagcttgtactcgctggaaaatccatgttttggttaccgatgatcggaaaatcaaagtcttgttggaagcactgagatgcgacatcttggatttgaggatagtcctacaaaaattattaagccggtatacgattaacaaacattggtttagttagttattagtatgtttagaattgtgtacacattacctttgaagaatcgaggatgaattcaggtgaaatccaaatgttggaagaatcagtttcagtagatacaggattggcaaatgagtgaaacggcattgtttcatcgcgactaggagacgttactcggcttgaaaaacccgagctttctcctgatccgattgtttgctcgcttggaattttttggattttcgtattagttttgatctcattcttcatagcaacacgacataacacaaaagctccctatagttaaacacattcatttcttaatcgtctttcaatatcaaaagaaacgaaaccattttagaacttgatcaaattataaagttacctttaaattttgtgatccgtgtgatgtatcatcatcgcatagtcgatattcatgcatgatccaattgcttctatcgcctaacggggcacggcctttgtagaaaactagagtttttctataaccaattatagaagatgaacgagaagtaatttttcgatcttttccggttgctttccaataaccagcctttgttcctcgatttgtacgaaaaccattaggatattttttgtcccttgagcagaagaagtaccattccatgtcccggtttgggagaaacgacttgtcttaaagtaacaatcacaaaaatattaaaaatttgaaaagttacctaatactttaaatagatttttggaagttaatatattacctggtaactcccaaggatcgaaactataaagatcgatggcgggaatgac

SEQ ID NO: 10747 - DNA, 916 bp, Arabidopsis thaliana landsberg
cgacggaaaacaagagatttattgaaaatgatggacggagaattttctttttgacatcccataatcagccacggggcagggtccggcagcgatttcggaagcagctctgattacaacaagtacctcgtccaaatccctccgacgccggacaacaatcccggtccggcgtcgctttcaatcgttctcctggaaatcgattccaatcaggagtcggttccgtccgtttccggagacatcgtttccggttcatctggtaaagacaacgaaccggatctaaccgatgtgagaatcaatgtaggtgaagaagaagaagacgataccttgctttccaagatatcttattctcttactcgtgtcgtcaaaatctctccgatcatcatcgctctttatcggtaataataatatatatttaaaaaatctctgtcgtgtctgttacaaacactttgatttgtcacaaagcatgatcttttaaggatgtttttctgatttaggttttgtttttttattacaggattctaatagttgttcgagtagtatctctagctctgtttctcttctggagaatcagaaacccaaacaacaaagcattatggttatggttactctctgtaatctgtgaactctggtttgctttctcttggttacttgaccaaatccctaagttgtttcctgtgaaccacgcaaccgatatcgaagccttaaaggcgacattcgaaacgccaaacccggataacccgaccgggaaatcagatcttccggggattgatgtgtttgtttcaacggctgatgcagagaaagagcctccattagttacagccaacacaattcttttcgattttatctgttgattattcctgttgagaagctttctgtttatatctcagatgatggaggatcgcttgttacgtttgaagca

SEQ ID NO: 10748 - DNA, 1587 bp, Arabidopsis thaliana landsberg
ggctacaactgggtcacgtgcagattcacgtgaatattcgtagttggaggagatataacgtcacaatttttttccttttgcaaatgtctaaagacaaagcaacccacaacaaaaatgatccgtcaccgtcacgttcacatgtgaagtgaaacccatcttgccatttagattgtttagataattacttttttgttagtgttaatccttgggtgtcaataagatgatgatatctattggttcatgattttgttttgtagtgattcataaatcttatatctattggttattggtagacttgttattgaaagtgaagaaatcttccaaattaaacagccgtttatgtgatttaaaagaaacagaattttcgtattcattcaggttctttgaggtcttcgactctcactatcacatgaagccattagagctcatcttgatcttttatcctgaactcaacgaactattcttacttcggtctcttttctaacgtcttggtttgccttgtttcaattcaggggtaactttttgctatagttttagcatccttgtttctgtgtgtttgactgcaagatgcaacattcttttgccgcatgagctggtttgttttagtgtattttaggttttgtagttgttatgggcctttggagtttgtgttgattggttttaatggaaatttaaagtgaaatataactggagacataaattggagaaaataatttggaggtttttttttcatctttccaattgttgaactgctttgtaatatgtttctttgctacaaagactggccctagtagcctagaacgtgacaaatggaacaaaatattccaaatccacgtgaaatagaaatttttatttaagtatgtcaaaaatatgattattatatggatatatacactttattttgggataattttgctactggactgattatcccattttgatttctatttttgtattagtttatgttcttaagaataaacaaattatcatgaatttgatattattattattttttttgtttttttttgctttttatgagtttgatattattattattttcctacgaaggctggtgttgttgaaacacaaatttggcttcgaccacatctaggaactcccattctgtgttcttgatttggtaatacttccatctctctggcttaaccatatgttgagtaacaatcacaactgagaaatcaagccttggccagttggcctcacctccttcatctatctactgaaatttattttttgatgtgtcatttttccatcttacacgtattcttacattatcaatgtggaaactttcttgtaattagagttaaaaaaaaacaaaaaaagacaaactaataagaataatcggaattaaaatttggtttgatatcactcactagtcactaccactaaaagagagcagtgaactacattatatgtttatatgaaacccattgttagtcattgatcatatcttccaagacaaaaaaaaagaaagaaaaaagaacaaaacaaatattcttttaacaatattcaaatggaaacgaaccaaagaattaaccaaaaagagagagagagcagttctatatgata

SEQ ID NO: 10749 - DNA, 733 bp, Arabidopsis thaliana landsberg
  unsure (1)..(733): unsure at all n locations
agccacgaatgtatcaaaaatgttctatgccatgttctaacctaactagtgaaacacaatctaactcagagattaagagaagttcaaaaacgtgcacaagagtctgcagcagaatgatctcaggcaatctagtgaagttaaatctgttccatatgaccaaagttaacaaagatatgcgaaatattaatacactcatgaagcctagataagattcagtttctcttccaacaattaaagactcaaatctaaaatatatcaattacgacactgcatcactaaattctagttattacccaaatcgttgttgttgttgacannnnnnnnnnnnnnnnnnnnncggctgtgatgatgatcattactggtgtttcccattctcctcccatgttgctgcttcagttgtgatatctccaattgagtcttcacaaagaactgcattctctgcaactcaagctccttcaagaacttcatcctctctttctccatctcaaccacctgttgcagtttcgcattctctgtttgctcataagcttcaccgaatctcatgattgcccgagtcagctccctccatttgttccccactccatcaccatcttgcttcttcttctcctccgtcttcatcctcttcgacagaggaggaggtggtaaactgtcaccggaatcatctgacattgctgcttcagattccgagtctgaatcagaagcgttcctcttcctgaaacgccagcgtttcgac

SEQ ID NO: 10750 - DNA, 474 bp, Arabidopsis thaliana landsberg
  unsure (1)..(474): unsure at all n locations
tttttcttgttgaatctccttctacaagctccgttggtgcagtttagatgaaagttatataaattcgagaaactttgaatcaaactgcataatcaaaatcggaaatttagagtaaatgttgttaaagtttaacattttagctttgaattgttaattgcaaaactctgtttttttcaagactctgtttttttctttataaaagttgcgatttttataacctaacttttgttactatgaagcctaaattgcataatgtgttaaatttacttaccggcatgtttagagagatgatgagcttcagcagcttcaagcttattgaactgttcaccacatttatgacaagatacagaggaattgttgcctccattaatggtggattctctgttcatctcccatgaaacccttctgtttgtatgaaaccctaacccttctnctgctgctgctgctcctcgatctctgtccgacaaagcaaac

SEQ ID NO: 10751 - DNA, 1706 bp, Arabidopsis thaliana landsberg
aatttttcacttaaacagcgacggcgcgtggttatcattgtcgaaatcaatggagcatttagtagaaaccggcagagacggcgcacggaacctcatcgagtaatcacggtaaggaaactcatcttcgaaatgacccgtctgtttcccgtcgtcgaaattcaacgagtaactccacgaatcgtaccggaaactaacatgctccggccgattacaaccaccgtcaatgccaccgttgcagcagtgattacgtccaaagcgacggccaccccgttctaaccctccgagcagctacgatctcacagcacttcgtcatcttcccccccccggagaacctacaccgctcatcaggctccaatttatcaacggttctgattcgttgccaccacacagatccgttaggaccagatggctgagatgatccaagacaagggaggataaaacaacgacctcgtttcgcgaacatggcttcgtgcatttcatcggtcgcgtccatttcagagatcggaaaagattcaaggcccatgaaacaatgagattgattttgagaaagatcgtaaagattaagagaaagggagagagatgaatacagagcttggatttggattcttcgaatccttcttcctctctgtttctctgcaaccctaaccctaattttctctttctcttgcaagaaatctccttcttcttcttcgtcttctatttctctctagtactctgtataaccaatgcgaaataaatgggaaataaatggcaactaaatcaagagctggaattgcgtacgtaactgccataaaccggtttttaagaatcttcacttacctggccatcggttttgctgatatgaaccgaaattgaaccggtagatttgttaaatattagatggtctgatctcatagtataacttgttatgtcggtgcagtaagccgttagtcccggtaacttttataacggtcgaccgttagtgagccaattatatgatttaaagtatcctacattaaaataagaacttaaagaaatatattacacacgctttacgtaaattatgaaaatttgactttctttaatcagtaaacttgtgaagaatatcccatataattaattctgggccgtagattgcgctgatcgttaatggcttcgttgaaatcaacggccttgatcaccatggcttctcggcgaccgtcctgctcctgaactgccccaaaaacaatctcgttcttctctcggttatcttcgaacgacgctgtatcgttcacattgcgtttctgctggttttggtattgatcatagtcttggtaataagaccggttttggttggttccttgtgctctaaggtagggtttatctggatttgtacctgatctcggttctaaagctggtggtccatcttcttccggtatagcgaaactctcttgtaccggccattggttcggttcttgctgatggtggtactgatgaaagtttgggggaattacatttctagaaccggacatcatctcggaaaccgaagaaccggttttcacgactagctttccaagcgaaccgagaaatccttcttctttttccgattcatgttgaggtgggattaatggctgtcgtaccggtcttggataacgttggtacggagccattgtcatgctcggtgttgctacatgtctcttactcttagtatcctgaaatcaaaaacagagcaatgaggcttattggtt

SEQ ID NO: 10752 - DNA, 1089 bp, Arabidopsis thaliana landsberg
attactagaagatccaacactctgttattctggaaagaaacttccaacatgcactttatcatttcattaaacagatattggaactcaaacctgtcataaatgatgactgtatcagctgttgcaaggtttatccctattccaccagctcttgtactgagcaaaaaacagaaccggttcgagttttctgcattaaaccgatctattcttacttgcctctcaggtccactgatctttccatcaatccgttcataattccaattctgacaaaataaaaataaatttgttacggctcaatatcatacaatagtttttccttaattgcatataagcaaattataaaaagaaagttactgttccttgcgtctcaagatatattaaaaagtaacttttaagtggaaggaaaagattatatcgcaagtcatttgcagagcgacaacaccaactgaacaaatcaataggtcgacaaacagatatagcagattaggttaccttgaaagtgaagtagtcttccaaaaggtaaagggtgtgttggaattgggtatagattagcactctgtgcccctgctctttgagtttgaccatcattttgtttaacagttgcaactttccggaagcttccaatagttttctttagaacaattcagaaaaggtcaagcaaaagtcagcacaaaatactaaaaaggaatcaatacgtcaagattagtgatcaaatgttacgtaaaagcttcatttgcgtcttcaaatcttggctcaaagtctggtaacagatacggatgagagcaaacttggcgtaatttcattagcacgttagatatctgaaacagtttaaccagccgaattatcctaccaagtacagtctaaaaggttcctaaaccaagacaatatatacacatctgcataagcacaagagatccacaaaacttactttagcatctcgtttctttgtcaagacttgataattattggtaataacagctttgtacacttctttttgctggctgctcatatcaacacgcaaaatgagctccttttttgggggcaccttatccttgagcacgtctttttttaaccctgcaataacaataaaag

SEQ ID NO: 10753 - DNA, 1630 bp, Arabidopsis thaliana landsberg
tctgtaatgttttccgtcttgtcttccggctttgctttctttagtcttcctatagtatttgtacagattctcaaactcctctctgcatttctttcccactcctttggtatccatgttcctcggacataattcctatttaagaatataataataaaagaaataagaatagaaagtagctaaatcagctcatgtttgattgaattcggagcagtgccctaatcttgaaactagcttgaatcattaacaattgataagatattcatattcattttcatgcaaatattagattcgatagtgacacacataaagtttgtcttcttataacatacagttgttaactttcggaccaagactgtttttgagacttagttactagtggactaatagtttatcacaagaacatgtttcaatgctcagttacacaaaagaagagggtacatatcttcagaagctaagaaagatgaatcagaagttatcagtaaaaagaaaagtagaaaactaaaaatcaaagtcaaagaagataataaatctttttgttttactcttgtttatgttttacccttttgggtttttaaagcacctgatagtgtcttaactgaaactgccaaggtctggtcattctcttgaccaaaacaaaacaactcctaaagaaattgtttgaaactgaccactctatagtttatacatcaatatgtgtgtctgcgtatatacgtgagaatgttaacacatttatatatatacgtctgtatagatcagctgaaaaagtaagtttaaattgaggaacccaagaagagtgttgaggtcacattctttcttgttattaatacaagaataaaaaaagattaaaattgtcttcgggattttcacttgaaaggtctaattttaacaagaaagcgtatgaaaggtcaaatcttttcaaatctgaaagaaaatccaaaacaacaacaaaaaaatactcaaacgtttgaaaaaaaaattgttaagaagatggaagctacgacttagtgttttagttacaaatatcattaatttttttcaaattattgatcaacgtttaaactaggagacattatcttgaaaaaagagaaggaaaactagctagagacattatatatgaatgaatcaaactcttgtggtatgaattgatttgagaaatatgcatatagtgtctttttttatataattgcttttaaaaaaacaagaaaaatgatgagagagagaaattagggtaaaatcgagagaggagaagtgaagcaaacctagaaacttcatcccaaagaggtcctttttgattagcttctttgaatttatgatcaagacgagatctaattttcaacagagttagggtttcttgtctcggccaccttccagttcctacaccgtctactactactccggtgccgaaaccaccaccgtcaagaaacccactaaacccaactcctccaccactagtactcgcgtttaagttactgttatttccagccgttgaagaacctccacccaatccatgtatgccacgtggcaagaaacccatatcttgatcagtagtgaactgatgaagacggtgtggcggtggctgcaccggagcaaggttaaaaccgaagaaatcagagggaaaatgagaagaagt

SEQ ID NO: 10754 - DNA, 438 bp, Arabidopsis thaliana landsberg
ggtctttgcctgttagcggagtggacagggcacattaagggctgaaggggcacaccgcctgtcagcgggatggacaggcggtgcgccctatccgtatttaatgctgaggtagcgtagcttgcggcgtagcccatgacgcagaggtcatatgtcaggctccacccattggcttacatcatgggccatgggccacgtggcggcatcgggtctctccctgggcggggagcagaagcgtacaggatgggatccggacacgtgtcagcatcagaccctagcctggtccttgaccagggctttaagcttttcttgccttggaaatccgggaccctactgtgggcggtccggaccccatgtgggggggttcggactccatcccacagacccggcttgcacacgtggtggtcccggaccttcctgggggtcccgactgcataccca

SEQ ID NO: 10755 - DNA, 1118 bp, Arabidopsis thaliana landsberg
tcgtacttcttcttttgcgtatgttctgttaagaatgttcttctcacttgacgctttctcgttttcaggtttaatcaaaggttcatcatcaacaatattactaagattatcatttatagctaaattattattattccaagataaatataattacttcaaggggttttggtcatgtttctttaagaaggcttggtcgtctacttccagaagtctgttgggttgattagtcttctcttgtcaccattatcatgctctcaagcccaagcccaatcccaagcccaagcccaagcttcccttaccactaccaacctacactccgatccaagtttgaagtttgaacgagctaaaataaataattgttaatgtaccagattttcaaaagacactaggagtattttcaagaaacacagaagagaacattctaatgttagattggagactacaaaatgagaaacactgactaacaaaagatgtcaacaatggttttgagttttttgttctgttgaattatgtaagtaatcacttcttttagtgttgcttcccttccttccttgttcctcccaacttcttcaatccgatcatggtagatccttcaaccgtataatcttccaatcccttgcagaaataaaaatagacatgtgaaaccaacaacacaagttaacaaatacaaaaatcatgaacatgatattattatataataataccctaatcaattcttgacgtgcttctcgaagctcatcgttaatttggccttgttttaccatgcggtcgtctagttcttttatcttagaacacttcttcagttcttcttcagctctctttcgtgctcattgttgatttggccttcttttcttatacggtcctctagttcttttatcttagaacacttcttcttcagctctctttcgtgctcatcgttgatttggcctgcttttatcatgcggtcctctagttctttgatcttagaactcttcttcagctctcttttgtacttccgtttcaaagttttctatgaaacacactaagcatatcagcactcaagaacctgaaatatacatctctatatatatagacaaatacctctttcatctgaagattttccctattctctacttctt

SEQ ID NO: 10756 - DNA, 1670 bp, Arabidopsis thaliana landsberg
  unsure (1)..(1670): unsure at all n locations
cattttccattgattcaatcgcagtgaggttattctccataactcttctcttgtacctgcgccaagccgcttgtatgaagcaagcagcccaagttctccaatggtgagagtagaatctgaatgtatgttgaagcttcttgctgtgtaaccgcctaaactgatttgcaacaaatttcaaatcttcagctcgaagagcgaatgcttcgacttcaactaaagccctaactgttcttgtagaagatggtaaattcaaggttgattttggaagcaaagcccaagaaagaagctcttccccacagaaatctccaggtctaagtataatcgagttgaagaaaccggttctgcctccattggttgtggaactctcgagtctacctctgatgatgaagagcatctctgagatcaagtcaccttcacgtacaaggtaagtcccttcagtacacagagaagaaaccaggcgctcacatatcgcatcaagcagctgatcatccatttgagagaaaaatgggacctgcatgattcaagatagtagttaacctaaaagttgaaccatttgtaggataaacaaatcaatagaaaaacttactcttcgaacaagatctaaacataggtgacgttgaatatcacggcgaagatcagtgggtaaactttgcaggagaacctcttcatcgactcctcttgttgcaagccacttatactgctcatatcgcctcacacggtttctcaactcttcaggaagttgacgatgtctcatccactcctcagtgtctctcttcttcaatctccattcctcaagccgtacagtcaaagattgcagatatgtctaacaaacaaaaggcaaaacccaagaaacataagaacaaaagcagatacttttagaacttatcctaacgcaggaatccatacctgcatattcccaatgagatgggcaaagaggacaagaccaaagattgcaatgagaacagcaaatgtggtttcgcccatgaacatggtcgtggacaaattctgtccataagaactagaatatgacaataacaggaaaatgtcatcagattctaaaacttgtaatcaaaaggagagtaataattggtatcaaaaaatttctatgatctctgccattacctaagctgctgcaatccccaccacaaacagtagaaatatctctcgaagaactgtgaagacacaacgtttttcgtgattgcattcccaaagatcccatacttgaactcgccattccgtgcatcacagagtttaaacacttttgtgacatttgcccaagtcatctgattattgtcatacattgaatcacagtctaagtaatatagctgacaattaacttggccagctnnnnnnnnnnnnnnnnnnnnnnnnnnnnnnnnnnntctatcaaccgataatatataccaggctgcaccaagcacctgtcccaacaaaaacattgtagctttgattatcatcacatttaaggaatgaaataatggaagaagaaggaatgggattcatacatgactagccagcatgtatagcaaaagattataagcagctccagcccaagcagtctttgtaacaactccagttgctttaacaatttgagaacttaacggaattatcaaatagaatcttgggatgtattggaggagcacaatcaagcaatagcattgttggtatga

SEQ ID NO: 10757 - DNA, 538 bp, Arabidopsis thaliana landsberg
ttgccgttccggcaccacttccaaatccgacgaggacaggagacccttccttaccactccagcccgactcgagcgacgtgaccggagttatcgattcccgccacaaactcgaagccaacgatggaaccgaccagaaactcctctcccgggaaagctcgcaaccatagacaaccgatccgcttaatccagtcctccaccaagcaactagaaccctagatcgaaccctcacctccagcgtcgaaaccagggcaagcctcctccgcgacgtcactgcctcaatccggtcagacaaaaaccaagtgcggcagcggttagggtagcaggctcaaacagaaccctagccgccttactccttacctagccaactcagatccggcggatctgacgctaatcgcttgactcgcagtgacccccaccaatccgccttcgacttccgccgccaatcgcagttgcacctccgacaagtgagccatcatcttcctttagtccttcctccggcgtccataaaccagtggtaccgctagaagaaagcatgaaa

SEQ ID NO: 10758 - DNA, 479 bp, Arabidopsis thaliana landsberg
ttttattatcattaccaccgcattacccgatgggggcggggggggttaaataaactcaaactccgtcctcgtggctcttcttgactcacactacacagaactagcagagctcgtcgaaaaagctcttcttcttcaaaccttagaagaagctgttggtcaacacaacatcacaatctttgctcctcgtaacgatgccttagaaaaaaatcttgatcctgaattcaaatctttcttactccaaccgaaaaacctcaaatcattacaatctttattaatgtttcacattcttcccaaaagaatcatttctccacaattctcctccgccgacgttagccaccgtactctcttcaacgaccacctccattttaccaacggaaaagtcaactccgctgaaataaccaaacccgatgatttaactcgtcccgatggaatcatccacggaatcgaacgttctttaatcccacgttctgttcaagaag

SEQ ID NO: 10759 - DNA, 1047 bp, Arabidopsis thaliana landsberg
tagaaataatattctgacattcataaacaaaacggtccagtgacagtgagagctcgtgctaaaatctcatttttaggaagaagtgcccaaggagtagtaatataatcagatcccaccactcgaaaatagagagtcaaccacagagagagatatcaacaaatcacacacgccatgaaccaaaccaaaataaccaccgacgataacaaaaactccaaaccggccgaaaccgaatcaaccaccaccgtaccggaatggttaaccgaaacaatcaacggtggctccttccgccacgtagatctcgaaaccggaaccaacggctgggcttcaccaccaggcaacgttttctctctccgctcacataactacttcaccgccacaaaacaaaaatctcccggcggcgattacctcctctctctcgccgccgtagactggctcacatccacctcaaagaaactcgatcacatcctctctcgtcccgataaccgtgtaatccacgctttcaaaacatcccaatctcgtagcttcattttcgccgttaatttccaggtcccagggaaagaacactacaacttggtcttctacttcgcaacacaaaaaccaatcccttcagattcactcctccacaaattcatcaatacagacgaagattcgtttcgcaacgagagattcaaaatcgttagcaatgttgtgaaaggtccttgggttgttaaagcagcagctgggaaatttggtgcatttgttgctgggaaggctatgaagtgtagttatcatagaggatataattattttgaggttgatgttgatataagtagctcggcgattatgacggcgcttattaggtttatgttggggtatgttacgtatttaatggttgatgttggttttgttgtggaagcgcaaacggaggaggagttgccggagagattgattggtggtgctaggatttgtcatatggagttatcgtcggcgtttgtgattgatgatgatgttgatgggaagaagagttcgcagcaacggcggagaatgatgggtgcggcggaaggaaat

SEQ ID NO: 10760 - DNA, 738 bp, Arabidopsis thaliana landsberg
ccagaagtagaagccagtagtagatgggtcaagcgtctgaagacaagcccctcagattccagtgaaaccaagagcatgatgaagatgaaagaagcatcactgggagaaaaagagaacaataatctattccttgagatcttgaagtccggaatcaacaatctccaaccgagaaatcaagaacccgtcgtttcacaaagcaatgatctgagacaaggaggagatgacattacacttctgcatccatggatccagagatggtgcaagaagaaaactacatcaacagatcaaccagcagggcaagaagctagctttgagccagagagtcacaaggagttcgagaagaaacagtatccgagtattgcagccatggcattgatggggaaggctctgagcggtttaaacccatatggtcttagaaagaccaactctctcatggtttggaatgcaagggatttgaggtaggaaaacaaaaccatcatcctcatcttcccttgtttatcattacaacgtaaagtcaagaacatcaaacagaactagctagcaggcttgctacgatcaaatattttgacaggttctaccttatatgtcagtctgactattcttataatagtttcagtttatgtatgaataccttgtttgcatcataaatattcccttttaatcgcccccgcatcagtattttgatttgtaaatgacaaatacaaaaatgatagcataattcaaagtggtaagtaaatc

SEQ ID NO: 10761 - DNA, 276 bp, Arabidopsis thaliana landsberg
ttttctctattattacatcaatagagactgaaggggaagtggtcttatgagtctagggacttacgctccgcgaactgtgcaagcataatagcctacctgaacaacattcaataccgaggcctaggggagattggtttgcaaacgacaagaccgaatcaataaaacaatgtgaatcactctattccagtgctgtgtagagaatgaggtaatggcaacacttatcacagatctagtgaatatacctgtcaccattagcacagaatatcccctataatt

SEQ ID NO: 10762 - DNA, 1192 bp, Arabidopsis thaliana landsberg
atgttccctatgtgtttgtttatacacgtaaatacattttcaatttaactacatgcccttgtgaatatatggttatgaaaaagaaaaactaatggtaattatctgttgtttaggattctcttggtggcaatagcaaaactgtgatgattggtatggtttctcaaacatttcatttatgatccaagtattagacagaactgttttcacccatctattggatcacataatttatgatctctgaatgttgcagcttgtgtaagtcccgctgatacaaatgctgaggaaactttaaatacgctcaaatacgcaaatcgtgctcgcaatattcaaaacaaagcagtggtacttatatgttagttcttgcttttaattatgaattctcaactatagatatcatttgtggcctaacattcttgtcatttcttctaatacttagatcaatcgagacccagcaaccgcacaaatgcaaagaatgcggagccaaattgagcaactgcaaacagaactcttgttctataggggtgatagtggtgcttttgatgagctccaggtattcaatctgatctgagacaaatagtgacagtttttctagtaacattttcttatacttaaactactataaaacctgttagattctcaagcataagatatcactacttgaggcaagcaatcgtgagctacacaatgaacttcaagaacggagagtcgcgtctgagcatttctcaaagcgtgcttatgatgctcaggtttttcttctactcattcttttttgatggatcaaacttttatggcatctagcactttacacttattttccatctattttaggttgaaaaggacaaacttataatgataattgaatctgttcgtaatggtaaatccttggatgagattgaatcctgccaaaatgaggtgagatttcctttatgattccttagttgaagtttatgagcgagtgtattttttcgctgaaatgtctaattttccaggatgttggtttggtgaacaagtatgtctcgaaaattcaagagctagaaggagaactgttgcatatcaaaaacttgaagaaaaccagtaaccaccaatattcggatgattcctatgacgatgggcctcgttcgaacaatgtcttgtttccctcatccaatgagtcgtcagattgtgaagacaaagtgatggatgtcactggttg

SEQ ID NO: 10763 - DNA, 1187 bp, Arabidopsis thaliana landsberg
cacgaaaaaccctggttgttctatgttaccgtttatattgatttttcttttaatattttatcttcattttgttaaattgcatggtaacgagctgcactttttatatttatttttaacttttgtgttactttttctcaatcaattccttgagaatccttatctttgtgggttcaagctggcttttagatttgttttacttgtagtcactaattttgatatactttaattaataatatttagggtttttgttctttctttttcagattggtcattttcatccactgaaaaatgttaaactttttatagatgttctccgtttcattaggcttcctagtttttatattatcaattttactttctttgatccttttttgatcatttctctagctatacaataaaaatcagtatcttatacgatttcctcataacccaaagcatcatttttttttttactaatatcgatatcaaattccaccacttcttgtctccaaccattcccatttctcaaaaagtcccaaactttactttgtttatggagttcaatttttaatctttgtcctttttgctttaaattttcaggttttgactaatggaattgaagtgaagttgcagaggaatgcgcttagtgttcttgaacatcctacagggaacgaagaagacaatgatcttgaagtcgaccattctacacagtggaatcatccctccgatatgagtaagtttggttccttgtctctgcaataaagtcccaaattttagtctttttgaaatgtttcataaagaccgttctttgattgtcttttgcagcaactgaggacactttgaagcctcataagtcgaagaagagaggacacagatcatcgcggttatctcaaaaggctttgtacagggaagtttcttgtgactcacactcaaaaatctcgagtattactcctcgtctgaacatggtaaggcctcaaatttcttctacttggtgggggttttcatgttaatgctatgtgttactgatttgggaatattgttttaacgcagaaggttgatcttaccaagttggatatggctgcattactgagatattggcgacattttaacctcgtgagttcaaaagaaacaatcttatgttactgattattgtggaagagagtgttttgttttttacaacaggtgattcattgatctctttttcgtat

SEQ ID NO: 10764 - DNA, 1414 bp, Arabidopsis thaliana landsberg
ttgttttttctatcccgttttgtctataatttaagaataaatcagatatcaacaaacctatatgaattactaaccaatatgtgaaggaaattaaagcaaaattgcccttttgtacacacctacttctacttgtaatacaaggtatctttaaaattatccgcagggaaaagtggcactcgtgacaggaggagattcagggataggtaaagcagtgtgtcactgctatgcacttgaaggagcgagcgtggctttcacgtacgttaaaggtagagaggacaaagacgcagaagaaacgctgcgtttgcttcacgaggttaagacaagggaagctaaagagccgatcatgatcgctactgatttagggtttgaagagaattgcaagagggtcgttgaggaagttgtgaactcctttggacgcatcgatgtgcttgtgaattgtgcagctgagcagcatgaggtttccattgaggatatcgatgaggctaggcttgagagagtgttccgtaccaacatcttctcgcagtttttcttggttaagtgagtaaaaaaaaaaaaaactgaaactcgaactttggttctgaaactaattgatccggttagagttaattggtcgtaatttattgtagatatgcgttaaagcacatgaaggaagggagcagcatcatcaatacgacgtcggttgttgcatacgcaggaaactcaagcttactagagtacacagctacgaaaggagccatcgtttctttcacacgtgggttagctcttcagcttgcaccaaagggcattcgtgtgaacggtgtcgctcctggtccggtctggactccactgatacccgcatcgttctctgaagaagcgatcaaacagtttgggtcagagacaccgatgaaaagagcggctcagcctgtggaagtggctccttcctacgttttcttggcttgtaaccattgctcatcttactacaccggccaaatcctccatccaaacggtaagttctaatttgacgtggttagaccggattgggcattccatcagagtcctctgtttctttggtttaacaaattgatctctgttttggtctattataacacaaacgtgtttttgtgcaggtggtcttatcgtgaacgcttgagcttgcaataagtgcttatgtacatgactctgtttaggaagttcttacaaagagagtatatccagtagtatagtcgtgtgatgtaataaggtgatatgttgttatgtcgtttttttaaaagtagtataatatgaagatgcagagagagaacagaataaaatggtatggttggtttggttaggattacacgaagtaaagcaaactaaaccaccctcgcatatcattaatggaagttatgagatacatataatagtacagaagtgataagtgttttgtctcagtcta

SEQ ID NO: 10765 - DNA, 734 bp, Arabidopsis thaliana landsberg
atattcgtttgaaccatacccgtaatcatatctactgccatacctaggaggataatttgatggttcaacgccgagcggaccatcgtctctgtaatcatgtcctctgcttgttttttgttgttgccatcggccgcttctgctgctgttcctatgtgaaggtgcagcttcccaaagccactcatctgcgttttctgggaagggagcgttaattcccggaaactcgacggtctttttcatttgtggctctggaggagggtttgctttttccaaaatttccccatcctcactctctatctcctcccgagtctccacctcttctccgaatatagttattccagacaaatgatcatcttctggagctagagacataagcacacaatggaaagtgtgagaacatctagtttagtttagctcttgtgcgataccaacaaaatccacttcttttccatgtccatgaatgctaataaaacagagcagaaagcttacctaagtatcctggtgggtacccaatttctcgcattctgtttagccacggaggagggtctagttccttcacaaaaggaaagcaatgatctaagaaatctgaaatcgagcatattggtaagaacctatacacagaaagaaaaggttcaaaattacccccagattcagaagctgacgagtctctgcatcaagtgtgccgggtttcaagccatcatactttccagtttgatttttttgataatatcttgatg

SEQ ID NO: 10766 - DNA, 1268 bp, Arabidopsis thaliana landsberg
acattttcacatacatatacgtaattacgttctatactacacctaaataatcgtaattaatttttagatttgttttcgtcaatcctattacattatcattagagatgttcaggatttgaatgcttacggcggtaaaaacggtctataattgatccgcgacgattttcttttatttttcttaatctataatcttacatactctaatttatatatggtaaatcaaaaacggtctatttcgcaaacggatttatccgtctcaaccaccgtaaccattcacatcctcaaatctaatcctattattatggtgatgaactgatgatagtaaaactattaattatgcaacataaaggtccacttaactactaaacaaaatccaatattactgctgtagattcaaatgctcgatgtcgatatataccaaaccaaacaatcataagtttaaccaactatatatagcttagtaaaaaacgagggcctatattgttgaaacaagtactcttacgattgtttcgatggctcatggctatattgaaaaaagaaatgagaagttttaaagacatacaattttggacggaggtagggaaaattcgaaaatgcaaaataaacacaaaacttggtgaaactcggaagacagcagaatttataagaagaaccttctcctgcttgtgtccatttcaggctgtaatgaaatacaaaaaaaaacacatcagaaaataaaattaaaaatcatcaaaaactctaaagaacagcaatgaagctgctcgtgtccatttctggtgattttaccttatgaacccattcaaattctccacctttggtgtcaaaagttccatgctgtagagtaactagcttaagcgtgaatcgaggaccgcattcctaaaaatccaaagtttaatgatacaaacattgataatgttgattactttttgattcaacatggtcaaaactgacctgaagacgaggttttattgtctcttcttttcctttatcactcttgctttcctttgtctcaaatatgtaactggatagtgttgaccacccgttcaataaaaagttttattggagaatggagcaaaagcaactcgaagaagaaaaggtgaagttatgtaccggtgatgtctgaaaaatataaagtcacgctggttgtggaatgttacaactctcctaccacggaaattaggatccggagggaacagtcactaaaaaatctgaaaaaaggaaaaatctaacatcagcaagaaattcgaagagcccataacaccacttag

SEQ ID NO: 10767 - DNA, 1428 bp, Arabidopsis thaliana landsberg
cattagtcgagtaccaaacatcccacaccaaatttaaaaactccgggtttttcaacaaaaagttaaagaacttgaagggccgcttcgctttgatcgggtctaattccagcacaacaccacaagatgcatgatctgaaaaatctggcggaccaaacaaaccaaaagaggatgggaataagttggaccagctctcattgactaagatgcgatcaatcttctttgcaaccggtctagttttacttttattccaccaagtgaaagagctgcccttgtaaacaagaacagacaattcagcatccaacaaacattctctaaagtctcttatcctcctatccacattgagtgaaacatgcctagagtgctcatgaggatgaagaacctggttaaaatctcctagcatgatccaaggtctattaaaagtgaccggagaagctcccaaagcagtgatctctctccataactcttttctcttatcatcttcgttggccgcatataccacagagataacaatccaagtgcgagaattagggagaagaacctcgcaagtgatcatctgcaacgatttggcaacaataacaacctcaacagatgggtcccataacacccatatcttccctaaatctgagaaaccatagttcatatcaaaaaaccaaccaggcagcagagcattaataaacttcttgtcctttggttgcttcacgtgcgtctctatgacgcctccaaaaataggcctattgaccttaaaccattttttaaagccgctacgatgactaggaatgttaaaactacggacattccaacaaaaaatttgtgtacacatattaatgaccttaaaccattctttatagaagagaccttgattttacttactcttgctccaagattcaccaaaactacactttctcaatactagtcattttatactcattaaagaactttcccgactaagattgtttgtttggtcaatctatttagatgattggattccacgacatatgtaccagcgagtgatgctctttttttggtacctggtggttctatttacttccggttatgttaagaattttgtgaactaatgatgttttttttgggttagctcgcctctgccgtgctcgaagtctgactggtttggctagagttactgaaacagagtttatttgctattgtttaaaatgtttaggctcatctaagattaatttaggttgaactaatatatcctggagagtttatggatgaactaatttaataatgagtatcaaatatgagttggtagataaacagtagaaaactaaggcctcagagatcttggtggtaaaccaatcatcaactgaaagaacaaagttcttcatcaagagtagcaaatatttttattacatcacaagcctcattcaaaaacaattcaaaagtggaacttattttgggaaattt

SEQ ID NO: 10768 - DNA, 466 bp, Arabidopsis thaliana landsberg
tttttgtgatggctatgtatccatctcagagtgatttggatgtgtctattaactttggttatggatcatctgagattcctcgtgaaaagaagctcgagatacttaaaagatttgctaagaagctccgttctctgcagggtaagatatttgttccattcttgttgctgttaaggtgtatgccaattccattattgttttccatatataccaaaaaccccaacagtctctttttagtatatcggtgacacgtgaatacgacattcttaaactgatgagtttcatatatacttattttgtaggagaagggcaggttaagaatgttgaatctatcttctctgctaaagttccaattgtcaaattctttgatcaagggactggtgtagagtgtgatttgtcagtcgaaaataaagatggcattttaaattcacagatcgttcgcatcatatcttaaattgatggcaggttt

SEQ ID NO: 10769 - DNA, 2250 bp, Arabidopsis thaliana landsberg
acattcccattttaaagcttttgatcatcgcttaataaatttataaattgtttacaacaacccatttaaactttgatcgtcgatgtaaattataaattttttcacttctataaaagataatgataattagtatttgaaacgctataattgtttataaaagtagaagatatatatatatatatatttagaaaaataagttaattatttgaaaggacaaaagtaaatcacaaattctaaaagagattcaattaccttcgaatgcatagcggagataatcgaacgaattcctcataatagattgaagaaaatatcatcaacatgtcgtcaattttataacatgattttgttacttgttataacatgagattgtcagaatcagaagtgttcctgaacttgtaaatgccacaaagccaataacaatttacaactgattttagttatttagtgttgttacttgaatatttttcattttgttatttagtcgaattattcttcatctaactaaacaaatttaactcgaaattaaaccaaaatgtcaacccctaattgtgattaagatggaaaattagcaaatttagtgagactaatttttttattttttttgataaaatagtgagactaataatgatattattttatatatatctttaatgatgtagattagttttgtctatgattacatttttctaatgatattctaatgtaatttcttacgcttgtcaatgttaccgtgtatgatgtacttcccaaataatagtatagaataaaatcacattagcaaatgatgaatttcgaataagtgactgagaaaaaaagaaattgagagataaaaaaaacatgaatcagtgaaaaacaagctacattacacgcaaacaattttttcttagggcatggattttactcccttgttaattggtggatttactccatcaacacgcattttgttaatgaaattaacccttttcccatcatatccacgcaaatcgtcaaacttatgggcctactttctgttttcaaatagaacagattcaaaatctgtcaataagtccggcccagtaacagacccaaaaagggtcatcgttcgtcaagtcatgacgccgttcttgacttgcttcatttgaccagacttgcttcgtctccaatttttcccctgaagaaagcaaagagcatcatcgttgctgaagaagaagaagaagaaaatggactcatctttgtcgcagaagttcactcttgcttatgcttctctcctcggaggtattgaatctgatcgcttccttctttgagttttcaaatgatttcgttgacttgatctagttattatacaattaggtattgagatagtgcaagagaggaaccattagataggttggttcccatgacttcacatctctaatatcattgtcactgtcttgagtactatttatccaggctttgtaatgtgtggttactagtctgattgtagtttagcatgtgttgttttgtcaataagtgtattagttgttaaattcatgatagaaaactagttctattgtcttcttctgtccataaatgcgagtgttagatttggatcgtggtgaatagcaatattatatctagtgatgagataatcattggagtttctactgtgatttcttgatcataatgtttcgataatggtgtgtatctaacatataacatgtaatgcgttgactcatggcaattattgtggcagttggtgggttgatgggttacctgaaacgcggaacaaaatatcacttgtcgcaggaggaggttcagctgcgttgttctattatgtatacacggagctcccaggaaatccagtcttagcatcctccattggcattggtaagaaatcatacttcttgttcattgatcttggcaaatcttaaaccagcttatgatgagtccaaagttcaagtatgttaaacaatatgcagtggggtcggcggcactgacagggatgatgggatcacgttacctaaggacgaggaaagtggtaccggctggacttgtgtcggtggtgtcctcgtcatgactggagcttacttgcacggcctcattcgctcaagttgaagtgtctctgctatcttccttggacctattttccaatattgttaaggttttttgggtgggcattcaaatttctgaaaattgttgtataaatgctttgtggtgttgttcttttacaagttcttatgccttgtgtacttttagagattaatgatgctcgagtcgtcattagaaacttaa

SEQ ID NO: 10770 - DNA, 1430 bp, Arabidopsis thaliana landsberg
tattatatgcatgcacatcttaaatatcatctctatgttaaattctaattattgtaccctatctagtactgcctcatgaaataagccatttataacatttgaccattaaacttggggatttaataataatacagagtgaccaaaaacatctttagattgactggtcgaatccttatattggggagcaaaggtcatgtcgaacacaaagcagaaggattctgtttggataccaagtccaccaggcttctaagcttatatatcaagagtgagatttgaacagattgccaagatttgataacaaacttaaaacggaagattagttttgacctccttcattactaccgctcatgaacttaaagtgtaataactaggatttagacctactatgtccacatttactactttagaagatattgttctccatcttttgtggacagcatcagctaatgtattaactgaaaagtccaacaatttcacctaataatgcatccatatttctttttggggaaaaaaaagattgactagtcgaaattggaggcatgtaatgtttgacgtacgtagtcgtcccctggtcccatcaaactagagacggaaagtgatatttatggaagtttctttgggcatgtgaaggtgttgttattatagtcaatggcactattggtatcatgatgcaagttactttttatacatctagtttatatatgtttataatatattctgtatagtaaattgcaaaggcttatttacctaagttttatcaacctttttgggatctttatcttttaagtttgaagaaatgtgtaaccttttttgtgagatctcgtctttcatgtattataatgcaatgcaagtggacataatataagtaggtggaacacaaattctttttataaattattaaagaaaggaaattacacacattgactcaaagaacatgtttcgattgactagtcgaagttggaacatgtgattttttgacgtaatcaacccctagaaaaatggaaataaaagctcagaggggatatttattcaactctaattagttttgtttgaaggacaaaacgtgatgacgtagtcagtagagtttaggcatgtaacggtgctattgttatcatcataggcgtagatatgagcgagtgggcaagctcgctcaaagttctgcgtgtacactgtcggcttgcagttttgctttgacttgaagtctcgggtgcaacaagcctccggagtatcaaactccatgcacgtgctactacaggcgactagattttctctggacattttcataagatcttttggacaagtctttttcagttcaacaacgcaaccagcgctgatacatgtccggctacgctgtgaagggaccaccattagtggaaggttgtaaccgtactcaacactgatggtgtagctgttcattctaaagtagacag

SEQ ID NO: 10771 - DNA, 1276 bp, Arabidopsis thaliana landsberg
catgattttgcggtttcttcattcccacgacacctcccaagatcgaactgcctgcatgtccgaaagaatctttaaacttctttcctagtagtccgtacctaaaatcacaatattcaaaagtgttagaatgcaacgtctgtacgtaacgtgattcattatagattcaaaaagaaaaaaagtggtatatattgaccaatttgctcgcatcccagcaagtaaagtgtcggttttgagaagctggactgtccaatctatggtgtgaatcttggctaccacggctgaggtcactagcctagcgtaccggtacaaatcttcgtcttccaaatcatcatcctcatcctatattaaataaaagtgttcttaattagttttgtacaaaagaaaaaatattttaattaatttcgtaatgtacattaaaaaatttattaaaaaaaaaaaaaccttgagggcgtcgcatacggcgttgtgctctttgatgaagagagcttgcaaagcggagacaccagcccaactgttacgaatgtcgccggagatagctaaaccgtcttcgtcatggagaaggagacccgtctcctccgatatctttagtttcccgtctttgtaagttcttactctatccaatgttttcgagttgcttccatagatgacgctcgaatccctaatttatcaaattatttatggtcatcatatatatacttaaatgtatgcatggatgtgtgtttgcgtcgtccatatatatcatcatctatagaataatttatttatttttcctttgcgacaaattttgatcgtaaccgatcccacaaaaacgtaaatagtaatatgtaacacatttttgatgatttatataataggttagaataaaagaattaccaccaaggtgtacggatattttgcgagccagtcttgatttcgaagaaaccggtagggacttccttggtctttaagaacctaaaggagcttaagggacacttgctcgctacttcttttggagcgacaagttcgatctaagttaccaaatcaatttttcgttaaaaacatatatatgataagtgcatgtgcgtaaatgatggattaaacagaagaataatagaattgacgaacttggtgagtgtcttcaagatgatcaatccaatcatggatcatgaactgaatccaagaagctgcaatcatgttgaattgttttcccgtgtcgataaactttttccttcctaatagttttgtaaacaccaccatggggtctggcatcagtcacttcaaaaaggaaaaaaccatt

SEQ ID NO: 10772 - DNA, 1523 bp, Arabidopsis thaliana landsberg
caatgcgttgattgatgcttgtgtgaaagaaggaagggtttcagaggctgaagaattatatgaggagatgatccgaagatctttggatcctgatattgttacttatagtttactgatttacgggctttgtatgtacagtcgcctagatgaagcagaggaaatgtttggttttatggttagcaaaggttgctttccagatgttgtaacttatagtattctcattaatggatattgcaagtctaagaaggtagagcatgggatgaaactcttctgcgagatgtctcagagaggagtggttagaaatacagtcacttacacaattcttattcagggttattgtcgagcgggtaagcttaatgttgctgaagaaattttcagacggatggttttttgtggtgtgcatccataatattatcacttacaacgttttactacatggtctatgtgataatgggaagatagagaaagcattggtggtattggcagatatgcagaagagtggaatggatgctgatattgttacatataatatcatcattcgcgggatgtgtaaggctggtgaggtggtagatgcttgggatttatattgtagtctcaactgcaaaggattaatgcctgatatttggacatacactacaatgatgttaggattgtacaagaaaggactacggcgtgaagcagatgcgctgtttagaaaaatgaaagaagatgggattttgccaaatgaatgttacgtatagtgaggcttattaggactaagcacattagcttaagtatctcagggaagcttgctagatatttatatccgggtcaggcttctacctgtgagatgtttacccctggaagccaattttggaatgagctaattttagtaccatagatattgttaatattagggcgtaagctgcatagtgtcatagtggatttattgacagacattacagtatcgaagcttgaattgtatgtatagccgatttgtctccgagaggatgtttgcccttgaaatgaataactcaggtcctttgaaacaaagttggaattctatgaggagagctgactctatcatatgaagccatcttctcaagtgtcatgactaatctcagttttcagtttattattgtccattctttcatacactgtataccaatgtttgtttatgtgttcttcaacaaagtttctgtatcaattttttgtatgttacaaagtttatgtatccttttctcaggtttctttacgtgtcactttgaatcaagcttccagaatccagagtgggttgtaaaagaatattaacacttagagcagacgttactactgtaaacgcagaagttagaacagctacaaagccaacaaatacatgtccacgattgaagcttcatttcatagattgtattattcactttgtctcaagtctggaaaaccatgaatgatgagaatagtagagtggtaaaagatctgaaccatcaccaatgtgtgaatgtattaatagatgccagagacaatacaagcttctctaattctacatt

SEQ ID NO: 10773 - DNA, 1221 bp, Arabidopsis thaliana landsberg
aagaacaaaccacaagggcttaaactcgttactttttgccaaaaagttaaataaaaatcactgtactacaagactattttgaaggataggtgcacttaaaattaaaatatattttgttacggagttacctaatgcaccatcttgttggattgtatgtcagggccaagcatgtatggtcgggctactgcatgtattattatctacatccagtatttcgaagaacatcatcatcatgatcaaagatctagcatttcctagttactaaaacgagaagtagttggatttcctagttaacttcttcccactaatcataggaaaggaaaaatcaataagtagttacctaaaacgagatgacgatggatgaatccagccaacggaaaattcatgatgattgttggatttggtcgcttcacttatgtaccgtccagacaagatttggtcgtgtgtttttagtacttctctcacagcgtctcgtgaagctatgaccactgagtttaaacatccaagcttaagactcatgactggtccatatgtttttgagaggtccgtgaatgagtgatgtgggttctttccgaccagatgaatgtttccaattatgggtaaccgtggaggccccggaggtgacttggacaattgacaagggctacgtcgagatcttgcggttgtgaagaaaagaagacatgataagataaagcagaagatgagaaatagaggttgtcctgagatgatgtccatttgcgtttctaagtgatagaattctacttcatattttctgaaaatagcataagatttatagagggaaaactgaagttgacaaaaaaggacatgatatctttcattttgatgggctcattggtcttgccactgcgacctcaactttccacgaaaaaattcaaaactcatttgcgaccgatcacttttacgacataaaagtatacgtacacaagggcctaaaaaagtcgttatgaactcgtataagtcatgaactagactacaaaagcttaattatactatttctatattccttttttatataaatgacaaaacaattatttactgtacgtatctactttgacactaaaattttgttatcttatttatataaaatgttgtcgaaattttatcaccaataacattaatgagtttgtgaactaccaaaaacatataactacgacgtcaaaatggtagatttcgttgtttagcttttgaacatgtttacaa

SEQ ID NO: 10774 - DNA, 447 bp, Arabidopsis thaliana landsberg
acgttttccctctctatatatctatgctattttcagacaattttataagtatctatcactttagaaacacaaatggacatcatctcaggacaacctatgtttctccttttctgctttatcttatcatgttttcttttcttcactgccgcaagatcccgacggagccctactcaagtactatccaagtcacctccgggtcctccacgattacccataatcggaaacattcatctagtcggaaagaacccacaccactcattcacggacctctcaaaaacatatggaccagtcatgagtcttaagctggatatttaaactcagtggtcataacttcacgagatgctgcgagagaagtactaaaagcacacgatcaaatcttgtctggacggtacataactcaagcgaccaaatccaacaatcatcatgagtttccgttggctggataca

SEQ ID NO: 10775 - DNA, 1196 bp, Arabidopsis thaliana landsberg
tgttaatcttcttccatcatcgtcttcccaaacttccacatcatttttcgtaataaccgaaatcacaaaaccatgtagttcgatttatgttacaaaaactatgttaatcacaaaaccatagtttttgggtggtttatctagtgttcactattttatcagcatagaaatcgaaaactatatattttctatttattttcatttttattaaaatgagttaatcttaagaaatttcttattcttattatgcttaaacattaacttactagcccacttggtccttctctagcacatcaatctttatatatatgcgggtccatggaaaaatggttaaagagttcatcaatatttaaacatgttatttgtctatgtaagtgttgtagtacattcatttcttctaaactctcccgaatgattcaaacatacataagcatatattttatatcttaatgatgtgttctttgtttgcatatattatcaacttattgatgttgtctttagcctatattattatcttattgatgtgttctttgtttgaatatgttattattatattatcttatattgatacgttctttgtttgcatatataatcatcttattgatttgttcttagtttgcatatattctcatcttattgatttgttctttgattgcatagcatatatcatcatcttattgatatgttatttaatttgtttgcatatgttattatactattgatattttgttgatacattctttttttggttgttgtgcttcttgcattcagacgcttgcatatctcaagacgatagatttgagcttctccaataatttagtagaagttccggatctttcaaaggcaataagtctcgagacattgtgtctagaaggttgccaaagtttggcggagcttccttcctctgtcttgaatcttcatagactaaaatggttgaggctgactatgtgtgaaaagctagaagttataccgcttcacatcaatttggcatctcttgaggtccttgacatggaaggatgcttaaaattgaaaagttttccagatatttcgaagaacatcgaaagaatctttatgaaaaacacagggatagaagaaatacctccatcaattagtcaatggtctcgccttgaatcccttgatattagtggctgcctaaacctcaagatattttcacatgtccccaagagtgtagtgtatat

SEQ ID NO: 10776 - DNA, 492 bp, Arabidopsis thaliana landsberg
  unsure (1)..(492): unsure at all n locations
tcggggtgatcggagttaagccattcatcggctgcgctgaaggttatcgcgtgctcagaccaccggtaagaagccggagcactgttcgtgaccactaggacctgttgaacattaagcttttgttgccttctgctttcttgtgccccgtgccctccgaatatgacgttgacctccctatcaacgcgcgggaaagcttcacctctccccccttcctgctgctgaggcacctaggctcgccaggctctgctcggggtggggaaggtggcagtggatggaacggtcggccatgcccaacggaatccttgaaatccctatagttctgtagggtgtgccgcatgtccttgtgatatggacactggggagtcgaggatctcttctagtgtttgtactcctccgcggngtgcgccgcgagctcaagcagcaggtggcccgacggtgtgcacctcctcacggngcctctgttcccagcgtttgtccggttgctgattcatg

SEQ ID NO: 10777 - DNA, 1112 bp, Arabidopsis thaliana landsberg
gactgaggcaccaccatgggctgtaacttgaccctcccaccacgtttgttctgtagttcaagaaaaccaaaaatgtaagatgttacaaacttagctcaaatgatcataaggcttatgaatgataacaaaatgaattcattagtcaaagacctgatactccatcaacagctcagcgtgctctcgttcttccacactcgattccttgaaaaacctgattcagcaaaaaacaccaaacaacagataattcatcatcacacagaacgaatatcagcacagagatttcaataccagagaaaaactcacttggcgagacccttgagggcaacgttgtcacgatcgaaatatgcatacaaagcgtgatacacatacgacacgttatactcaacactgcatcaaacgaaaatccagattcatgagagactcaaaataaaagccaatctcatctatataggattcaagcaaaaattgactcaatcaacagatttacaataacaattttcaaatccatgataacaatcactaaaatgtttcaatccaagacggaaaaacgtacttgatctgctcattgacggcggcttcgcactcaggggagtacaaatgacgagcaagagaaagctgttgaccagatggaactagatccatctctttcttaacctcttcgaaaggctcgaacacaacgccgctcaacgtgcttgtggtagtggttgaactcttggaagcacgaagagggaaagagagattgccggattttccagaagaaaccggagacgaaatggaggaggaggaggagaagagaggagagatgtctttcttctctccatgaatgttcaatagagagaaagtagaagcagctttgagaagcattttgttttcctgtgtgcgacgaaattggaggagaaagggttttgtggtgaggcgattggtggtggcggaggagggaatataaagtgaggtgatatgggatgatgaggctgtggattgttgacacgtggatggatacgattgagaggtgggtttgggcgcgtgtcaggcgtgtggtgcattgctttgctggcagatattttttttccgttggtatttgtgtaattttggcctctctttttttggatttt

SEQ ID NO: 10778 - DNA, 1499 bp, Arabidopsis thaliana landsberg
tcattgacttttcgtgaacttccactcttttgtctcattaaattttagttttggtatgtttacctgtcatacaggtgcaagggaattcctaccaaaaaaaggcagcattattacttggtacacaccacgttgtggaggtaaacacttagttatgatgcttactggggaaagttggagatactacatacctgcgtattatgtttccttgcttttgtgtctaatcgtagcagataagaacatatgtgacgatggaagaaactgttgttgatgcctctcctttgtaatatatttttattacatccctggaacgttggtttataatttaccttctgctgcaggatcagtctagcagtgggaaccaaggaccaaggcaaagggctgctgctttagctgccttgacttctgcctttaattcttcttctgggagaacaaggtctccggtaaatagtcttaagctcattattttatgtttctactagatttttttggatacatatatatacaaagatattggcatatcatgaaggaaaaaaaaaggctctgggactcatttctggggttcccattcatgaatctctcagagttacgcaaacctttgagttgcaatcaaataatttctcaaatcacagctactagtgtcccatgttcttgatatgttgacttagacgctcatttctttaactgcagagccgagacagatcaaatggaagtcaagggggtccaagacaaagggctgaagctttagccgccttaacatccgcattcaattcttcaccatcatcaaagtcacctccccgaagatcaggattgacaagccaggcgtcacaaagagcagcagcagtggctgctctttcccaagttctcactgctgagaagaagaaatcacctgataccagcccttctggttagttcttcacctgataccagcgcttaaactaaatatcgtgagcttgtttttcgttttttggccttggtttgattacgctaataactgtgagtatgtgtggttattacagctgaagcaaaagatgagaaagctttctcagaagtggaggctaccgaagaagctactgaagccaaggaagaagaggaagtgtcacctgcagcagaagcgagtgctgaggaagcaaaaccaaagcaggatgattctgaagtagaaacaactggagtaactttcacctacgaacgactacaagccaaatctgagaaacccgtgacagggattgacttcaaacgcagagaggtgaatcaaaattgagccgattttgttctttttctttcgtcttaatttgagcataagttgtcagtatcttattcctcaaaccaatttatcaggcttacctgtctgaggtagagttcaagactgtatttgggatggagaaagaatcattctacaaattgcctggatggaaacaagacttactgaagaagaaattcgacttattctaaggattcacaaaaaaaattagcaggtggaaacatcacaaacatccttagat

SEQ ID NO: 10779 - DNA, 1874 bp, Arabidopsis thaliana landsberg
tcaacacactcatcttcctcccttactgcagctaacttgaaatgagcaccaactggtgcgttagtcattttagctccactcatattaaatctgtccagtacctttctaatgtagatttcctgagacagcttcaaaactccaccttttctgtctctgtaaatgtcaataccaagaatccgactagcacctcccatatccttcatttcaaactcagtacttaactgttctttaaccctgttaatctcagccttgctagctccagcaataagcatatcatcaacataaagcagtaagtagatgaaatcatgttcacttacatgcttgacatagacgcatgcatcatgttcactcctgatgaactgttgacttgacataaaacgatcaaatctcttgttccactgccgaggagattgctttaatccgtacaaggatttcttgagcctgcaaactttattctcacttgaatctgacacaaagccttcaggttgctccatgtacaactcttcttccaagtcaccatgcaagaacgtcgtcttaacatccatttgttcgagttctaagtccttatcaaccaccaaagacattagaattcttatcgaaacatgtttaaccacaggtgcaaatatctcctgatagtccactccttctctttgagtatagcctttggctaccaaacgtgccttaaaccttgttggttccacaccaggaattccagacttcaatttaaacagccacctgcatccaataatctttctgtctttaggcttgtccacaagatcccaggttccatttttcattaatgaatccatttcatcatgtgtagccatgtcccatttttcacagtcctgactctccatagcttcttgataactttgtggttcctgtacaatgcagttttccacaacaaccaatgcaaatgtcacactgctttcttctgtgaatctagtcggagggttgatatttctcctgactctatcccttgcaagcttatatgtagtcagtcctgtccttttgggagtctcctgcgttttctcagagtactccacctcttcttctgaatcagaactctgttcaccttctgtaatcggctcactgtcactctgaagttgaataactccacctgacccgctagcctctgcaaacttattctgctcaacttctgacgatgtagtctctttctgattcagattgtcagtgtcatcttcttttactttaaggtctctgtagaccactgattcctgaaacacaacatttctgctgatgacacatttttcttcttcaagtaaccaaaccttgtagcctttggttcctgcaggatatcccaggaagaaaccttttagagctcttggtttcaattttccctgatcctgatgtacataggcaatggatccaaatttcctgaggtgcttgtaaccgggtttcctattaagccacatctcttctggtacattgtggttaatagcagaggcaggagatctatttatcaagtatgctgcagtggcagctgcttcagcccagaagaccgcttctactcctgacttattcaacaaacaccttactttttccataatagtcctattcattctttctgctactccattttgctgaggagtgtatgtgcaggtcctgtgtctctcaatgccatgttctttacagtaagaatctaacctagagttacagaactctaaaccattgtctgttttcagacacttcacgttcttgttaacctgattctcaactaggcttttccactcacaaaacttatcaaaagtctcatctttagacttaaggaaatacagccatacctttcttgttttatcatcgatgatggacaagaaatatttgtttccctgagatcgatggggttacatttg

SEQ ID NO: 10780 - DNA, 3027 bp, Arabidopsis thaliana landsberg
tcgcccttaaagtaaacccaattactcttgcaaaatgtttttcaacatgcgggtattagaccatctccatcagtaaaaataagaaaagtttctcaaaaaaaaaaaaaaaaaaaaatattttaatcaaaacagatatattaattattatttaatagttgaactaataatatgataacacatgtccaaattggatgagaatagtttctcaaattttctcttccgaaaaacttaactctccttctctcctactttttctcacctctctcatactttttcttttttaattattttttttattgggtatcttattgagatacttccaatggaaatgctctaagatcaagtttaaataatgaaaatggtcaagaaacctgtaattaattcaaagtttattcaaagggaatatggttttctaaatgggtgtagttagaacatacagtatatatatacatcacactctcattctatctttcttctctttacataatttcttgaaacgcaagaaaaaaacacgatcattctatctcttttgctgtgctctagatttaatgtcagattctgcagagatgcaacagccggagttactgctgaaatccatgaataaattgaatgggtatcatccacaactaatcattccaaagaagactctcttcaagtgtgatctcgatgacaaacagtcacgactccaagtttcttccatgcatatggaaaattcaggcttcttaacggaagatgaaaaacgaaccatagaggcacaaaagatgaagaaacgacggacggctggtttgagagtagcttttatagatcctgaatcgcaacagtacgtgcttgagttacataagtggaccaagagctatgcctttgttaaaggttggaataaggtggttgataagaacgacaaaacgttcaaggtgggcgacgttttctctctctgggttttccgttgcggaggagtgaaccctgttcacgacggcgtcaatctttcgggtggccacgccgactctgttgttgacggtttggagcaaggcagtctctgttttgttctggttcctgcaaaagtttctgttcacgacggcaatcttcctcaagattctggtcacgacggccacaacgacaatcttcctcaagattctgttgaacctagctcttttttcgacgagtcttacgagttaaaccacctgttctttgatcaagaagacagtcaaggctatcttcccgacgaagatgaagactttggcttcaacgatgatggctcgattcgtgattccggtcactaccagtgaagatgatgcttcagttacacttttggtattttgtttcttgactgacacgtatgagttttcatacttgtatagtcttttgtttagtttgcttaagtcaatttcgttgaggaatgattgttctctcattgtgtttagaatgcctatacttaaattcttgatgggtttttagctaaaactggttaatctgctttggtttgtactattctgagtttgagtcaaaccagatttgtttatcaagatttgcttacgatgtactctgttcatgaatgatagaaaacacttgctacgtacatctaataaaacagatttgttgttctgagaggattgagttcactccaagtcacagcaaaaaccacatagatcatgattagggctttgctaaaagtagatgtgggccatgtggctaagaccagtttattcttcagtgatgctatgatcgttggtttcttttctggtaaggtaaaacaaagaacaactttgatctcaaggctattgtcacccaactaattctgttttgaggagaacttgggaaaaatcaatcagctgaattttagctccctctgagatccctaatacgcggaagatgccttcatggagcaccaaaacgtaaattgtcatcagaaacggttctcttttgtgcatcatatgcatacagttgaagccgcaacaaagccttttccgttgcatgataaaccacagcaacctgtatcagtaaagaaccgatacaatgtttgtagcagattaacggtcactttcacgtggcaacaaatctctgagagtaatttcaagtgatcagtgtaagcatacttgatcaagtgaaacaagaaacaaaactaataagccaacattacttaaggcagaaagcaacatcgatagctggcaaaaatgtttctagatgatacagctgccactgttttactacttaaaagatctaatgacctaagacaaaaaaaaaaagagagtactttatccattctattactgaaagaaaccaatctctgcagcttgtgacaacaattccaacattagcaaccatcaatatctcctcggcattttgtcgaacaaatagcgctctctggaacagcaatgttataaccctgaagtatacgacgaagtgcagtattaagaccataccatttgttcatagtagtgaaaatctgctgcgagcttatactcccaagtttgatagctttgtgactcatagattcaagacaattctcgagctgggttttgcaattggacaacaatggtgggtcaacactggtccaagacgtccatggatatgattggtggtgatctggatggtgttccgttatcgattgcgcaaaatctacatagccagcgagatgtggccctttgttccaatctccgagtagacctaataagaacgagatcgggaacgaatcaaaggcacgatcatttgaacaaaagtggcgaaattagggattcaaagagaggattttacggccgaggatcaatgtggttttgccgacgccacgaggaccatggaggatgagaggctgaggaacaccgtggcgttggacatggttgttgagaactgtttctagaagcggctttggaattatcttccaatgtttattcaccatttctctgcttctccttcttcttgagctcgatcagtgtatggggtttaaggacactcccaaatctcaggggaaatgttcaatccaaaaccctggagggcttaaagcgttcaaggatctctcgccaaacaaaaaacaaa

SEQ ID NO: 10781 - DNA, 1206 bp, Arabidopsis thaliana landsberg
tattattaatatagacatccagctggaaagatctaaaaagtccttcaagtatttttccttcttgtctactcacccaagctttctaacttgtcttttggctgcttggagggtgagatagcggtgggttcttatatgttttctttaggggaacatttaaaggctgctaagaaagcgtgtagggagttgaatagggaagggttcagtaatatacagcagaggacgagtgaggctttgtctaagctagaaggaattcagtctcagttgttgacggatccgtctgattctctgttccgggctgagtatgttgctaggaaaaactggaatttttttgctaaggctttggagacgttttttagacaaaagtcaagaattaagtggctgcaggaaggggatgctaatacccgtttcttccatagagtcgtcctagctcatcagatatcttagaagggaggatggtgttagggttgagaatatggatcaagtgaaaggcatgattgtgacttattattctaatctcttggggacagagagcttgtctacttgcccttattttgttgataccattcgcgacattcatccttttaggtgtgatagttctcttgctgagaaattcattgccattccatcggaggaagaaattgttcagacactcttttccatgcctaaaaataaggctccgggtcctgatgggttcccggctgagttttatagggagtctttgacggttgtgaaagatagtacagttgctgcaattgtggaattcttcactactggtcacctactcaaaaagttcaatacaacggccatcactcttattccaaaggagattggcgtggatgagttgtctaagtttaggcccgtgtcttgttgtaatacaatttacaatgtgattacaaggttgatttctaagaggctcaagctcttcatttctcaggctgtccaggggaatcaagtgggatttatcaaaggtcgtcttctctttgaaaacgtgctactggctacggaattggttaagaattttcagatggaaggggatgtcactcgcggttgccttcatattgacctatcaaaagcttatgataatgtcaactgggaatttcttttcaatatcctttcggctttgaatctgtctcctgctttcattggatggattaaaatctgcgtctcgactccttcgtacagtatttttttcaatggagagctgat

SEQ ID NO: 10782 - DNA, 1639 bp, Arabidopsis thaliana landsberg
agtgttgaatgataccggtaagccgtgggtctggtgggactatgtgactgactttgctatccggtgttcaatgaaggagaagaagtacaccaaggaatgcgcagatggaattattaagtcccttggtgagtataatgcttcattacttcgatggtatttgctcctgtggtatcatttaattaacatattacctgtggctagaaattagtctagaaactgaatagtattttcagatatcagctcatccataatatagaacaaccaattgattgatataaatgagcttaccttgtatggccttcttgaatccttatattcaccaagtggatattttgttactttcaaatttgtgcatttcatcctaaattttctgactatcagctatatatgcattcaggcattgatctcaaaaaggtggacaagtgtatcggagaccctgaagcagatgtggagaacccagttcttaaagcagagcaggagtcacaggtttgcctttttgtaactaattggctcttacacgtcttcccaagatcttgttggttttaagttgccatatattctccattcctcgaggtgttcttaaaatgagtctacttcaatttcagataggcaaaggttcccgtggagacgtgactatactcccaactcttgtcgtgaacaacagacaatacagaggtattggggaaatgttgacttgtcagtttttcctccctttctacagcatctttcttatgtttttgctaattgaattatctttcatgcttttaggtaaattggaaaagggggcagtgcttaaggctatgtgttcgggttttcaagagtcaacggaaccagctatctgtcttactgaaggtactattatccacgacatttgcaactctattttttttaacagaaaccacagttctcttgataggccaatatatattttcaaaacttgcattagagctatccttaattctttatctattgtttatatcatgggagagaaggatagttttcagacatgcttctgatttttgcagatttggaaactaatgaatgtttggaaaacaacggtggatgctggcaagacaaagctgccaacattactgcatgcagggtatcatttgggcatgctattcttttcattttctaacttttggttttgttgttgctactatgactgattactcttatttggtatgaatcggcattttaggatacttttaggggaagattgtgtgagtgccctactgttcaaggtgttaaattcgttggtgacggttacactcactgcaaaggtaaattattttttatttgtgtagcttaacatgttttgtgtggaacaagatacataacaatgccataccctctgcttagcttctgtattccacaagtatttgttactggtagtcaaacaatactctgatttgtcccttgtcgatattttcttggaatcaacttagatggtctatttgttgatttgtaccacctgcgagtatagtatcaagattgataaataaaattgtcacaatcattgattaaattttactttgaaaaagtttacacttgaagaaattcgttgatgtgactgagtggaaacattctaatgttttttatgcagttctctgaattttcccttgcgtaatcatagttt

SEQ ID NO: 10783 - DNA, 1709 bp, Arabidopsis thaliana landsberg
ctacctcatgtccatgtctactcaaatattctccggccaccttggtaacctcttactctccgccgcttctcttggtaacaccggtattcaagtcttcgcttacggtctcatggtaacaaccaaaaactcctcttcttgtatatattttttgtatgaatgttacgttttatatcattttcgtctatatgctatgtttttttcacatctttaaaattcgagtttttttcgatgatagctaggcatggggagtgcagtggagacgttatgtggtcaagcgtatggtggtagaaaatacgagatgcttggagtttatctccaaagatcaaccgtattactaacactcaccggtctcctccttactttaatctacgttttctccgaaccaatccttctcttcctcggtgaatctcccgcaatcgcctcggccgcatcgctcttcgtatacggtcttatccctcaaatctttgcctacgcagcgaactttccaatacaaaaatttctccaatcacaaagcatagtagctccaagtgcttatatctcaacggctacgctctttgttcaccttcttttaagttggctcgcggtttacaagcttggtatgggacttcttggtgcgtcgcttgtgcttagcttgtcgtggtggattatagtcgtggctcagtttgtttatattgtgacgagtgagaggtgtcgtgagacgtggagaggttttagtgttcaagctttctcgggtttgtggagtttctttaaactctccgccgcttctgccgtgatgctttgcctagagacttggtattttcagattctcgttcttcttgccggacttctcgagaatcctgaacttgctcttgattcactctctatttggtaagtcctatttttagtcaaactcaatttaattatttcctttaaaatttatttttactaattaattttgtttactatattaatttcacctattgaccataaaaaataataatttaagtttatctattctattctaatttgcctctttggtttccattttacctattctagtctaatttgtcgtccacatgatattttatttatgttttatcataggtagtagttattggtttctacaagaaaagactttttttatatcctgaaactccacgtgaatatgtatgattatagacttttctgatgaattattctagtctttctagattcgaaaaaacttttagtattattattgttcgatataaaaagtataaatagaaccaaactttttgaagggagtacaaagcaaattttggttgtagatatgaaagttaatggcgaacaattttgacacttcttccgctacagacaatctatggtcacatcacatttcttcttttcagtcttctcgttttgttttttttttgggaatttgtttttgtcttcttcttaagcagtagaatttaactttaataatttctgtatgaccatatgaaattatctcatatggaatcgaataaaacattatttcttcgtccaatctgcatctacttctttattttgtcgaagatattatacaatattattctagtactaattaggttaagatttttctaagtagtaagtactagatttttaggttttcaaaagttctcttcctctgttaccaaacagaagcagccaccaaattaggtagttgcccccatcaatatgaattcctttttatatatgaatcttgatatatg

SEQ ID NO: 10784 - DNA, 528 bp, Arabidopsis thaliana landsberg
  unsure (1)..(528): unsure at all n locations
tttcgcatttgatctgatttgcatttgagagacggagcagggtgagaaaattgagagttacgagttcttgtgttcttgatttgagtttttccattctcactccctttctcattatattgattgcaaagtgaatcgatggtggtggtggttgctagtcactactagttttatacgtagtggttagacgatgtggctcaatgaatcgatggtactagtggattgtcggtgttttgtttgtctcttcgatggactccggttttgcagttgaaaggatcatgatgcccaanagggggtgaattgggcttctctaaaattcccataaaagttaaaccctaagcatgagcccaacttcacccaaactactagcaataggtaaatgctatgagatagacaacagccctaagtcattactacaaatactaactaagcaaatacacaaagtaaaatgctcaaagtaaatgcggaatgtaaagttagggcaagaaaactcctctaaattcttcacgatgtatcgaagagatgacactc

SEQ ID NO: 10785 - DNA, 550 bp, Arabidopsis thaliana landsberg
gaaaatcgaccctccaagcatgagtcgatcaacatttgaatgttcctgtcccgtatgaggtccagagcctaacaaataatacacataacaagtaaagttttagccagaaagagatttgatatatactcagcaatgatccggtgaagactgatagatatagtatcttaatcataagcttacatgacttggaggaatgtgttttccgctaagaagatcaagcaacagagttccataactgtacatcacactttctggtgtcacacgacctgtagaaacaaacacacaaattaatatgtcagaagaaaactagcgtcaatccgaataataaaaactaatatgcgagagtctaagtaaagacctgttctgagattctctgagggagtgatcgccaggttggtgcaataactcataccgtctctacaatttttcagtaggccgaagcatgaaagtcttgcccttgacccctaaaaacgcaaaacatatgataatgtttctatattcacgcattaacattggctaacgttaaaaataagccaacatataagaatac

SEQ ID NO: 10786 - DNA, 1067 bp, Arabidopsis thaliana landsberg
taaaagaagcatggtgcctaagtaagatacctagagagagctcaatagaaagaaaccaaaggttcattaatggtttttggttatgaggtgtttttctcgtggatgttataaataataactgttttaatattaatattttgttcacagtttaaattatcaaaaggcatgcatgtcaatataaagtggtactaaacggacttattagttgttatcctaaaaaataagaatagggggaggggggatgtatcgtctaattatctatatatgaatcatattgttggaaaaacatatttgtattactcaattttagattttatacatgccagcgaaaggagtattcaccgatccaacccaaagagttccatctttttcttcaacctcacttatagatatccacttattttcatttttaccttcgaatacctctaatataacgccactatcctcgctcaacctcacggccatgccgttcccattgtacctggcccaaaccgaatggaccttcatccaatccaccggcaggcccaaagcggcacgtccaagccacgcgttcgacatggcgaactttgtcagctttgagtgttttgtgttcaagcctacccagaatccgccacgtggacttctctttatgttgtctggaaacccagggagcccctccgcgaaaatctcgtagttatcgtgagattgagacgttaccgacgtttcgttgagccagtaacgtaagatacgacacatggcggtctcgacgacgagaaggtaatcaccgttttggcttaaagcgacaccgtttacaaacgctaagttgcttagaagagtggtcacttgtttcgtgtttgggtcgtacttcatcagtctaccagttttgtccccactcatcatcgcccctatatagttcctggaaaaaaaaaacaatttacgtactaataatgcatcatataaacaaaacaaaaaaaaaaacatataaacaatgatctttttcactcatataaaaacatgtttttcattaaatttccaagaattttgtacctccgttgataaaccgaactactgtcggtaaagtagacaac

SEQ ID NO: 10787 - DNA, 788 bp, Arabidopsis thaliana landsberg
agcccatcctactgtacaaaataatagtaatatttaaaaccagcattggttttataaaagtcatcaaaaacaataataaatccaaatgaaatgcaaaaataaagaaaaataatgaatgagaacatggagatcacaacaataaaatttaccaagaatggggtcaaaaccatggtgcttgagctcacgatactcttgacaaagagcaaacggcatacagactaagtgagtgatccaatcgggagccggagcatccggtaacccgaacttctttcgtatcctggccctgaacatgtatgaatacacaaaacttgccccggtaaaaaatagtgctccgtacaacaacccagctgtcgcacaagctgcgtgatagaaatatgtttacacacatgagacattacaatctatgagtgtttttcttaataaaggtttgtgtatgaatgaatgacttacgcgtcgcgcattcgtcaacgatctccgcaatctgtccgaacgtgacgcatggagctatcaatgtgatcacggctaatccaatgcacaacaacaacaagaacaacaaaaaatggagaaaccaatcgtagaatatagaatgtttagttttttttgttgtgttagaaagttatctaaccattttcactgtcgttcatgcaatcgaaaagttgagaactccactgattttgtgtttgttggtaattgaccggtatgcccgttggtatgtttgccggcttaccaattccaccgttatgggaatgtaccttgttgctcgggctagccgtatgttagccgaaggc

SEQ ID NO: 10788 - DNA, 1323 bp, Arabidopsis thaliana landsberg
  unsure (1)..(1323): unsure at all n locations
aagtcttatactttttgttgtcttattataggagacaagagagattagagtttctgtattattctggattagctgtagggaagggaagtgcgagtggttcaggtgtttcgtttcagaaagaagagcagcctttagccaaatctgaagctggtagtagtgccagtgagaagccagatcagtcagctcctggtgcgctgtttgaggagaaggcacaatctgctaatgattcgtggaggaaacttcactctgatcctttgcttctcatcaggcagcgtgaacaggaagctcttgccaaaatcaagaataatcctgtcaaaatggctcttattcgtaaatcggtaagtttcttttgttcttctacatggagggtttgggaattgggattacattggatatatgttattggctttcttttccttatacatttactgaccctgttggagagtttcttttacaggtagaagaaaaaggaaagggtaaagatggagacacaaaggagcacaagaaaaagcataagcgtaaaagtggaaagcatcagaagcaatcttcatccagacagcggtctgattcggaagaagattctggtgaagagaataacggaagaaaatctcaccatcagaaaacgtcagggactcatgacagacactatgaaagaccaaggtcagttttagaaaatgagtcaaaaggaagagagagtcgtgataggcactatgagaaacgaaggtcagaactagatgatgggcacaaaagaagagagagacatgatacgcactatgagagacgaaggtcagaaatggatgatgagtcaaaaagaagagaaagtagggataatcactatgagagacgaaggtcagatttggatgatgagtccaaaagaagagaaagtcatgataagcactttgagagacaaaggtcagatttggatgatgagtccaaaagaagagaaagtcaagataagagacgaaggtcagatattgatgatgaaccaaaaagaagagatgctcgaccgaatgagaaatatcgaaatcgctcccctaaaggcggtgtggaaagggaaaatcttaagagttatggtcaagaggataaaaagaggaaagcagaggatttagacagtggaaaaccgaatgaataccagaatagacgccggaaaggtggctctaagctatcagaagaagaaagagctgctagattgaagcaaatgcaaatggatgcagaggtgcacgaggagcaaagatggacaagattgaagaaagccgatgagaccgatgcagtggaagctgataagaacaaagtatccacgggcaagagctntttggacgatgc

SEQ ID NO: 10789 - DNA, 1016 bp, Arabidopsis thaliana landsberg
gaaagtgcattgacttacttgaaaagaaagaaaaaatctcttgtttctacttctcaaagattgcgagtgagggcttagttattgtttaatttctggtttcacacaaactagggaccaaaaaatgtaaaatttcgcatataatcaaaagaagaagaaactttacccaaaaataaaataaataaaatcaaaaatcaaaagaagaagtaaaaaaacagaaaatggaaaaggaggagaaacctgttgcctaagagttgatgtaagctgatgatagtatcttcttcatgaggagtgaaattgccacgtttgatgtctggtctcaaataattaatccaacgaagcctgcaactttttccgcaccgaagtagccctaatcatttcacaaacaccattattaactttacacaacaaatatacactactatatactatagaacaataatacacatgctagctaggtacaaaattattttgttactgatatatacatatggcaaatagcaaatataaaatggcttatttaccggctagtttagggagagctctccaattgggatggccatggagactaatataattgatcaagattcgatcttcttcagcactccatggccctttcttcaatcctatcttctcacagcatggtcttctccccatctttttcttccttgtcaaaaactaatttaaacgaggagagaaagaagaaatggaagaagctaaggtttctattcgtgaaagcaaaggaagccaaatgttggaagtaactagtaagtgtacgatggctaagtgtgttactatatttatagagagagatataattaattgggaccgtaggaaaatgacaagctggaaattatttttctacttttggtacacaaaggccaaagttttcccaacttcttttcctttacctttttcaaagaatagttatcttaattttttcataagtcttaccgaggaaatgctaaggccatgatatatcagctattgtgatgatttgattttaataagcaatgaag

SEQ ID NO: 10790 - DNA, 649 bp, Arabidopsis thaliana landsberg
acattatattcctcaacgagaatcgctttagcttgatcgcaaaggatcttcacgtctgcttcacctaacggcttacactccattagctgttcgatctgacggtcgagatctccgtttgacggcatctctcgtcgtcgtctcctttaacctttaattctaaatctaacaacgattagccaccgaatcgttgtaaatcgaacacgtcggcgacggaggagtaggaggagaagtcgccgatggtgttagaggtggctctggctcgtctttggttttgtttctctcatatcacacaaaatggatatttattattctttacacaaattttttttttggtttccaaatttgttaacgaaatttttttagtttgtttcttaaccaaacctggtcaaaaggaaatgacattggcaaatttttaatcagacaggacacctaaacttcaaagtgtttttaactattttgaaagtcttaagagttgcgacttctatgtaaatcaagactattgtataatgaaaaattgttcttgatttcttcttcgaattaaccaagcaatgattatagtaacaatttcatatgtattatattgtccatagtattaagctcaatttcctttggtatcgatcaactcatctgagattttctaattagttag

SEQ ID NO: 10791 - DNA, 1218 bp, Arabidopsis thaliana landsberg
cctgtactcatttctcaagctttttctgataagaagaattgaagactaaaagtacattcccatgatttcagataggaaaagtacaacattgcttgaagacccacttcccactcttgagacagcaaagaaaaactgcaccatccacaaactccaactcattaactaaaactacagcattcaaattaaccaaaaattcagcgtgcagtttgttatgttttcactacaaccacaatactcatctgtgactagcagtctagtatacgcagcttaaatagtgaaaggattcttctatttaaaacatgattgcctctaagaagtagcttgattaaatggtggggatacaagattgaaactaaatcaaggactgtatgagtaatcatgtgaatgtgtttatgcacaaattcaaaggatccagaagagtctttgttgaatagatgacagtttagaggcacaccaatgaaaaaatcgaaaaacgagaatcataattcaccttcatcaggttcgtcaggaatcccctcacagaaatcacaatcaacatcccaatgaacagcagggatatatactgcgaacaagaaagaaagaaacagaattagagataagtctcacaatctagcaaaccagacgcagaaaagttgagagaattcagcatatgttttactttataatgataaatagtttggaatataactaggccctaggacagctctgatctctttaaccatctaactttccatcccatcaaaggcttagagatagtgacttaatattgaagaaataaatgctttaggctttcaagtctagaaatactttcaagtctagaagaaaaaacgtccagattggatttctttagcttaattactctatcattagaaaatagcaacgtaaggtaacgcaaacctgtgagaggagtgcagcatctactcctatatcaaacaaccgcaagaatatgctgatcatcgtcgtgacaggatcttttgtaccggcctgtaaacaagctgattactaacaatttcaagtagtaagaggtgcacatataacccattaaagaacggtagtgatacataagttaacaaaaaaaaaatagcgcatgtgggtacctctttgaagacaacactttgtagagactgcaaaaatagagcacaaaaaaaaggagaacaagagttactcatgttcaaaacgacaatagtgaggagacttttaagctagatcatcattaga

SEQ ID NO: 10792 - DNA, 1317 bp, Arabidopsis thaliana landsberg
  unsure (1)..(1317): unsure at all n locations
tcatattataaaagagctgatagatcgcttctagtgaaagaaaatgttaaaaagacatgggttttagtttaactatattggttatatttttcctgaaataatttcataattctattaaaaatattgataaactgaaacactaattttcttatagtcaaatttagtgactcgggtgtcggaaagtttttgaaataaacaatcctcatatattttcatacttagacataaggttttttgttgccgacctatatgatcttttcttaatttgcgaaaaagcccacgtaatccccaaaaaaataaaaaaagtataaatgtactgtaaaataatccgggctacgtacggacatacaaatctccaattttatattttatgttattgaaaaatcaacttatatattataaaattgtctttttaacaataaaaaccaacgtgtttattgtttggctggaaacagaagtcgcacggtcttgccattggttactatcttactggtggtggtagataccatcatcaacacgaatattctttggttgtcggctagaatattttaacaggccatatttagcttttggttgttggctagaatattttaacaggccatataaaatcactttaggcttcttctctacaaatcatgtacttggtaacataagctagactaaataaacattagttgaaagtaataatatggcagaaattaacagcaccttgtaaattatttgagattacatataatattaatcttagtcgacgaattttcaatacatatttattttgttttatgtcaatttatattttgtttatttgtctgtcgctagactcaaccatattaaccagcgacagattacattgttcgtttgtctgctgttatattcatcgatcaattgcagcgactattgctaacaattgttgttatctttgcggtttagtctcctgagccggttttatgtcttgcgaaccggttcttcaactccatcatttattctatcattagtcaaaaataatatctcttacgaactacttcgtttaacctataaaaatcgtttaaaaaaaatccagctatctcatacacgaagctgtctaaactccgaagcaatttataacaacgtacctcatacgtgagagtggtgcaagttaatcccaccatcactataatagacggntttctaaaagcttgaaaatatgagagatgacaaagctcgacattgataagctttgatagagttgaaatatgactgttccaataacgaacagttagagatatatgagctttccaaataacgaacagttagagatatatgagcttctttatatct

SEQ ID NO: 10793 - DNA, 633 bp, Arabidopsis thaliana landsberg
tgtaaatcagtttgtccaacgtgaataacacatatgattggtttccaattatagctctgcactcatcctcaaacttggtattttcagctgatccatctagcaaaccatacaaaaccctcataaacctgtacaacacacagatcagattttgatgggaacaacatgtatatgattatctacataggctagtataaaaagttgtacaaaggaaggtacctcgcataaggatctccggcattggtatcctttaagtttttcgatttcagttcaccgcctgagcaattcctttttgcatacaaaattctctcgtacaggatctgaaaatgcaccacgttatctttgctagagagaatcaatttcaataaataattaggtaactcacttggtgaagcctaaaaagaacataaaagtcgtcattcccatagaaaacttggagatcttttgttctctcatcgcataaaactgctgcgacatgctttgaaaggggtctgacggataagagaacacgttctgactgtggaagcagctcactttctccttctaagagatgtggatccattccctccgcttctccttcactctcagctttaccatcgatctcatcatgctcaccattctcctcctctgctatct

SEQ ID NO: 10794 - DNA, 1750 bp, Arabidopsis thaliana landsberg
tttgtgtttaagatgaaagcttatagtcattatgatcgagtgagattcgcgcattacttgaacccgaaaagggttcaaagagttatatgcagcggagcggatttgttcgatatgattcccgaggaatacacgtttaaagacatcatcggtaaaatgggtccgatcccgcattcttactccgcggttcatcttccggcgtaccttttagagaacgcggagaggtacaagtttcttcttccggggaactgtttgagagatgaggaatgaattggttattgtaactaatatgatatggaatactactactactactaactcaagattattaattctttggtgagttattttttgaaagagtttatggcgattttattggtcactttcgtgtacatatacaatttaatttatatttttatctctttgggattttttctaagacaagtttttgttattcggcaaaaatcgaagatggtgagtgtggtatagtccacgttatggcatatgcttgcacgacgagcaagccagtgaacaaaatatgtcatgtcaatgtattttctattgctgaaactatacaaaaatggacactaactagaccggccagtgtcacatggctatgttactggggaaagagtatgcggaaaataaattaaagtatataagagaagatgatagaaatatttaacgaagtattgattgattctttattggggaaaaaaaagaaaagagtataggttgatctatcaaaccgacttttagtgttaggctgcaaatgattgatacctctcagaaacatgtatacatgcatgttttctttttgtcgacgaaaaatgtgtacatgttaattataaatatatatgtgtacacaacataatttacgatataaaaaaaacgaatccttaataatcacttcaatcgttttatggatgttttatgtataccattattagaatatgaatttctaactcaaaactaattagtaataaatgaaaaagtttatatttatatatgtcatttaaagttctaatcaatttctactgtgagatattattaaccctaatattatattagtttaaagtaaaaactagatcatacttagtcaattattatccaatcgcaagagatccctccaattaaaatgcgtgtagccaatgttggcgaggttatctacaattgaccaaggattgtagacatgcaatatgttgtagttcctttctttcaggttttgaagtctccaagtaaaaccacgatcgccactgataagcatcacattcgccaatgtgcgactggtgcaagtccaaaacacaatcctcctttgaatttctttgtcactggcttgtttttctttattctcaagataatggtactcgaccccattgtcttcctatgttcgttgaatttcaggggaagaacacgtttataatttgccgcaactggaacaatctttataggtcttatgtatccttatccctcaacacagctttaaccgtaggaccaaaagtggtgggatcactatcatgtggaaccccacaaaattctatgtacaacattgtcaaggtccaagctctcgcatagattggagtgtgcatgcagtactcgtcgacaacatcgacactatttatctgtaaaaaaaacaaattttgtgacatttcctaagttcagagcaaagattaacaaagtaagttgaacagaatctaatttcaatgcctcaaattaaaaatctccgatagaaaagtggtcgtagtgttttagt

SEQ ID NO: 10795 - DNA, 1389 bp, Arabidopsis thaliana landsberg
tttgggttttttatactctagagaattgactgaacatctggatcgagagaactcatcttcccataatactaagttacttgaatgttgttttacacgatcttgtagaccatagtagttttgatcaacaaaatatcattttacaaacgatagaaagatagagagcatggagtgtatttttcacaatgtctgtattttaattaacagatggcaagcatgcatactataatattaatctagttagacaggtcaatatgaggatacttctacattctacatatttgaccttcgtcctctcagcgaatagaagagccataatatacagtacatattatgatataatgtggaattgtggatatacaagtctatccattttcggattttccttatctttcatacttttatccactggtccagatatgatgaagtcaaactagtgattgtagtaatttagattttgaaaacagaataatttgctatctaagaaataacaagcaaaacgtttggcaaaaaaagataaaaaccaagccaagaatttttggtcttgtttcttgactcttgattttttacttaaaaagtggaaactttatgacacttaaatgtgtgtattgttgtaacctatacatttttctttttcttttcttctcaagtctatactctaaaaaactataacaaagcttgttttctctctttttatagtttaaattccatttaaggaaatgtaccggtcaagcgaatatggtcgagggttcgcctcagaccatgcttaagaactgcttggttaccttgcctgaacccatccccatatgccgatgaagaatccgactcgatttgatgcttgaaaaactcaccaagtttcttctcaaaatcagacctctcacctttcttggacgatgctgacaccacagcagatgatgaagaagatgcgatgtctactaatgtagagccagcataagtctcagattccaaccacatgtgtgctaaaacttgacatattccttcttccacttctggtctaagatttggataccctacagatatacacagagcaacaaaacattttttgatatttccctacgttcaattgctcaacataatgagaagggagtgttcttcagattaccatttagtcgaagccatgcatgcatcatctcatgagcaaggattgacccggttaacaaactgtacaagtgtaatacgaaaattttagatatcttataaagacaaaaatttggtttaggagtgtgttgagaagtgtttttcttttaccgaggaagtccatataaaatgagaatcgcagtgacttcacaacgacgtatcagcctgcaaggctctgtgatcatgtctattaacttgtagcctgccccaattcttggtctccttaacacctat

SEQ ID NO: 10796 - DNA, 958 bp, Arabidopsis thaliana landsberg
ataaaccgaaaaaaataaaaatagaaacttttttttttgtttatttgttctttctccaaaactccttttttttctcaccattatctcatgaacgtgagtggaggctctctgagtagagagagcctacccttgaaaataacctagggatttctccaattttcaagctttacccattcaaaagaatcgtccttttttcctatttctgactttgagctatgatgatggtccattcgatgagcagagatatgatgaacagagagtcgccggataaagggttagattccggcaagtatgtgaggtacacgccggagcaagtggaagctctcgagagagtttacactgagtgtcctaagccaagttctctaagaagacaacaactcatacgtgaatgtccgattctctctaacatcgagcctaagcagatcaaagtttggtttcagaaccgcaggtgaaatttcatcttctttccttatcaaagttgttaccttttgtctgtattaattgttttcttaccattagattatctttttgtttgtatatgagtttatgaagatgttaaatgtttttctttctttgactggtcagttgtatttaagtttccttgctgttcttatctgacaagaattttttggatctcagggatcattttgttatgagttttaatcgtcttctaaatctctttaaagcaagaaactttgtttaccatatgctttgacgtatctagttggttgaatatctaaattcacgaaagtgacatttaatcaaattgtctttgaatgcgtttccaacatttatttctgtcaaaagcttaagattttctgccagaaattttgatatgataaaggggaaaaattgacattatcttttcttctttatatcattggatgtggtttataaagacaaatggcgtctgtgtctggtcatcccctaacatttcttcccattatccatgcccatt

SEQ ID NO: 10797 - DNA, 1135 bp, Arabidopsis thaliana landsberg
atcttagttttcttctagatgtttagttttgtaatcctttttgcattttccacaattgaataaatgaatttagtaataatcttcgttactttgatcctatatttgttcttgtatatgttttttcacactcaaaatgaagagaataggatgcaagagagctaaattgttttcacacatagatacttcaaaaagtttctttttggtaactgatcttttaaagaatgagaaagctaaatctgaatgatttaatgcagtcaaaagtgttttttttttcttgaaggtttctattattgataattgagaatttgataacttgtttggatcaaatcttggtctaataatgatttgtctgatactgaatttgcaaaaaaatctcagtaatagtgtaatacttttttttggttaaaaaagtaatagtgtaatacgacagaccataataaataatttttttaaagcagaagatgaaagaagaaaatatcattttagtttataataggacagacgagatacaattaccgtttgtatcaacattagcattaacattagctaatgtaacaatacaactttattaactgggcaataatatgcttaaacgacaagtaatcaaacacacacaccattttatctttctaatagtagactttttttggacggcctcgatgccgttttcaccacctcagattttccgggaaatactgaaaaaaatcccaaacaaaaattatatcacaatgctgtaaaaattaagtacatatcctatttttcaaaagcagaatatggtaaagatcctcactttcttgataagagacatgtagtacggcttaaccttctcgacattgacgtgtactttgctcttgctgtataagtcatacttgctatataataaaacatacaatataagtattaaaaatctgatcatcgggaaaaaaaatcgggtttaattaattaagaaagacttttatttagagaaataaattacttaaaaacatgaagccatttgagattctccttgtcttcctcgttcataaggtgagtgtaagctccagccttgtgcaatgctacaatacattaatgttaattcatcaatcaaattatgttactaattaagtgtttagttagttaatagttaaattgtgct

SEQ ID NO: 10798 - DNA, 784 bp, Arabidopsis thaliana landsberg
aggaaactaagaaggagagaacaaatgatgacaaagaattcgctttaaagattaatgaagacgaaactaagaatgaaagaacaattgatgccatagaatttgaagcttcaattgcttatgtggtcaacgatatgtttggtgttaatgatccgttgttacgtctagagaggtttgttcttgcaccattgcctgaaatgggttctccaaagcttgtgcaggttagtctcctatgtctcaacgttaacgtctattagaagttattggtaatgtttttttgaaggaaattatttcatgtgaatctagatttccaatctccgtatacagcataatatggaacccgatgagaagcaattagccgattatggtagatgggctttggaggtatttgttcttgaccatatattctgcaacaaaattgagttcacatatgaagaaactattgcattgaaaaggcaagaagaacttattcatgaagaggaagcagagaagaacactaaactcaaaaaaacatttgttggtaaaaaagtgaactaattctttttagtgttttattcctaggctgctctggttttaagactttttaatataagctttttatcttttaactatgtgatcaaagattatatatggtggttgtgtttcttttatttttctttaaattaatgctacatacttataaatttaaggttatgttcaatcttgtcactatcctactggcgttaagtcttcgctcacacgtcacacactgcaaagcactgaaattatttcttaatttgtgaaaagg

SEQ ID NO: 10799 - DNA, 294 bp, Arabidopsis thaliana landsberg
cttttaatatatcacattttttgggaacctttattcatctattagctcaaatggctgaaataccaatattgcatgactagattgtgaaactgagtattgttcgcaaccggtgattcaaagttctgtgcaatcaatggattatttttttcatttgaactcatttttctgcagatggttggaccaactattaacaggggacagccacatagattcaccactcagtaccattctgttcaacccacaccaatgcttgtaaatcccaatcctcaggttgcatttcattaacaacaccat

SEQ ID NO: 10800 - DNA, 666 bp, Arabidopsis thaliana landsberg
tcttgcacctacctgaggacgtaaaagagtttttaacaatacaccttacatctctttacagataaatttttcttaaaaccgcgctttcaacaaaagtgagttttggggacctccatgaaatataacctgaggacttggatttacaagcattggtgcagcttgaacagaatggtactgagcggtgtatctctgaggctgtgctctgttaacagttggcccaatcatctgcaggaaaatgggttgcaagtggaagaatgattcatccatggcaaaacaaacaaaagttggtggcagaaagtatatggaagcattttaacagtacagacaaagccatatcaattcagaatgatcttttaatctggtgttcaatactaacatttatggttgttaaccattcaggcgcttagtggtgagaggaacagtctattctcaattactagttgataaaagccctttgacataacatgctcgaagagagtaagataatacttacgtgttgaggaaattgaaatccaccgacagcatgtccagcggtcacattaccatatggtacaaacttagaagcgcgccggtgcttgcggaacataacggctcgtttacaacttctgggtaaatagcttctattactggtagcataggaatgttgcttggtatgtagcaattttc

SEQ ID NO: 10801 - DNA, 791 bp, Arabidopsis thaliana landsberg
aagtgttctttttggatgtgaattactaatattagatgacatgaaatcccattcaaatataagtactttgctgtttcctaatatgcccttaataacaatattaacaccacaaataagaaaacaaagaaacctcttttttctctaatccaaatgaaagaaactaaaaaagggttctaaagtacctgaaattgtttcacatgaatgatcttcaatccaatccttggaggtaaaatcgcagctgtggccatcaaaagatccctgtttcaggtatagccaaagcgaacgtcgatatcattttcgaattccaacatgaatgttttaatgaaatttgctggaaagagattggctttaaaggattctgtatacaatttgtgacagatttttgtaattttatacaaaagaacaataatggagattttcaaaaaggctgaaaccgtgcgtttacgtagctaccacgacaagtaccttctagcagaggaggatgaagaatccgtgagccaggacagagacgggcggtctatgaacgcaagatggacggtggaggttgtagaaaaggcggatgtgattcgtctcaagagctgctttggcaagtacctaaccgcttcaaacatcccaatgttccttgggatgactggcaagagggtgacacaaacgctgccacggaggctagactcatcaactgaatgggaacccgttagagaaggtgttcaggttaggctcaagacaaggtacgtgtctactttggtatctcttctaacgtgaccgtctctcccctatatagtcttcctgaa

SEQ ID NO: 10802 - DNA, 1128 bp, Arabidopsis thaliana landsberg
agcctgttctccgcatcagctccagaacaagcaggaaaatcgagactagatagctctcgtggacctaaacccgagaaagtccaactggtaaattatgtttaatatttagtatgtcatagtgtctgatttctttttttgtcacagtaggattactttctctatggttgaaattactgaatatgatgagaaactctaatcttgcagattgaacaccggcgagcctacaattgtgaaatcatgctttcaaaagtgaaagtacctttacaggatttgacggtaatataaagctagacaggtttaggttgtactgtaatcatagctttttaatctggtacaatgtctatgtgtcgctatgtctgccatgataattaaaagctaagtgtctctaaaatattacagaactcagtgcttaacctggaggagtcggctcttgatgctgatcaggttgagaacctaattaagttttgcccaacaagagaagagatggagttactaaaggtataagacgtgtactcctagaataatgttcaactgctttgttttccaaagtcggaagtccctagaaaaaattggggtgttctgtgatctagcttttgtatgttcttttgacatttcttcatttcatactcggtttgtagggttacactggtgacaaggacaagcttggaaaatgcgaactggtacaaaactttagaaaaactttttagtttcattggagtagccattagagtctaacaccatatatgccttttgaaattgtttgaacagttcttcttagagatgatgaaagtcccacgagtagaaacaaagctcagggtattctcattcaaaatgcagtttacctctcaggtctgagaagctaataccttgctaattacgattctttgtggcttaattgtggtacttattgatgctgctcaccacatttttagatttctgaactcaggaatagtctaggtgttgtgaactccgcagcagaacaggcaagtcaaacgcaactgggtctaggtgtcctcccgccatgattaatcatacttactaatgctcttttgtccctcttttaatcaggtaaaaaatttctgaaaattcaaaagaataatgcagacgattttgtcacttgggaaccgc

SEQ ID NO: 10803 - DNA, 363 bp, Arabidopsis thaliana landsberg
tacagggttctgcatgaggtcgctttgttccaaaaccaaatcgatgacttctctcaacaatgacacattcatcagaggcacggtcttgattgttcactgaagttttgcgctgattatctggtttaccaatactgtttccatacaatgatgtcagtttggcttgcatcattgactttggtgctttgggaatcaacttatccgtatcatgccgttcttcctgaaacaagaaaacatctatgaaatcatagtagaaacaggaagcaagacatataacatggctgtgttaccaaaactcatcaccaatactaagatcattgaagaaatgagacaggttacaagagcattaccatgattttaacaccc

SEQ ID NO: 10804 - DNA, 560 bp, Arabidopsis thaliana landsberg
aaaccccattttctccattaatgttttttccaaactcttcattttctcttttaatgcatagctacaaacgtcagcgcttatatattcctggaagaattcgtaagttacattcatatcattagaaagattttgtactgttacagctttgaaatccatcataccttgtagcacacggatccagtcttcctcactccattctaacctttgagaactcaccttttcacatctttcttcaatcttttggcattcacatctttgttcgttaacgtcctttcattcttccgcttcttcccagttggcatagcttcactgcaaccaccacaaatcttcttcttaaaccggttggtagtcgctatgtccattatcagaaaaaatttcaggttctctaacaaaaaaaaaaaatagattggtagagatttcaactcaaaaagcacttcacgatttgttaccttcttcttggaatgtgtattttttatttatttttttggggatatttgcggtttttatgttttttttttatatatatgattttgaaaataaattaaatggatttatacact

SEQ ID NO: 10805 - DNA, 848 bp, Arabidopsis thaliana landsberg
  unsure (1)..(848): unsure at all n locations
aaccgatccagcagacagatctttagcgttaatccccattttctccataatttctttttctatactcttcatcttctctacgaactcatatctataaacgtcaacgcttatatattcatggaggaagttgtaagctccgttcatatcatcagaaggattatgccttgttacagctttgaaatccatcataccttgtagcacacggatctcgttttttttacttcactctaacctttgagaactcagtttttcgcatcttttgcattcacgtttttgttcgttaacgttctttcgttcttccgtttctttccagttggcttagcttcaccagaaccaccacaaacctccttcttggacccgttggtattcgctttgtccattatcaaaaaatgttttaggttctctgagagaaaaagagagcgagaattggtagagatttaaacccacaaagcacttgactatttatttacctttttcttgaaaatgtgtatttttatttaatattcttttgtggttttttatgctttttctgtgatatatataattttgaaaagaaaataaattaaaagaatttatatagtgacattaatgttatataatgagccataattaagtcaaacccaagattggttcgacaattcgtttttggttaaattgatagcaagtgtgggcgtgagtggagattctgtgaaaagaagatggagtttggtgcacacaaacaagataaagatgattggagacaaatggagagtcttgatgaccaaagaagataaatttgtgttgcanaagatagagcttttgcatgaagtggtttctctgatcatttacgttgaagcatctactcacta

SEQ ID NO: 10806 - DNA, 1266 bp, Arabidopsis thaliana landsberg
ttttcctgtatcataataacaactttgtgttagcaaaattcttatatgaaagttgtgttgaaaatatgtattcaaaggaaagcgactgttcagaccaggtcgtggtgatgaatcttgaggtgtaccaacgttgaattcgttgtaaaactcgtaattatcgtatcttgacgtacagctcggcagaaaagttcttcccccaattttgtcataggttacttgattgatgctttgttgtaggcagtctaagcagtcttgttccgtaaggtcaggagtgcactgaaccattccgtacaaactctgtaatgcatttaaatcaaattttgtcacagcgaatcttttgatactcctcgcggcttcaatggcagctaagttcatggggttcaagaccaaatctctgaaccgatcttgtttgactgatataggattcctagcgttctgcatgaacactcctccatcggtgtttagagtggatagtatattccggttagagtatctgagcatacactgctcgtaatagaacacggcttctctctcatttggacaccgacttaacgattcgttaacagacaaggcgatgcagctacggcaaacttcaggtgagacgtttccgcggcagaggaaaagtccggtgaccatgtcgggggcttgtcccgcagtggcgttttggaatccggtggagtaagaggcgttacgagaagagagagaggacaaaagggttttgagattggtggagtaagtgctgttacttgagtaagttgtcgtgatagaacaattatgatataggtaaaaaggattttgagcagaagctgtgaagctagtgatgaatgagaaaaggaaaaggaaaatgaaacagatcagagaagacatggttttgtttttttcgagttccttgatatgagtttctcatcgtggaggttacatgatactctctctgactagtactgagtaacgtgaagtattcgacggtttgttacgactaagtcagtagtcaatgtaagcgatttttttcttttaaatgtcgtaaattgtgaggaaaagagagattgggactgatctaagtaaagttccttgtttcaaaaaatgactttaaaaatctaatacacagttgtaaagttaaacaaggaagagccctaaaataaaaattcaaagataatctttacaagttaacgtgccactgagcgtgttgattgatcctgcctctgaatcaaactagggttgtgtaaaaaagaaatttacttaataactgctcgtttgttacttgtctgt

SEQ ID NO: 10807 - DNA, 734 bp, Arabidopsis thaliana landsberg
atctggctatcatacggtccatctgttaagtaatgaaactaaagttgacgtaaccaaatagttacgtatcgatttattataacggaagcatgtgattgtggcctatgatcacaaaaagaaaataaaaatgttttgatggtttatgtaaaagttgtttaagtggatgaaaatttagttatttatgtagcaaacatatattatttttcaggagtctttcttgaaagtattcgataaaaatccatttgttatctaatataagttgaggggtattcaatcaagttttttggtttggtttttctatcaaagacatatatttaaagacaaataattaaaactaacctatgtcgcatggaaacagaaacgaaaacgtgtaaatgaaatatttcagaaacgaaaaacgattttttaaaaataaaataatataaacacttcagaaacttatatatatatatatatatatatatatatatatataacaccaaacataagaacgttactaaaaaaaatgattaaaccaacacaaatccaaaacattaatattaaatagtttgttacctaagattttttttttaaaatagatagtttgactaaaaacacgaaaacacattttcattcttattttgatcatctccaccaaacaaaaatgcatccaaatcttgtttgtcgagaaaaaaaacttagagctcgaatcttccaattagttatatgtattataaatcttaatattttaaaaa

SEQ ID NO: 10808 - DNA, 1314 bp, Arabidopsis thaliana landsberg
ctcacattttcagtggtgttcttgcatcacaacgtgcgtcacttcactaccactattttgtagatgaatttataaagatcatgacaaacccgcctcaatgggattcaatgaggccgaactattcacataatcagcctatcttatgatgagaaacatgattaactctcttacaacgacattggtaagaccctcaaatctggatatgatttggtatgacaatcaagtgtttcataagatcatatccaacttcatcaagtcacctaatatcgctgactgcagtttctccatgcataactaccctcatactgcttctctttggatcaacatactaaataccgcaccatcgcaataaaacccttccttacacattaagtacataagctctgtaagatgtgtacataaattcaccagtacgagtcacacccttcaacttccatctctctttgatgaattctcgatgtgaaggaaaatgtctatatatccattgattgggattatcagcatcctgcaaaatccataagctaactccagaagcaatggaacttaccaaagctaatcttccctcataagatgaccaaaattgtagctatgctacttttcttcggatgtttaatcaaactgaacttttcagatcttaaatcaaaactcattatggcaagctcttgtcttaaaccatcaccaaaagaaccttcatagtagatgactccatcaatgcattttgcataacctgtcactttgtaatgactaaggaaacctttagataatattctccatgattcttgagctcccaatgtaagaattccaatcttgtttcgttctttaagtatgcatagtactttatatttaccgttgatcggatcatatcccaaaaatcccgttggtggtctgccttccttgctatcaagtttaggtaacgtgaagaagcttttcgtgatagggtttctgataaacatgacatttgtagaagtttccaagtaaatcaagccgtgaacggattcacaacgttgaagcttaccattattggggattgtatattgaaaattctccacgttaggacaagtcttcttctggtgtactggagaagcaaaaaaaaacagcttgtcgtgtttttggaagattagcagaacacaaggacgcgatgacaaggaccgtgtcacgaccgagctggtgaaatctggagtggtgatgattgaagaccagagcttagaaacggacctaaatctcacaatcgattttgctggcaggcttgagactatctccacgattagatctagaggaatatgctctctttgagatctattattatcatctgaa

SEQ ID NO: 10809 - DNA, 1078 bp, Arabidopsis thaliana landsberg
tcccatagatggtaaattatgatccatgtcaggaatgtactttacaagggtgagtaagaaagatgttccatccttgttttggattctaacccttccaatgcctttgacctttgaggttgtcttgttccccattcttacagatcctcctacatcttcactcaaatcctcaaaccattacttcttgtgagtcatgtggtaactgcaacctttgtccatgatccactcattctccagatttacgtcagttgaatgtaatgcctctgacacatagtatcctaagccctcaaatgtgttctttgtaaccaaaggagcttcgcccttgctgttgttcccttggtctttccctttgttatgtggctttcccttgtttggacatgacgccttgaaatgtccctcttctccatagatccaacaacctttcctagttttagacttagatctagatctagaacagttgttcttgttgtcattttccctctactctggtctacctcttgtctcgttcttctctttgacatacagaccctcagcttgtcctcgtatactcttcttatttgagccaagttccagctcctttgagtaaatagctccaactacttcatcgactgagagagttgttcttcctgagctatacttaagagtatctttcagttgatcaaactgcttcggtaaggacatgagcagcaaaatagcttgatcttcatttgagattaacacgtttgtgttttccagatcagctattaggcggagaaactcattaatgtttgcctcaacagatgagttctcttgcattttgaaactgtgtagtctgtgtttcacataaatgcagtttggaagagccttagacatgtacagtctggctaatgcatccaacatagaggctacagccttatctttcttgatcttccttagcacttggtctgaaacgcttaatactattgcgctccttgctgtctgcctcttctcctccattgtggcttctttgtgaggctctctgccttcttctaacgtctttgaatctgataccatatgtgattctgtgagagctactgttaggcccaacagagccatgtgagcc

SEQ ID NO: 10810 - DNA, 1352 bp, Arabidopsis thaliana landsberg
tttatcaaacagtaactacttatgctactcaaatcttggctctcaatgtcaataatttgggtaaaactataagctttgagacaaaacagaagaaacaagactggaaacttaaaagagggaaaaaacatgttcaaataaaatcaaaacattacaatcttatagctttgagaatgaaagctgacatctgctggaattaatccttcccatgaactcaaactccattggtatgtggattctctcttccaacgtgactactgatgagaatcgaatactcatagtctttatgaagtttccattctttaacaaatacttcaccacatccttctcttcttgtgtccctttgtacaaaatccacttaacagtttcgagactcacaagtaagcattcaggaacagaattgggttgctcccatttagtacggacatgtttggaattcctgcagctccagtttctctctctctgagatcaaacagttcatgacaaagagttgcaatttaatatactgaagatgcaacaacatcatctagttttggatcaaaacttactgattggtagagtttgagagatcggagtttaggtgaacgtctgaggataagattcaaccaatctaaggagcacataacacatagctctagacacacgagctggtcaaagtctcctcccggatatgaaccctgcaaaaagtgacagcatcatcagccgaaactaaatataataaacgcaaaagaatcttaaacacgagaaacatagagactttaccgtttgtggttttaaacacaaggaaagttttttagacgaggtaagactttccagaagcttctcagaatcaatatgtctaaggtggatttctgcatccaattgctcgggcatattcactaatgagcaaaactcactaaaatgatcaaaatgctttaaagaaggagcattgatcacaaatccatgatcagtttttggattgtgataaccccctactgtgtagcggatgtttaagctctgcaacgatggcacacaaattgcgaaagtcttcacattgtcagcgccccatcggtgcacaaccaatgtttcaagaatagggaaacaagacaaaagcctctcaacggttttatcgcttgagaactttacatctagaagagataaattcttgacggaccggaaacaagttgtcgaatgaacatcctcaatggtcaatttcataaagcgtaaagccacaagggtgtgaaactttccgaaaaactctaaagctgcagcactatatgtaccgtcatagtcaagcgtcggaatcaatttccaaacagaaccccatcgtttggacaaaagacttgtagacgcagcaacttttatcggaattaatg

SEQ ID NO: 10811 - DNA, 489 bp, Arabidopsis thaliana landsberg
tgagttaatatataaaattcaaatatcaactataagatggagcgtataaaattcaaatatatttaattatcctcaaataaatagttaaaatgtatagtaaaatcgaatgtatatgattaatattttgtttaatacaaaaattactaaattaaatattaaaaaggtgtgtgaaacactatttactattcaaattttaaatattatcgataaaaatttgaatttatatcttacacccacctatttaggcgggctttatctagtttaatataactggtgatgcggaaaagaaagtaacttatttttactcttttttttcttcctctgtagaagaaaaacttatgactacaaaaaaccataatcaatatatgaaaaatataaatttttaatgttgtctaatttggttgcttacaagtagcaattgtgtggtgtgatgcacaaatctgtggatactaatctcaattaacgtatatataagtgataagatttagt

SEQ ID NO: 10812 - DNA, 845 bp, Arabidopsis thaliana landsberg
atctgattcatggtggcattgcgatgatttcttggtcgtcgatctctccatgcttcagccaacgtcatgtttttgcttatgccaagatcgattattccccgatctcctacaatatccattaagtatcccatgttagaccagttatcatgccagaaagagattgtagaaccgttattaacttcagccttgctgaaagcttttgccaccactcgatacttcaataattttttccacattcacgagcctaagctggaattagcgttaatcgaccaaaaagtgtcatgcttaagcagattttgcttgatccaaacaacccagagagagttactgtgggaaacaattctccatatgagctttaaacaacaaacctcatttgcttctttgagtgatcttaaaccaagacctccttcttcctttggtttacaaactgcagtccaagagagctttgctctgtgagaattcaaatcgggtccagaccaaaggaaagccgaacaaactttgtcgatttcccgaatgcaatctctcggaagtctataagcagatatccaaaaagtacaaatactccaaagaaccgattgaatgagattcagacggccagcataagagagaaatcgagcagtccaagatccaattctcttctttatctgctctagaagagggctataatctgagctagtgagtctttttgttacaagaggtaaacccaaatatcgcaccggaagttggcctacagcgaattgatatctctcctctatctcttgataaatagtaggagacacccccgctagataaattgttgatttctccaaactgagcttgagccctgatcttttagcaaaaacatc

SEQ ID NO: 10813 - DNA, 1048 bp, Arabidopsis thaliana landsberg
gttgaaatcgctaattttataatggtaaggtttacaatttgaattttgatttggtccgggatgagtttaagtttgaggtcgaagttttgattgaaaaaagccgctggcaaaatgttaaagttgaaaaaaaaaaactttttactatgattaatcgtagagccattgcctctaattcttttgttttggtcttgtaacgatattaaaaatgaagcatgaacattttgggatggactgcaatgattgctattggtatgaacgcagccgtaaggtaaaacttttgttttaaaacctatctttggtataactacgaataatattatataaatacgtgaaacataatctcaaaatggtacagtgtgagagtgtctaatgaattaggagcaaaacatccaagaaccgcaaaattctcactactagtggcagtgataacatctacagtgatcggacttgctatatcaattgctctactcatctttagagatcaatatccatcgttatttgtgggagacgaagatgttatcactgttgttaaagatcttacaccaatactcgcagtctccattgtcatcaacaatgtccaacctgtcttatcaggtactctcaatctttttatctcacagaaacaaatctagttcaattcgttttcatacaatctcggtttccgtcttcgatcatggttggtctttggctaaaaaaaatattatttgatatgaagactttgtttggttatataagaagctagcttagtgaatctgatgaaaatgataataaacacaggggtggctgtgggagctggatggcaagcagtcgtggcatacgttaacatagtgtgctattacgtgtttggaatcccatttggtctgttactaggatacaagtttaactttggtgtaatggtaattaatgaaagctccttttcaactaaccattgaaaaaaatataacaaagaatgaaaagaccgataatgcgaaaatctttgatgtgttagggaatctggtgcggaatgttgacaggaacccgggttcaaacaatagtcttaacatggatg

SEQ ID NO: 10814 - DNA, 2013 bp, Arabidopsis thaliana landsberg
  unsure (1)..(2013): unsure at all n locations
gttttcatgaactcatgttttttccttttaagatatggataaaggaaaaaggagacacatttatgaagatcctccaccaccaagaaaggtagattaaagtgacagtgttcatagatttctagaagagaagctggtacatatttagagagatagaagaagttgaatattcagagggtataatattattacaagcctaatttgatttttcagtcagtgactaacatcatatctctttgtcaccaaaggaatggtatatatacttttcccttacaaaccagaccgatagagatcataaagagctccagttcgatcaaagacgaaagggacaccatcttcaggagcagctcgaacaaagacaaccggtggtttatctacatgacaacaaaacacaattaatgaatactagcattgattagaaaagcaaaggtaaaaggtggtttatgttcaactaattccatggtctataatccagaattgtcatatggcattgtttagtttgatcagaaaagtaaaacacctagtaatctaaggtcaaaaaaggtaaaccaagagaaagtagcagtaccatagtcatcataaggcatgggagagggtggtttcacttcaacatcatccatctctgcatcgcataaacacacacgagttaaacatcagaataggtagcagccaaagaataaaaagaagaaaccaatagagttaaaacgaaatttgtcaccttcgtccttaggcttgaccctgaagatgggaatttcaaactgttttccgcgacgccaaagttcgacttgatagatctgcgatgtaggagcggatgaggccatatcggtagcccagaatgttaaccagcagaggagaccattggcaaatttaaaattagctgagacatgctcgacaaacacaagtttagatccatgagcttcattgtgtttctcaatggcaaagagtgtcacatgacggatcacatcagcattggttcgtatatcgctgataggtggtgaattttccaacggccttatatggaacatgtagtcatatttctcccaatcaaccgtgaaaccctaattaagccaaaaaagacttcttatcagattccgattttcgaattaaccctaattttgaaggaaacaaggaagcttaaaaattaaagttgaatagtacctcggatttatggaattcgtagtgaaacaaacaatactgtcgaagatactcatcatcttccacgtttcctagcttgagatgtttccaggacgatttcgatcctttgcaagctttgtccaacttcgggatcttttcagggcgtccacagttaacctccttcaaaacagagtccgccatgattagatcggaaccctaacggctaacgcacgcttagcgagaggtgaatgagagagaggtaatagaagacaattatcgtgtttgttttcttttttgaaatatagatggatgaatgatgatgatgatttgagaaaaaaaaagctcatgagaagcccatttagtagtgaaagagaaggctcaaatattagatgaatggctcatgagaagcccacttaactgggctcattagaagcccattaagagtgaaagaaaagtctcaaatagtcgtctccgtcattgtcgttgctttcctcctccttctcctcctccgtccagtgtcatcactgtcatggcgcccagaattttactctgtggagatcctcttggacgtctcaatcagctcttcaagcgtgtccaatcggtctctatcactatctttctccttctgctctccgatttcacctgattctgtatctccaatttttaaatcgaactccaatnnnnnnnnnnnnnnnnnnctgctggtccctttgatgctctgatttgcgtcggacagttttttcccgattctccagaaattctagatgagtttttggattacgtcgaaggtcgagctcaagttccgattcctacttacttcaccggagactatggtgtcgtcgcacccaatatcttatcgacgacttcgaagaaagctgagaa

SEQ ID NO: 10815 - DNA, 360 bp, Arabidopsis thaliana landsberg
gacaccaacctcagcatcgcagagaatcgcaagctccttagctttcttcaacaatccattccttcgcttcgagaacgtaacctgacggctcgtagagttattgatcctcttaatcgcgatcttgccccttcccatttctgcttctatcacttttacacacaaacatcatcgtcaatttcaaatcatcatctcctgaatccaggggagattttgaataaaataaaaaaattgaacatttacctgtttcaaagaataaactagatcgcgggaaacgagatctggtaatccgataaccggaagggggagaagagaaattggttcagttcagagatgtggttttgttgatcgaaagagaaaaag

SEQ ID NO: 10816 - DNA, 532 bp, Arabidopsis thaliana landsberg
tcgctgtgccgtattggagatactctggtgcgaggtaacccattgtaccagcggttaaagttgagacagggctcttatcatgctccgtgagtctagctagaccaaaatctcccagccttgcgttgaagtttatgtcaagcattatgttgctcgtcttaatatctctgtgaaccacttgctgctcacactcatggtgaagataagacaaagctgatgctaaaccaatcgctatattcagcctatgagaccagtcaagcgccacagctcctgtttgtgattcttgatacagaatcttatcaagacttccattaggcatgaactcatagacaagaagcaattcacctttctcgttacaccaaccctgcaactgaacaagattcttgtgccgcaagcaagcaataatcgataactctgccaaaaactctgttttaccttcggttgaattatgcctcgatcttttcacagcagagatcgtcccagaggaaacaaacatagctctgtaaacattcccaaacgctcctcttgcaatgac

SEQ ID NO: 10817 - DNA, 925 bp, Arabidopsis thaliana landsberg
actggttttctgggagcaaatgattactagtgttcctcaatgtttgttgtcgagtctccaaactttcaagtggttaggtaacggtgattccatagaagggaaagatctggcgacatttattttgagaaactcttgccagttaaagactgcaacaatttcgatcggacaaggacaaaacaagcttgagatagagaaggaggtgaaatgttgtttacgtggttcacccacatgcgacctcaaaattcagttgatgatttaaatcactaggtttgaaagagatatatatcttaaagactgtaacaatcttgcaaatgacatcttaggatttgatctattaaagctttttgtttttttatgaataaatctattaaagcttttgttgcatcagaatatggacaagatcagtgggatttccgatgatgtattgctagtaaagattctatcgtttcgtccaacgaaagttgctgtaagcacaagtgttttgtctaagcaatggaagtatcttcggaagcgggtgctaaaacttgagtacgatgatactgagtgtaaaactaaactgtctaaatcatcacataagaggttccggtgtttcgttaaaagattttgcaaatagatagagagtccaacttagaaagcttgtctctcaagtttagtactgcaccgtttcaatgtgacttttgtgacgagtctagaaactttcaagtggatagggtatgaatgaagttatgaagataagaagaaatagaggtggttgcatatatcctaaacaacaggatacttttaatatttttttattttacattaatgcagttttatagttatacaatataggacattattagtacgaaaatataagatatgctaaaatataaaaaactggaaaagaaaagtttgaaattgattgacatccaagaaataaatcaaa

SEQ ID NO: 10818 - DNA, 2335 bp, Arabidopsis thaliana landsberg
ttagatccgtaaaatcacaggtcctaaccatccttctaaaatcttggaaactagcttccggtcttatcctgcctccccgcttctcgttattacctaagagttcattaaaatcccccatcattatccatggaagattcttcctggttattccaatcctctctattctctcccaaaggtcatttctaaaacttgggtttggaggtccatacacaaaggagaaatagaaactagatttattacttttcataaggcaatctacaagattagaggattgaaataacacagaaacttcaacagaatacttccaaaagataactaaaccaccactaagtcctattggtgggactgttacataaaaaggaaaacctaatttacaggctatgtcccgaatataatcgtcctgcttcttggtctctgataagcatatgatgtccggaagatatcgtcgggatatctccttaagacgtcgaactgtgaggtcaatgcctaaccctcgacagttccagcaggttgtaatcatgaaggaagaggtggtactgggcccaccgcgcctctacacttggtgttcctgctggaggaaccgctaccttcacccgcctctttagtcaccattcctgttgtttcctccacctcggattggactaagtcgtcctctcgcttgcgtttacccctctccattgcagttgcattttgtctctcaggggatgcagccatgatggacgaatcagtgtggatgagcgccgagtagcgctgataatttgggttcccggggaggtctcctgtagcattcgcaaagataggaatagggttaaacatctcactcatattcctttcctcattaaacatcgagaatgctacgtttggttcatcaagttcatccctagaaggaagaggatcacgtagaggagcgatgtcccccaatgcgtctgccgcctctggaacttcaacgataggaaccaactcatcaacatcaccattctcttcgtcatctgcaatctccctaatgaccactccttgattttgattgtttgcaggagcagcatcgtcattgtcatcatctgataatacctcaccacctccattctgaatgagacaggctccggagtcgtgagtgagcataccacatacctcgcaaaaaatcctcaatctctcaaagcgaaatcaaagaagagtattcacattggcctcaaattggaaattacgctggaagcgaaggggatcctcgatgttccagttgatctgcactcgaacgtattccacacgagccgttgtttcaagatcgaaatcaacctccatcaaattgcccagagccctaccaacgtgtgcaatgacttcgcggttgaggtagtgataaggtataccccttatttggatccaaaatggtatgaaattgatgagcggttgattgataggagaccatctctgtagaaccaacatgcggtaattgaatgcccatggtcctcgcctcaacacagtttccagcgattcctcaaaagggaagatgaattggaattggttacccggaattaaacgtccgtgaacaagcccagcctgaccccagatccgtggcatcgaggcaacgatagcccgagagttctggctccttggcatcaccggtcgttccatcagaatgaaacggttctctgccaccgtttgcgccacaatctccgccggcagggcaattggaacatcatcgattcccaggttaatgtcttgcaccgcccttcgtaaattgtctgccatcttcaataatagattgtagaaatgaaaagggtaaagcaaggtggatttgattatttcaattgagagcgagacgaatgaattgaaaaaactgcttttatagaggaatgattcctctgtaaccgtcgttcgtgcatcacgtcgaaagtgagattgcaacgtggagataaccgcctggagtgtggtccagaagcgatccactacgccggcaaaatcgaagacaaccgccgtggggacggaagtaaagaactgtaaaagtaactgcagaaaaattgccttaacgatcgccattccttttctaaattaaaaaaaaaaaaaacattgaatggaaggctctagctgagacaatcccgactttgattctgttctccggatcccagtttaagtactgatcattgacaaagacctaaaaaaaacaacaataacagaagtttcttaaacttagatcacacgttttacactaaaaaacattgattaaagttttcaaatattaaaccttttctaaggaattcaagtaatcaacaactctttctctgttcaccagcatgaaaatatgttcatcgatttcaaaatcaaaaaccaaaatcaataaacc

SEQ ID NO: 10819 - DNA, 680 bp, Arabidopsis thaliana landsberg
atggagtacattgaggagcgaaggcttaaggatttggtgaagaagcactctgagttcatcagctacccaatctctctctggattgagaagaccattgagaaggagatctctgatgatgaagaggaggaagagaagaaggatgaggaaggcaaggttgaggaagttgatgaggagaaagaaaaggaggagaagaaaaagaagaagattaaggaggtttctcatgagtgggatttggtgaacaagcagaagcctatctggatgaggaagccagaggagatcaacaaggaggagtacgctgctttctacaagagtctcagcaatgattgggaggagcatttggctgtgaagcatttctctgttgaaggacagcttgagttcaaagctatcctctttgttcccaagagagctccttttgatctctttgacactaagaagaagcccaacaacatcaagctctatgtccgtcgtgtcttcatcatggacaactgtgaagacatcatccctgagtacctcggatttgtgaaaggtattgtcgactctgaagatcttcctctcaacatctcgagagagacattgcagcagaacaagatcctcaaggtcatccacaagaaccttgtgaagaagtgccttgagctcttctttgagattgctgagaacaaggaagactacaacaagttcgc

SEQ ID NO: 10820 - DNA, 673 bp, Arabidopsis thaliana landsberg
tcgttctgaccttccttcatccttgtcacgtagtccttgagactggtcaattcatcaccgctcttggttgagtggtaacggagcaactcagcaatcttggttctgttttgggagtcctcgtggatgccgagcttcaggtttttagagaaagcctcatagaacttgttgtagtcctccttgttctcggcaatctcaaagaagagctcaagacacttcttcacaaggttcttgcggatgaccttgaggatcttgttctgctgcaatgtttctcttgagatgttgagaggaagatcttcagagtcaacgatacccttgacaaacccaaggtaatcagggatgatgtcttcacagttgtccatgatgaagacacgacggacatagagcttgatgttgttgggcttcttcttagtgtcaaagagatcgaaaggagctctcttgggaacaaagaggatagctttgaactcaagctgtccttcaacagagaaatgcttcacagccaaatgctcctcccaatcattgctcaaactcttgtagaaagcagcgtactcctccttgttgatctcctctggcttcctcatccagataggcttctgtttgttcaccaaatcccactcatgagtaacctccttaatcttcttctttttcttctcctcctttctttctcctcatcaat

SEQ ID NO: 10821 - DNA, 1586 bp, Arabidopsis thaliana landsberg
  unsure (1)..(1586): unsure at all n locations
agataacctcaggccagttgcatgaaatgtggctaattggggcataaaagagagaattgcccaataggaatttatcatttccataggtgtgggcggcccagacattacgctattgcaagacaaaacaactcaaccaaactgaggaacaattgtcatcacctccaaaacgatcggctttgggaagagacaaataatttgtttcgagacttgatttatatttggatttttgtttcttattgtatttggattttcaaatttatgcttcatttagttattgctacactacttgatatttgagtttttaaaggtcaactgaatcatttttagtgttatgttagttcaaatcatatataaatgaaaatataattcattgccgaattcgtcctcgaattccataagctggaaaaattgtaacatcttcaatcgtaattaagttgaagcccataaaacccaagtaaagcaaaatcataaaacgacaaggttttgtatgtggccatatacatgtgtatgtgtgtcaacatatccttcttctttagaaaatctagtctaagccgccaagataaaattctagtccaattacaaaggcaaattgtggtgaaagtaaaggcaacattatcaccattggagcggagcttcacgtagtcaccgtcgttcacatcacccaccagaatcgagacccattgtactagttcttttggataaggaaacccgacctaattatttcttcttcttcttctacaacttcttgttttgatctgttggatctttggattaaataaaagtttttattgtgaagaagaagaagagaaattgtgccaagtaaggatttactggacagatttcccgtcgaaacagaaagacttagatcaatattttgacgtctctcgatacatctcgcttcaaggaatccatagcagtttatgttttgttaaaaggaggtatattgcattcagaaattgttttggaagttgatgaaaaatcacttgttttgatttctagaaaacctaactttttaaaacaaaattatcagattcaagttagagcaaactaggccagacctacaattgttattgacagaggaggtgtgaggaaagcgacctaagtcttcaaagttgccggaaaaggtacaccctagcaatcacgacgtttgcttgttgttcaagaaacaattgtgcctgttaaaaaaagaaaccctaatatgttgtttgaatttatttctttagctgcaagtttccagaacattgtcgctgtttctagtcgcatttgcaacttgctaatcactatttctaactaaattaaggcaaaagtgaggcgggatttgcgaaaacattgtggttactttataagtattttcttcttgaattgcgtgtataggcttagccactttgtcccttgatgtatgtctattgattcaaattgtgtgacatagaagaaagatatgatgtatgataggaatacataaatataacatgatgatatgatttgagtttacgtgttgggggcacgagcttgngattgcatttcatgtctcatgatcggcgaacctgtgatttgtttcgtacatggattatctgacaaacctgaga

SEQ ID NO: 10822 - DNA, 1136 bp, Arabidopsis thaliana landsberg
  unsure (1)..(1136): unsure at all n locations
gactcggtgtttagcgcgctgtgcctccagaagatcttgaagtatcatgagaatgaagatatcttgaaccactagtcattgcctccatgactctgcaacaagtaggtcgtcgcttagtgtatactcgcagcatccgccgatcctctattcttgtatcttacttaaattaatgataaagcgaaatgtgttggtatagaccggtaactggctattatagtaactacaataaggacagacatagattcgttttatctatctcatatggctctacggtttagaacagcttatgttgctccctcgtcacggctttttggccgcggagagcttgttatagacccgacgcacatagctaagcggtatgtgcaacagtattttatcattgatttactttctgttcttccggttccccaggtataacaacagaatgtgacatcaaacttgtctacatttcaagattttgttggttgatattcatttttgtcaattttattcagattatagtttggaaattcctctatacttcaaagggtgcgaatgtactggcgacaaaacaagcacttagatatatcgttttagttcagtatattccgcggtttcttcgaatgtatcctttaagttcagaactgaagagaactgccggggtattcgctgaaactgcgtgggcgggtgcagcgtactacttgttgctttacatgctcgcaagtcatgttagcatccaattttcttgtaccatactgtatccgtttttatgttctcataagttcatgtgtatgcagattgttggggctttgtggtatttgcttgctttagaacgcaataacgactgttggagtaaggcttgccacaataaccagaactgtactagaaacttcttgttttgtggtaaccaaaatatgaaaggttatgctgcttgggacaatattaaagtttcgtatcttcaactaaagtgccctgtcaatgtccccgaagatgaagaacctccttttgattttggaatctacttaagagcactctcctctggcatcgtctcgtctaagaactntgtctctaagtacttcttctgtttgtggtggngactacagaatcttangtaatacaaaggattttattttgttatattgtcaatgagatgagtc

SEQ ID NO: 10823 - DNA, 775 bp, Arabidopsis thaliana landsberg
taactctcatctgcaatttgtgtaaataattaatggatttaattcataatgatgtgatctagtcgtaattgtttattgagtccttaagtgttagtggcaaataaactatgggctaaattctattttcatattattattacgattacgttaagaaaaaaaaatatattacatcaatgtagagagtcattgtttttcattctgtatacaagatgcagctaagatggttgacaaaaacaaataagcccaattaaaataataaaaatacagctttggttgttgatatatttaatgtactccatttaaaaaaaaatctttatatatcggccattaaatatctcaatggttttttttttttacaaagtctcaacagtagtttttattattatttacatgattctgatcgataacattgcataatatcataataacataacttgcagataaaaattcgtagaattaaaacttacgcaatgaaaaatcatagaatgaaattatttttaagatatgttgattagatacattttgcagaatgacaaaataaatatgatattaacaatatatacatagatatagatatatttatatttatttatatttaataaacaaaataaagattttaaaaaatttaataaattttgagtaattctcaatactaaaaactgtaagattattagagtttattaaaaaaatgtgaaaatgtttttttgtattattaacgatataatttttgtgtaaacaatatatttttttttttacatttgctaatatttagtat

SEQ ID NO: 10824 - DNA, 961 bp, Arabidopsis thaliana landsberg
agagaacctaatttagaggagaagaagaattggagaagccacgaataaggtagttccaatccgatgttgatggatcggaatcgaaatggtcgacgagaagtagagcgtgagataaagaaccagtgacggagacggcgcagaagcggaggaggtggttgaagatggaaggatgatgttggagaccattgatgatgacatgagaatggatcttacggagcttcttcatactgttgcatccttgtagcattctcactatcactctcgctttttcgcacatcgtctctctctcccgctaaaagaacgaccaatttgaatttgctaataaatcatatgagtaatatttaggttaatatttgtgagtttactaggttggttttttttttccgtttcttttcaatagatttaaaatttattcaaccaaaaagcaaaaagcatgtgtacaatgaatgtttcgttaggttaatttttgttagaagatgttaattaggaaaatattgaaggtgttcacaaaattttcttagtcaaaactgattggttaatgcttgaatactctcttgatcactcttctcacaacaacaacaaaggaactatgtgtttcttgtttcacaaaaacccgtagattaatgaaattagttttgaaatatattgatgagatatattttgcagaataacaaaagtaaatattatattaacaatctctatatatacctatatatatttaataaacaaaataatgtttttaacaaaatttaatatattatgagtaatatttgatactataaaatgtaagatttattaaaatttattttaaaaaatgtgaaaatgtttttttgtattattaatgatataatttttgtgtaaacaattatattttttcttttaaaattgctaatatttataaactgcatgtagagctaactcaaacttatctcttaactaaagcttaactcgaatataattt

SEQ ID NO: 10825 - DNA, 1014 bp, Arabidopsis thaliana landsberg
ccacactttccaattttgtaaattgtctccactcttagccggtgagtcttactctgttccgaattattctttgtgatatggatttcgatttcccatgattcgattttgtactttttgctcttctcttgagtttaaagatgtacgaatgaatatatacagattcgattttatgttctggtggctttgatcgctgaaatttgaaaactttgtctatgtttcgattgcttgatactcttgtttcacatgttcatactctggaattgattatagattagtgtttttacagttttaatggaaactgttccaccatctcccattacatggccagatgggggagctctcactaacgactgggtacatgggcttatgtcgtgtttcgaatggtcttcatggaatctacctccttcccagttaccttcactattgcctgtcaacgtctttgattccctcgtcctcaccgctcataaaatcctccacaaagaacgtaactgcgttcacatcgatgatcttgactctgtatccaacgttgttgtggttggtgacattcatggtcagcttcatgaccttcttttcctattgaaagatactggctttccttgtcaaaaccggtgttatgttttcaacggagactatgtggatcgcggtgcttggggacttgaaaccttccttgttctcttgtcctggaaggtaaactctttactaagctgttttactattggctcaagtcttagtattcttaaagcacatatctttttggttgtttaggttttgatgccggacagagtctacctactccgtggtaatcatgagtcaaagtattgtacatctatgtatggtttcgagaaggaagtgcttacaaaatacggagacaagggaaaacatgtgtaccggaaatgtttgggttgctttgaaggtcttcctttggcttccataatttctggacgtgtttatacagcacatggagggcttttccgcagcccagtcttgcctaagcgaacaacaagggggaaaaag

SEQ ID NO: 10826 - DNA, 558 bp, Arabidopsis thaliana landsberg
gatcggaagtacatactgatcaagttggaagctgcgttgtagcagttgtttgagaatgcaaacttagacttaatagccataagtcgtgtcacaaatacaaggacagtcacttttgtgtgctcatgcaacggctcttcggcagctttaaggagctcgaagaacttctgaaccttaggtgtagctggatcctcaaactcggtgggttgaccggggttctccgaattgacggttagaagctcatggcgtacatcgtcaagcatctcttccatcctatcgtagtcctcctcttcatgtgactgaacttccgatacaatacgaggagatggatcctcaccgtggtgcacccacacctcatagcctagcatataaccgttcttgcaaatatgtatcgacatagtcctgtcaaggaaattaatgttccgacacttgctacaagggcacctaacatcggttccagtctctgaccgagcataagtacggtcgagataagcatgagtcttgggcacccactcacttgatagagcacctcttttcttccaccttcatacatccatcgac

SEQ ID NO: 10827 - DNA, 768 bp, Arabidopsis thaliana landsberg
  unsure (1)..(768): unsure at all n locations
ccgaacagctagcgtcaaatgtgtttctgatgccggttattttatccacgggtacgtgtacatactcttaggcgttggccaaaaaagtatatggaaccaaaccgaaagtctaaactaaatccaaccaaaactgaaacttaactgataacgaccaaaacaaaacggttttatatgatttcaactatcaatcatctgattattatcactgaattggatattatgaaacagtaaagatatcacaggaggatcatacatccaatcatattacagcaaagtcgtcgcgctccacgtataactctttatctaatatatctctcaattgctaattctcttaaatcatgaggagaatcctaaagtcactcttgcttaaaaaatgtttttgtagggatctgcaaagagtcttcctgtttcttgtacctcaaaaatgaaaccagaactcgtacgtacttaactaaacatagcaagatattgatctagacactttttccatctatggaccgatataaacgacttctctgaccgtttttcgcagtgtttcttcccacaatacgtcgttccttccatgcgaacaccgctctttgtcatcaacgccgccttcgattcctggcaggtccgatacatgcattatatacttttttgatatacacaaaacatttcaattcgttatataaatatacacaaatcggatacatttattgaatttggtaatattcttcagatcaagaacgttntggctccaactgctgttgatagggaaaagaatggaag

SEQ ID NO: 10828 - DNA, 886 bp, Arabidopsis thaliana landsberg
acatctctctctataccatttatgttctgcttgcatttacatttaccagatatagttaactgcaaacgcagctttggtgttttgaaacaaccaagaccaattccaatattttgttgttgactttttatcatgttctgattaggtttgaaagtcaacggatacccttgcaaagacccagcaaaagtaacaccagaagacttctacttcataggcttagccactgctgcagccacagccaactcttcaatgggctcagctgttacaggagccaacgttgagaaagtgcctggcctcaacactctgggagtctccatctctcggatcgactacgcacctggcggacttaacccaccacatcttcacccaagagcctctgaagccatcttcgtccttgaaggccgtctcttcgtcggtttcttaaccactaccgggaaactcatctccaaacacgtcaacaaaggagacgttttcgttttccccaaagctctcctccatttccagcagaaccctaacaaagctcctgcttccgtcctcgctgctttcgatagccagcttcccgggactcaagttgttggaccatctctgtttggttctaacccaccgattcctgatgacctgcttgccaaggcgttcggggctgcagcaccagagattcagaagattaagggaaaattcccaccaaagaaataaataagtttcagaccagagcactaatctaataatgatatacaatgatgaacataaaaatgtaaacttctaagcaaaagcttgtaactttttttcattcttttctttattattgtagatactcttttgactatatttggcccattgattacgatgagaccagttttaacatgtttaagagtctatattatatatataa

SEQ ID NO: 10829 - DNA, 1789 bp, Arabidopsis thaliana landsberg
tcagagactgaggactaaaatagaaagctttacctaactacttactagggttatatttaataaactaatgtttaaggtcaggcacacacaaacaaaacacatagctaatgtctgaattaaatataataatgaatagacaataaactagagaaactattgattcttataataatgacacaataattttattatacaaagcttgatttaaaagttgcagacagacatctttacatatactaatccatctatgtcgatatcaaaaaacaccagaagcaacgcaacccacttcagattaaccttatagatccagacttcttcttatggcgtaactccatcactgaactataccctgtcagttctgttacttaaatcagtgtatgctaaacccttcttcatcacctaactcttggcacaaagtgtgtaggttctcgcagcgcattccaaagcatgcctttatttactctggtctctgggtaatactccgagacgggctctcgagaagagatcgtcttcgaaattgggggctttaatgtgccgcctcactgcctcttttgtggttcttcatctgagtctgtataccacttgtataataaaggagatagaaatgtagggaagagagtaatagagagagactttaaaagtgtggggacttattaaagtttgaagcctctaaattccgttaagaacacacaaaaaaaaaacatgcgggtaactagagtttacataaaaaaagacagtactaggtttacggttttgttgcatctcacgcaacgtgttgagccaaagcaagaatcttgagatgtttcttcttgcgaagctcatgaggaacaggaccaaacactctagtaccaatcggctggcgatcagttttagtattcttatctttactatcaacaagaacaaccgcgttatcatcaaacctaacttcacttccatcaacacgacctctctgcatcgcagcacgaacaaccacaccatacacaaccgctcctttcttcactttaccgtttggcatcgcttctttcactgaagcaactatagtatctccaagtctagctccttttttcccctttagagcttgaatacacatcactttcttcgcacctgaattgtccacgactttgagaacagtccccatctgaataaatgtccttctctgctgctgctgcttcaaccaacatcaacaaaaaagaataagcttaagacactaaaaccattagaagaatactttcattggttggtttctgacctgagagaggatactttcattcatcattccattagaagaattcatcgaaccaccattgttaagacctccaagcaatgaacgtcctcctgctcatgatttgtgtatgaatcaaatcagatactataaccataaacaacaaagacaacagattttaaaattttggctctaaatttgctaaatcaattacaaagttcaacaattttgaagctgataatatgttgaaaaatgggaatctttaacttcacaaagatgtgatttttaaacaaacccatcaataaccaaaacccatcacagtctaaaacataggattaatggattcaatacacaagatgagatcgaaggaagaggaataaggtagtctcttacctcgggttaatctggaagcaaaagcagcggccatttctgcaattgaaaattttccatcttaatgcaaataattacataaaagaagagaaaagggcttatattgagagagatagattgaaataaaattcaaacttaccgattctctgttaatggagaaatcaaatacagatttgt

SEQ ID NO: 10830 - DNA, 2043 bp, Arabidopsis thaliana landsberg
tccataatcggcagtgttttttttatctaaaagcacctccaatggagagagtctgtcgaagggttctctctattttttttatgattaaatttcaaaaaaattaacaagagagttttttttttttttttggttttttatagtccaatggtaggttcttttagaagaattctctggaaaaacaatattaatataaaattattttatttcatacaatttaataattattacaaagtataaaatattaaacatacattaatttgaaatattataaaatagatatggaaaaaaacagaataaaaatcagttgttctgttgattgttacaacatttagtcacgatatacaagagaaaatgacttgattcatacctaatttggagaatccatcaacgattactctccaaataatattttctattctccgattgagtttatcttccggtgatagtcatcaccatctgcaatgttataaaaatcatgcagtacgtacttaggtgctagagtaccgcctataagggattaatcgtcgactaggcgttaaatcaaattggcaaatatgctatagtttatataaatatatagtatatataacttttaatcagtcatatttttaaaatttgatgtagcattgtggtctggaaggttgtttttggtagccaaagtgataagttcgatacctacaagtggacaatattatgcattttagttaaaacgaggggtacatctgtaatttcacgtacaaagtcaactgcttttcctacaaaacctaatcgccgtcgtcaaacctgagtttttttttgttctgattttttcgtatttcttctatttcctcatcattttatcgcatctctttaccaaaataacacaaatacaacattaatctttggatgattgaccacaaaatggaatttaacgtagtcttgaacacacgaatttttttgtttcttttgttaagctttacatccattcaaatttggacacgtgtccgtttctctcctttcttcaaaaacttcccccagctaccatcatcttcgttaactccgctaaagcttttttaaaaaggattactactgtttacttctctgaatgcgttcactgcttcaccgtactatcttactcacatctccgtctcattctcttatccggcgcacttctctctccgccatggccaccaccgcctcctcttccttgctcctcccttccatatctctcaacaatctctcctcctctaaaaatgcctcctttggcttcgccgccaaaaatctcagccgatctaggatttctatgagcgtctctgctggatctcagagtactactgttcacgattctctgttcgctgattacaaacccacctctgcttttctctttcccggtcaggtaacttccgattacatgttatcaatctgaacaatgaaaatgtggactctgattgatttcgtatcaatttaggaaatttggaattgcccagattgaaaagtttgctaattttgatctgattgatgtgattttaattacaatgtagggtcttcatcataacgtcatattctttgcttgtaatctctcagaactcgtttcaatttttagatcaaatgtgacaaagtttagatgaatttgctatgtctcagggagctcaagcagtaggaatgggaaaagaggctcagagtgttggagcagctggagagttgtataagaaagctaatgatatcttagggtatgttcctttgtttaaagttgaaacctttttgtttgtttttgtgaatgaataaactatatggtggctttctgcaggtatgatcttttggatatttgtgttaatggaccaaaagagaagcttgattctacggtcataagccaggtatctttgcaacttttggttagggacaacttcagatttatgatcttctttcttgtctgttgtcacctaactctagcaaaacttaatttttatgtgatgtttccttttagtatgtacattttggtatgatgtctaagttattggtctatcattttctcagcctgctatttatgtcacaagtttagcagca

SEQ ID NO: 10831 - DNA, 1610 bp, Arabidopsis thaliana landsberg
tattcacactagatggctatattttatatcataaatccgtaaaccgccaaaggtaacaatttgattttcgatagaaatcgccatcacactaactttattgcaagaaaaaaaagctaaaagagagaggttggcgcatattattacagtattatttactttttagtttgtattaattttcataaaaaatatttgtttcaccatgtctataagagctttagcattagagaaacttttagctaaacaagttctcgtacagccaacaattgttgattgtattttgcatcatttattggggaaagtagtaaaaatggggagttcagcatttctgtgatcgagtttaggcattgatccgaaaacacgtaaagaacaagtacgtgctgttctggtttagaaaagtaaactacggtgtcgttttagatacagccctaccaaagttgcaacttgcatgtacatgtaatgtgtaaccaaaattaccaaacaaactacaaagggaaagctgtgaaaggagaagaaccctacttgttgacacatatacaccaagagtatgggtcatgatgtgggatccatcaaatttagccattagtctggatcaacccgaattcgacacgtagagccaaggacgaaacattgaatggagaaaagtggagaaaaacggttcgatgatgatgaaccatcttcctagaaaagaaaagaaagatatactttaacatttttgttgtagctatactagtagctagtgtattcaaagtcacttggctgaacgagtaattaatcatgccctgcttcttatgctcttagagtaacggcatggtactggttgagaatcattgggactaatttgtttcaaacttacaaaccagaagttttatgtataagtgaactagtttactgtttgagggaaactagttaaaaaaattgcagtgtggatggttatttgacaatggttgtgggaaaaagccgatgaggtcggtaaaatctcgtggcaacgtaccttatatgggtcaaattcaggtaaggatggattcacatggtctattggctactactactactcatgaagccttttcttattcaagaattttgtgttttcatactcgtcgtacattcaaattataccaacgcgttttcctcttttgatagcctgtctgataacagagcaattgatgaaatagttggtcacgatctgaattttgaagttgttctcaaagtgaaagcgaatatcaacatgaaattcaatgaccatatacttacttatatatataagagcgtggcttacaaattcacctcgctaaaagccatcacaagccaagaagttttctgtttgtcccatacacatttcatgatcgagaagggggacggtgatgagatagagatggtgcgaaatcgcgagccgctctgccaacacgtttcgcatcatgttgttcacagaatcgcttaattagggtttctgattccccagcgtctttgaattgataaattagggtttcagcgtccgtataaatttcagtccggtccggtttgggtgtagaagttgtttccagaatgacaaacccttgttggtttaacttcaatttggcttttctacaatttcaatctatttggttgtgatt

SEQ ID NO: 10832 - DNA, 579 bp, Arabidopsis thaliana landsberg
tcttggaaacaacatccattctctcgttcctaatttattttaaagttggtgtgatgatgtcatattacctttgtgtgttaggtatatctttttcttttctttttctaggaagatggctcattcatcatcatcgaaccgtttttctccacttttctccattcaatgtttcgtcctttggttcaacgtgtcgagttcgggttgatccacacaaatggctaaatttgatggatcccacataatgccccatacccttggtgtatatgtgtcaacaagtagggttcttctcctgacacaacattccattattagtttgttttgctacacattacatgtacttgcacctttggtaggattgtatcaaagacgacacgtagtttacttttctaaaatctgaacagcatacagttcttttttctggtcaatgcctaactttgactaggtcaaagaaatgttagctccactttaacaacattttccaagcatgatgcaccaaatctcatcattatcaatatcacctaccgaacattcagtgaaccttttttccagaactatgaagattagttaaaccttttaactatg

SEQ ID NO: 10833 - DNA, 1263 bp, Arabidopsis thaliana landsberg
agcgatgtcacgtcatcgatatgaccgaagtttattttgcggatgactttagagttcatatgattaacttgtatagttcggatatgaatggtagatttgtaaacgaaattgacttataggttttgtttacagcaaacccaaaaattaaaagcctaatgaagaaaaattcggattgggcttggagttgttcggatgaattgttgtttgtagccttataggggcccttgtttatacaagaagaaagaaaaaacacaagagacgacgcaattgaaagaaaaaaaaaaacgagaagcgttttctttctctccaaaatccattactcgcgaactttcctctgctaaggtattctttaaccttgtcaacacactagccttaaggttgtaaatctctctctctctctctctctttttttcaatttctacgaagattggtaaccctagcgttttgttatcttcgctttaatctgctctgttcgagatttggttttgcaattttcacggatttcgttatctttagtatacatatgattgttgtcaataaactttgcagaagaacttgttttaagccttgatctaagagcaccaagctgaatttattctgatttctctgtttactgaatagtgttcactagaaagaggtggtgattatgagttcaagcgaagcgtttcccgtgatgcaggtaactataggtggtgtttatctttctcttattgttcttagactaattacgaaggttcttacacttatgtttggactaattttggcaggagatcatgcttgagtttcgtgctgggaagatgtctttgcagggaacaagagttgtccctgatgcacgaaaaggacttgtccgcatagctagagtaatgtcgacgcttttagtttccatttagtaatttgaatttattcgtttccattgaacgttggagtgtatcagcttttcctattgaagataaagcatatcggaatctaattgttggtgtcagaacacgtttattactggttctctgtaaatgttaacctaggttttttaatcctgttatcctttcttttagggagacgagggactgattcatttccagtggcttgatcgaaaccagaatacagtagaagatgtatcctctgcacttgtttttttgaatttttagaaaggactagagattctcctagtttcaagtctttgctatcccaatggattcgtgacccaagacggtcaaattttttagctcttccacctaggagattttttttttttgccttcctgaa

SEQ ID NO: 10834 - DNA, 764 bp, Arabidopsis thaliana landsberg
ctcctatctttctctcactctaacctcgcaaagaaaaaaccatcttactttctttttttttctctgaaaaacctcttttgattaggtttaaagatggcatcaaaaaaagcaagaaaaccaaaccgagccgaaaagaaactcacaagaagctgtttcaagaaacaagttcctcaacacaacaacatcaacacaagtataactctcgatcaaacatctacatctactattgtctctacatgttcttcttcatcaacgaatttgtcttctcctctagacacaatctactctgttccctctccatccccagcagcggtgctgacgtcaccaggcggttgttgtaccccgaaagccaagaagtctaggataccggagatgctgacgtgtccaccggcgccgaagaagcaaagggtctcgaaaaactgtgtgttacgacggagacagatcgttttctttgctccgccggagatagagctcttcttcgtcaacgcacacgatcgatgaacgtacttttagttaattattagtatctttctttttttgatataggatcaatacagaaagtagtattagcaggtgatcaaaattcatctctttgatttgttaatacaataacgaagagtaaattattatgttttgcgtactgttttttcttattttggtttgtttgtttttgttattatttttttcattattttggcgcttgtttttttgagatgatttgaatcaagtctgtttgagtttttgtggtagggtatatcaaaaat

SEQ ID NO: 10835 - DNA, 787 bp, Arabidopsis thaliana landsberg
  unsure (1)..(787): unsure at all n locations
tctctcttattctggtctcaaaaaggcatcaaaaggaaagaaaccactaagaagaacaactacaagaagaagaaaaagaagccacttcaagaacccatctcctccatgtagtatcaatagtgacgtcacttcaacgtcatcaacatctacttcacccacatcaacggccacgccatctccggtttcagcagagagtggatgttgtactccggagaagtcacgaataccggagatgctgacgtgtccaccggcaccgaagaagcaaaaggtggcgcaaaactgcgctttaaggaggagacaaatcgctttctttgctcctccggatgtagagctcttcttcgttttcgcacttggtcaacaaaataataaataagttaagtttataattagggttttgtgattattatcatggtatcaatatctagtttctagtttgattcaaatacaataatatttaaagtatattatagagagtgtagtgtgaggttttgcttcttttcttcttcttcttcttcttcttattttgcttttctccctccttggctcttttttaattttttcgataattttgaattaggtgggtttgaatttctggtagggtatgattaatcaaataccctatctcttttttagttaagtatgtaagtgaatggtgcttcctaacatttcaggcttgttagctntgcagtttctattttgggtttgtattttggcttgagttaattaggagttggattgttcttcttgcattttacctcaatactttatacgtaatctcatcaaaaac

SEQ ID NO: 10836 - DNA, 1399 bp, Arabidopsis thaliana landsberg
aattatcttctctgagttcttttgcttagtttgattgtctgttgttttagacgaatggctgatcaaggattagaagagagtaatccaatggaccttagcaaacatccttcagggattgttcctactcctcagtgagttcttttgtgcctttgtctttattttagtctcttaagagttagtgtttgtttgatgtctatggtgaactttagactgcaagcttgtttatatttgaaatatggaatacaccttctcaaagttaaaaccttctaacttgtaatggtgtggtttttgtttgtttgtttagtagtcaagtcatttacaagatgccaccaagaattgctgctatccgtcttgtaagctcgcatcgtgaggtctatgaaccatgtgatgattcatttgcgctagttgatgcattactcgctgatcgcaccaaccttatagagcacaaccctaagatttgtatggagattggatgcggaagcggatatgtcataacttcacttatacttcttcttcaaaacgaagttcctggtgttcattatctcgccattgacactaacccgatagctacaagagtgacaaaagaaactctagaagcacatggagttaatgctgatgttatctgcgcagatttagctactggtctagagaagagacttgctggctcagtcgacgtgattgtggtgaatccgccttatgtgccaacacctgaatatgaagttggaatggaaggtattgcctctgcttgggcaggaggggaaaatggccggacagtcatcgataaaatcttgcctgtggttgatcttttgctatcagagaaaggatggttctacttagtgacattaacttcaaatttcccagcagagatttgtctgatgatgagaaagaaaggttatgcttcgagaatcgtagttcagagatcaacagaagaggagaatctcgttatcctaaagttctggagagacaaggatgaggagagccaggacaaagagacatcatcatcatcgtttgtttcgcagttttcgaaatccttatcttcgcttatggagaaacaatggcgctgatactacaaagatggctagagatctcataagcatgctttgtttaaccaagaattctctagtgttttaatttttatgaaaatcatgttttgtgttggtggtgtagtcgtaacagtgatttgatttagtggggttattggttagtggattttaactgatgtgaaattttgattttcaattccacattatgtgatttgaaaaaatcaatgaaaaattataaatttctacttgaaaaaaaatgttcactaaatcgctaaatatgcaaaaatataatagcgttataacactaaagctgacgtggccgaaaaggagtggactttcacataaaacccgaagac

SEQ ID NO: 10837 - DNA, 1081 bp, Arabidopsis thaliana landsberg
agttaccctattctctggagaagccactcataggattcttttaacgtctgtatctcttgactcacaggaaccaccaaagcctaaggatccattccaaggtgtaggaagaaccctaggagccagcggatctggttcaagttcagcaccacaagcttcatctgccccaatgaacgtagcaccagcaccatcaagagggctagttgtagatccagcagcaccgacaacctctatccagctcagattagcagacggaacacgccttgtctccaggttcaacaaccaccacactgtcagagatgtacgtgggtttatcgacgcttctagacccggtggctccaaagagtaccagttgctaaccatggggttccctcctaaacaattgacagaattggaccaaaccatcgagcaagctggtatagctaatgccgtcgtcatccagaaattctagacttacataactcatcccttcgatttatgtctctctttttttttttttgcttttgtgtttttgaacctgatcgttgactttagtctctaactatctggtcaacgctctagaggctttggattttcgtagatttatcaaactcttttcttcagatttattaataactttagcagtttagcttttgcataatttatttatttcttcaatcgactagctactaccatatcttttagaaagaataatcgaaaaaatattatccaatgagcaaattacttatatccttggactcgtgaattgacgaattgaccagcttctgcataaactccacacacatacgctctcctaatatcagggacataatggtaattaacgtacctgcccatctgtcattttccttgttctcttcaaaaccttttttttggaaaattaattttatttttttgtaaacagttctataatgtctgttattcggaatccaaagaaagccagagatattgagatttacagtgaaaatctacagaggaagagatagcgaaggacaccccttaccctattttcctattttagttttcattacaaccttaatcttcgtgttgtgtgttctgtaacttcccagattttttttttctgttt

SEQ ID NO: 10838 - DNA, 1061 bp, Arabidopsis thaliana landsberg
atcttacccagactggtcaccaacactctcaagtgtgctccatggaacacgtgtcatcactgccatttctgtgtcaaatttagtctcaagtccaaggaccagcgttaccaatgctttcgttatgacggctgaaaattcatcctacacagcagcacagcttaagaactatcctatataaaggaaaactataaagtctttcatgtaatccgtacctggacctctgacatgtctacaccatcagcataatgtgggtcaataatttctgagacgttttctgccagttcaccagactgcgatacaaacagcaaatagtccttgtgaagtgccgcattgttgttcacttaatcaaaacttttagatagaatcctactaacataagcacacatcttgtatcccagaacaacataacagcttgcattacattgtttagtatagaggcagcaaataatattttgaaaatgtaccacatgagtgacacaaatatataagaaaagttgcaaataaacctttcacaactacgcttgaattggtaaaattgataacttggaggtgtaagatatgaagttcagtgcagtggaggaagatcacatcacaaacacatcgagaaagtaactagacccatgaaagtttcttggaacttgatgcgaagattatcaatatttaaactggctttttctacatgactggcctaaaagaagattggaccatatgatacaaccccattgatccgtcgcaacaggatacacaggtatcaacgtatatgctgagggtgccaaatgtgaaaaaggcaagaaaacagaataatagacaagaacaagcttactgttttgtggcaatactcagcagaattaactatgtagcatatcaccctttcatctctctccgagacctgcacagaggaagtgaaaagggtaaactaagtcataaagcacacatgggaaacaggaagaaggcacacctttatctgtccatccatgcctgtgcgtgcggcaacgataacagtgccatcttttgggagcttataaaatagctttgtagcataggcctttaaaactcgttga

SEQ ID NO: 10839 - DNA, 1188 bp, Arabidopsis thaliana landsberg
gttcttacattttagtgtttgacttattacgtggtctttatataacgtttttgtcttggtctttcttaggtacaatgggatgagccaacagcagtttagagaccagataaagtctcaccatgggagatagagcctttcttggcaacttccccaatttcaactcctgctcaacaaccacaatcgaaatgcaagcggtcaagacccatcgagccatcagttaaaacaccagccccacctagtttcttgtacagcctccctcagagccaagattccattaatgcatcccttaaactgtttcaagatccatcacttgagagaatttcaggtggatactcctcaaacaacagcttcaaacccgagactcctcctcctccaacgaattgtagctataggttgtttggatttgatctcacaagcaattctcctgctccaatccctcaagacaagcaaccgatggatacttgtggagctgccaagtgtcaagaacccatcactccaacctcaatgagtgagcagaagaagcaacaaacatcaagaagtcgaactaaagtaattttctttatcaactcatataataacatagcaacaatgttttgaaaatctgatttctttgatcttggattgaaaaaggtgcaaatgcaaggcattgcggttggtcgtgcggttgatttaacactgttgaaatcttacgatgaactgattgatgagcttgaggagatgtttgagattcaaggacagcttcttgcccgagacaaatggatcgttgtcttcactgatgatgaaggagatatgatgcttgctggtgatgatccgtggaagtaagttctaaaataacagagttaaacatttccggtttagctcaaatcagttaaatgtgaacttaaaccggaactgattttgcaatgttctgttgtgtgggattgtgcagtgagttttgcaagatggcaaagaagatatttatatattcgagcgatgaggttaagaaaatgacaacgaaactgaagattttttcgtcgttagagaatgaggaatatggtaatgaatcattcgaaaatcgtagtatggggtgagaggtttagctgtaaattaaggtaattcggcgacgtcgttttagtgcgttagtgtctcaagactttttttttgtctgtgtttataaagcttgtccttttttcatgtcatttttagttg

SEQ ID NO: 10840 - DNA, 1028 bp, Arabidopsis thaliana landsberg
attgataacgtggatgttcgaaatggcaaatcaacatccttttggtaagatatgggttttcattgggtaggttacttgaagtgacgagtcctagaggagtcattgatctcaattggtgatgtactgcagccacgtcgggctagaaggcacataatgagtgttttgaatgacatcaaaacagagattcaggccatccgtcaccgagaaagagaagcagaaaacagagacacttcattatgggaatccttgggggataaattcaggaaaaatttcaggacaaagcacacttggaacaatattaaaaccacaagcctgaaggtggaatagtacaagggggtatggttcttctactccattcctaagtactcatttctacaatggctcgctcttcacaaccgtttagcaaccgatgatcgaataaagaattggagctcaggaaaacagactgaatgttttctctgtgacaactatgaggagacaagagaccatgtgttctttgcttgctcatactcagccggaatctggaaagaactagctcaacgacttctccatgatgactacttcacggactggaaccaattggtagctttgctcaacaaccaaacaccccacgacttcgtctatttttgataaatatgtgttccaaggcaccctttacaacctttggtgtgaaaggaatgcacgaagacacggtgaaatgaattctccacatgttcaacttataaatctcattgacaagaatgttcgcaacctgatcaactcaatcaaaaatctgggaggccgttggtatgatgacggcctaaggttgtggttctccactcgaccaattccgtagacaagcttggcagcaataagtcaaaagttctcctctaggctcactatgtatttcctctcaacataacttcaaaaaactgaagcattcattctacaaaagactttttgattgaataaaatttaacattctttcaaaaaaaagatatattgatatctttataataacaggtcaaaccacaaattgcctccgttaa

SEQ ID NO: 10841 - DNA, 1335 bp, Arabidopsis thaliana landsberg
aacgcagagaaagttactaaatgagattggactttacgggcttgcacaacaagagatttcgaggaacaagaacggaaaatacgctcgtatagccaataactaactggctctggagaagcaaagagaacagagacggctttcgagacattaccgccttcgagatgctcaagaatctgacgggtcactgtaagtttggttccggtgccgataacacgcttgtgggttttatcttgtttgaaaagacggccaaaagcagaagaaactccggtcactgccatggttcatgacctcaaaggttgagactttaacagatcagaaactaaacccatcaacatttcttctactatgggtttagggtttaaaacgaataggctcttcaatttctgtttaaaatcaatatgggcttttagtgtcggcccattaagtatgtgtttttttaaaacgaatagactcttcaattgctgttttactaagaccgatcatatgcttaaccaaatttcaagttatcgtatttgtttcttgtaaaactatatattaaaatagattacagaaaatgaaaaaaaatacaaagttacatctcataatgaaaattacaaacaataacaaaagtgaaatatcaatatacttcacgttaactccaattctacgatagaggaaaaaggattacttgttggatgctcaaacactgtgtcgccatatccaatacactcccaagaacaaaagattgtgttgtaccctttgaaaactattgggaatagacaacggcacatacatccagtgcatattggtcgggagagcgaactgttgagaaagacttgaacgtttgtccattttgtaccttcaattcctagtgactgcttagaaatgtaatcttttacactactagaaggtttcatgtacatgtctctgccaagtaaacattcaacatgaagagtcgtgcaacagtcattgcatttataaaatcgcatttctcgtcttttgtcccacggagactctctttcttttacttcttctattttgccttcgcaaacctcacaccagtctggttcatcacttgcctttttcccatcgcgaattctaagaaaatgactgtcgtgcttgtaccttaccttgtatgggaaggtagcgcaacgaaaacatataatataatcgcattccatgcaatttaatttcgaatagcttttccctttgcatatttgacatcgtacctttttctctagctccgaagctatgcataagggatgtttgtggcattgatattcaaatggttcacgaatcgaggcacatctcaagtctagccggaatcttttttcgcctatatgatgttcatagaag

SEQ ID NO: 10842 - DNA, 1102 bp, Arabidopsis thaliana landsberg
agtcgcttcttttttcttcttccaaaatctttacttttgtgaaaccgaagagataagacgtggagaaaagcagacgtctctgttgtttgtttttgattcatcgggttctaaggatttgtctgtttccaagacacaaactttggattctcttctcttcctgttcgtcttctcttgtcttgatccttttgttatcatcatcatctcttcatcgagagaagagagacgagattagggatttaagttaaggaggatgtattatcagttgaccaagtcttcttacagagactctttgaagattctggaggctgatattgagcacgccaatggactgtgagtcatcctctgattctttctgggttctttgatttttactgggtttagggtctttagtatcgattgttatagttggcttcgatgatttagggtttagggccccacaattttacattttcggtcgttatcacgaacttagattattaaaaatcgaaactttgcagaaatggtcaaaaaattgctaaattttgtggcatgcgttttgtggtcttgatgcatatgttgtctgaagaaatgggttaaatgtgattagaaggatggtaactgaatagtctcacaatttgtatatctgtggtgtggtattgatgcatatgttgtctgtggaaatggtttatgtgattcgaaggatatagtaactgcttagtctcagaattggtatctgtgtggtttgttcttgaggcatatgttgtctgaagggatgggttatgttagaaggattagtgtaatgactgattactctcaaatttgattcagggctgctgagattccaatgggaaagagcggtgtgcgacttcagatgaaattggtgtgcagcaatttggctccattcttcatattcctgctacaatggatggatttctcatgtctgcttccaagatattttgatttcttccacatactcatatacaaggttgttaccgcatacatagatatcgagttgtgtgtgtgtgtgtgtgaaatggtagattccctgatagtttctctcctttcctcttggcttgtttgttttataagtgtcttctttgtcttgtacaagtacgtgctgatg

SEQ ID NO: 10843 - DNA, 1386 bp, Arabidopsis thaliana landsberg
atcaattgtttttggagcaaaaaaaggcaatctagcttgggccttttcttattggtgttgtagcctgtaaagtaaacttaaaggatctatacctttctattctaattcatgaatttccggcagttaggggcttaacataagcatggcaccttgagttcttctgcctcgtctggatcaaataagtaatcatacctgccaaaacaccacacaacatttcttaaactatgacaatcaatcagctttagattgaagaatggtatatatagaaatgcgttgtgtacgttaactcctctcccacagctacattggccttggctatcaggacaatcctgctttcctcatctcctacactcataatcctcgcatagcagtttggtgtacactacacaccacgtattttgatttaggctttaacagtctgtcaaatttcttgtacgtaaaaagtccatgccaagcagcttaccgaatgattgatgagccgagctatattccctttatctgtagcatcaaccactacttcttcactgatcttgaaaagctgcaacataaatccttcttttggttaagagagatagagagagaagagacaatttgtgaagataaaatggaaactttttcaactcacatagcaatcctttcctactctgcgataacgtgcttctctcaagtctgcaatgctacctctcacctgttcccctctgtattcaagaacctgaaatacaatagcacctctcgacaataaacactcccctcatcccaaatagaccaaacacaatatcacaaatgggtctgctgacataccatttctccttcttggatatttcttcttgcaaaaagaccccatccatgaattccagatcgcccaaagcagacccgatccatttctgtcctctgttacattaaacatacacatgttacagccgataatatcaaaaaataaaacctgaacattccaatctcgttcaaacatcagagaattcttgcctgcaagtggtgaagtcgttccctgaaagaagaaaacgatttgggttcttctggcacatgctacacataatacaacccagaaatgtcagatccaaaaaataatagtaagaaacggagtagaagaactgcatggagactttcttactctgaatgtgtttaaagtttggattgctgctgatgcatgatggcgtggtccccttgtgtggtgaggaatggcttcttcttcaatcctctacaaaacaaagatcagcctactggacaaaggagatgtgcaacgaaacatacagactttttgtggataagacccaatattaccttcttgctataaatctttcttttaaatactcgacaacgagcagcagaaaatggatcacatgtaatggtattctctacaggtgcttc

SEQ ID NO: 10844 - DNA, 798 bp, Arabidopsis thaliana landsberg
ctatcacctttttcaaggggtccggagaagaatactaaccaattcgtttgaagcaagtcaatggagcaaagacagtgagagtagtaacaagaagaacaaaagttcttctgttccaccaactaatcccaaaccatccttcaagcataccagcatgatggattccatattcattcttaccagccaaaacatcaccttcaaaataccaaacaaaaacagagttataaaaccaaatcttagatccaatctaaaacctaaacccaaagaagttaaagataagtaccaatgatgatcatataaacgatcaaaacaccaatgttgctaacgagaatcgaaacttgcaacataatccttccacatttaccaaaagaatcatccataacaccaccgtaagatctttgattcccaatgttactaaacctaagcaagaactcaatcgaagcatcggttaagaaagccatgagaacgatgatcgtgattccgggaataagaccgaggatcttcatcgtcgcaggcaatgccatgataccagctccgatgatcgttgtagcgagattgaaaaccgcaccactaaacgaagctccgttgaattctcctcctccgttgctctctgatgatgattcttgcaacaacggagcagtagattcgacaatatcggtacggatttcatctagattctccattgatcctgaaatcattgagaatcttggattagatacagatgttgaagttcgattttgcaacggattgatcaaattgaagattagagaaaaggaagaagaaaccgggaacctagagttt

SEQ ID NO: 10845 - DNA, 733 bp, Arabidopsis thaliana landsberg
acattctaaaaagagagcgataccctgctctagaatagtaaagctaccaaattctattcattacgacatggctcaaaagataaagtatttcgaatattatacgatatcaaccccattatcattgctataaaataagccaaactttccctctccattttcaataatctctcatcttctttcgtctctctttctacggttcaaacattaaaaagatagatggagaagaggagctctattaaaaacagaggagtacttagattaccaccagggttccgatttcacccgaccgatgaagagctagtggttcaatatttacgtcgaaaagtaaccggtttacccttaccagcttctgtaataccggaaaccgatgtttgtaaatccgatccatgggatttaccaggtacagaaattgaaaaatctactctagggtttcattcaaattcaatatttgatggtgtatatgcatgatgatcacaggtgattgtgaatcaaagatgtatttttttagcacgagggaagctaaatacccgaacggaaaccggtcgaaccggtctaccggttcgggttattggaaagcgactggtctcgataagcagatcggtaagaagaagcttgtcgtggggatgaagaaaactcttgttttctacaaagggtaaccaccaaacggaaccagaactaactgggttcttcatgaatatcggcttgttgattcacaacaagattcattatatgt

SEQ ID NO: 10846 - DNA, 1203 bp, Arabidopsis thaliana landsberg
ttgtcaccacaataaacaatgtgaacaaatttatgtcggagcgcgtcatttcttctgatttcttctgatttctttccattttttatgtgttacaaaattattgtttttaacaaattttcacacctgtggtctgtagatatgatttaaatatactaaattatccaatttaattataattgtttatgcaaaaaatttgatcatccgctttctgcattagctcttcaacacattattgtgatttctgaagtagggagcatatggatatgtaattatgtaccaccaaaaaaaaaatgcgcgattgaaaaaatgaaggacacatctgttggatcttctgataaaactcccacgctaaaatcaacaccaatgtgattttttgacgtaaaaaggacaatgatcaaaagcgttaagatgtgactgtttctgtattttaggtgagtttttttatattatattttactccgaattccttattgtgaagcatagaatgcttagagtttatcataacgagattcgaatacgagatcacaaatcttgttttaaaacatttgaaaattggagaattagtggctcacacatgatggagaaagatgaaccgcatgcctcccattaccaacgagtctggtatcaatgtcccaaagtgatattattataatcaaatgtcataaaatgaacgtgagtcatggcattgccatatatatttatttaaatattttacatctcattgcccaatggccggcaaaaaagttgataaatcgtcgtccttttgccacatcgacatttaacccttgggctataaatagaaagtgagccaattcagaattctaaacaaccatctatctaagaagaagcagaaagaaagaagatctaactaatgggcaaaaatgaggaagtgaagcttttgggaatatgggcgagccctttcagccgtcggatcgagatggctctcaaactcaaaggtgtaccgtacgaatacttggaggaagatttggagaacaagagctctttgcttcttgctctaagccctattcacaagaagatccctgttcttgttcataatggtaaaaccattatcgagtcgcatgtgatcctcgaatacatcgatgagacttggaaacacaatcccattctttctcaggatcccttccaaagatccaaggctcgagtcttagctaaactcgttgatgaaaaggtacattctcttat

SEQ ID NO: 10847 - DNA, 1623 bp, Arabidopsis thaliana landsberg
tgctgcgcttgctttctttgatctatttctttattggccctctttgatagtttggttggcgatttacttagttgttgtgccttgcatagtacttgtaggtctttcgggattacacaagttcctgacacgaaagttttggaacaagagagaaaatcctcgttctccattgattgtcaacgacttgaagctctggaaactcgaatcgccaaacctagatgagttagaggaagagtttgactcgttcccgtcgtcggtgagcgatgtgaacattctgcggatgaggtacgatagaataaggatggtttgtcagagaccgatgatattactgggcgatgctgcgtcacaaggtgaaaggctttacgctctcttaacgtttaatggcgatgatcaattggcttcgttttactgctggctcatatgtgttttggtcgcgctctgctggtacaatataccgatgtggctttggtctctctaccctatcgcatattggcttaatttcacgcccttacgcaacgatatgccctgtggagtcagcaacttcttccgaagattgcccacaaacgaagtattgctctgatgaatctctctctctcgccatgagtagtaacacgcggattcttgggcttttctatttggacggctcatatttatcttttgggccttagtgtttgaagcccattattagtgtccgagacaaattattttttatttttttaaaaaaatcattgaaatttatttattttgatttctcagatttttggtgggttttagataaatttggtgtggcaataaaaaattgaaactttggaataacgataaataaaaataaaaaaattccatttctcgagaagaagaagaatctgctctgctctcgtttctatttttcgctctccggccaatctactaaatagttcggacgtgattctcgagataaaggtaagctttagctcctaaatctttggattactcaatctgactgcagatactccgaaatttggtttcgaattgcaaaagcacttccgtagactttgacatcctcgcattttgggaccttttcaggagagaaagaagaagatggagatcgataaagcgatcggagaaagtgacgataagaggttgaagactaagtacaataacgccatcttcgtcattaaaagagctcttgctctttactcgtgagctctctctctctctcattcttcagattcattttcaaaacttacttggtgtgtggttgtttgatatgctgctcgagatttaaattcttgaccatttggtaggatgctgttattggaatttaaacgttgatagagatattttctggaatttgacaagatcattgatctcaaataaggtccctttgtgaaattttgggcctcaaggggtgttcaagggtgggatttcccccacgttagatatatagatacatatacccagttatagttgttgccattctaatccactagcgacgttttgtatcgagatcattaaatgcattttacttttactgacttgtgcagtatcgaagagcgcgcctttagtttcaatggaggaaatgactccacttgttgttacaactcttcccttccaaaaggtcccttttggatgttttttttttttccc

SEQ ID NO: 10848 - DNA, 997 bp, Arabidopsis thaliana landsberg
ttatatagaaacttccagaactctctccaatacctctctgaacataacctcttccaaaattccagcttcaagctcactatttcttcgcctaagtgcatctctctcgtggaacaactcatggttcactcttatcaaatcagttctccgataactcgcttcgaatatctggcttcggagactgagaaagttagagtctaacgaagagtgattccattgtcgaaagtcatggtcttgatcggagataggagtatccgagcggttgattccggtatctttaacatccatgagaagtgatgatgatgtgatggtgattgatgaaattctccataggtgaggacgcaaagaatgtctgatgactctgatttgccatttacctaacagtcaactgacaatgttaaaagagtaaaacatatcttcaacgctttactttattggcgggcaaaaggaacgacatcgtattacgtataaataacgcaattatgaatttatgtgtataacaaaggagaaagattggtaagaactttaaacatgtttaaacaaatggatactaagtaagcttcatttcgaataattactgtgacatgtacgtcaggcttatatattttttcatacctttaggggtaaatttacaaagtgacaatctaaaataattgggagttaaaaatagcaatattgttgtctttcaaagaaggcaaaagtaaatcaccattggttttgccaatcttggatagctagatgaagagcgtgattaggtatgaggttgcaatcttccattttcaggtttgtcattggcgacgtatcgtgtccattcgctaaccactctctaatcgcttctgcttcgtaagtgaatccgtctgctgctatcagaggatctttcatcacttcctgtgatgaaaacaaacaaaacatgttttgagttttgtttcaatcatgatcatcaaactctgtttatgcatagaaactcaccctggaaatgtggcagaggtaatgagaagga

SEQ ID NO: 10849 - DNA, 971 bp, Arabidopsis thaliana landsberg
ttcttgatcatcttcaaaactatgtatatattgaagcggatatggaagctcatgtgaaagaggtatttttatggtttgtcctgttttcgtagcaatattttgatgttttgactatagtttgatgatatattttcctctgtggtataggctatcaagggcatgcggaatatttatgctaatcagaagattttgcttgtccccataaaagaaatgactgctgttctttctgtcgagagtaaagcaatcgatttatcccgtgactcgtgggttagaatgaaacttgggatatataagggtgatctagctcaggtacgatccatttttcatgtgttttaagtgttcagagttctctgaaacctttctgaaatttaagtttggtacaggtggttgatgttgataatgtacgtaagagggtcacagtcaagttgatcccaagaattgatctgcaggctctagccaataagctggtatacgacctttttatacttaagtgtaacaaatgctgtgtattgtgaaacatacttcttcctatcttatatacttagggtatatgtaggaaggaacagagaatgtcaagaagaaagcttttgctccacctccacgtttcatgaacattgatgaggcaaggtactgttccagacttctggtgaaactatcctatgtttttctaagcaataattgtgttctttggttatgatttatcagtatttgtaacgtgattatagggaacttcacatacgtgttgagcaccggcgtgatccaatgacgggtgactactttgagaatatcggtggaatgcttttcaaagatggttttctttacaagaaagtatcgacgaagtccattgctgctcagaatgtaacaccaaccttcgatgaacttgaaagattcaagagaccaaatgaaaatggggagatcgacttcgttgatgagtcgactttatttgcaaatagaaagaagggtcatttcat

SEQ ID NO: 10850 - DNA, 808 bp, Arabidopsis thaliana landsberg
tggtggggttatttatcaacaatttgcgcacgaatgccaaaacaaagcttatcaatttttttggcattttttatctaattagtgttgataggcaaatacttacatcattcttttaaaatattctttcttctttttgctataaagaaataaataacgatttttcttcttcctttcccacaaattcattttttatgaccatctcatttttaaagataacttgatagattacgaactcacatttaaactagtttcaaaatctgtaaaagatctatctttactatttatattacaaaggcttatggtaatttctacactttataaatgggattttgtgcaaaagaaacccttcttagtcgcctatttttgcaactttaccctctatctccgaaaaatgcataataactctatgaagttaaaaataataagcaatatattggctattgtcaagtttttaaaatttaataagtaatatatcaaatcgagactctcgagacgaggagttcaactctttataattcctttttaaaccctttagaatctcatatatttcttctagagtgttactttctttctacaaaattattatctaatctttactctgtactattacatttgaaaagttgcacattcatgtatgcatcatttcctaattttagaaaagatatatttcctagttaatgatatacggatcaattttccaaacaattatttgtgatatcttaaagaaactttaatttcagttgtccatgaaacatgtggtaatatagagagcattcctaggtaacaacatcaacttgtaatatatata

SEQ ID NO: 10851 - DNA, 1300 bp, Arabidopsis thaliana landsberg
ctcttctaatctcgatgacttttaagttcaagttcgttagattctatctcactttgtaaatcttggtgtgtcaaactgttttttttttttccacaacttgtaatctccaatctagtgatggtcaatagtctgtgactatcagtcatacgaagagtgagatctaaagtcatttatatatcaaactcaataaccgattttacaaaaaaaaaaagtttcttcagtaaacgaaatatacagctgaagatgagggaaatagagcacaacattactcttattcatcaatcacagcaccacatgacagaagtcttcacttcttggtggtcacacgaaggccagcagcaggaaggttccggtacaacttgagtataggcttccatttactgttctctaatgcctcacagtgcggtgtagcatcactagccgtgcaatatgctcaaggcgcaaccacatcgcagacatagcagtacccctacacagtaaacattaactcaatcataagactctgttgttacattacaccaaatctcaaacccaaacaactaaaaaaaggaccaagttttttcaacatccaaatagattattacctgattacaatgtgatgagtgttgacttgattcaaaggggaatttcaagcagagatgccttggatgtggaaaatccctacaagccacctaaatattcgaaaacagagacataaaccctaaatcactaattgtgctaaaaagatgtgaaaagcctcaaaattttcagacaaaacagaggacccaagaatcctaataaccaaacctggcctttctcatggacaatcgccacgtcgtcgtcacattcagatgcagggctatcggagagctttcgtgcatcaaatgaatcgttgggatcgaaatcgaggataaagcaatcctctttctcttcgaaaatcttcatatcttgtcgtgttttgagacaaaatatacctctgagaggtgttccctcttcttcttcttcctcctccttactaagtctctttcttcgcttgcttttcgttttcttctttgtctcacatggatctggtgtgatccccactacaactcttcgctttctcaccatttttttccttcctacgactgtaaagtttcgatctttttgttgcttttattgaaagagttgttcgaaattcgcaaatgaccgttgttgttcctacacaagcaccccaagcagcggtggcagaggatttgatctcatttttgaattagaaatatttgattttatttttgaataaatcgtgattagagaggagagtgttttagggtttacaattagt

SEQ ID NO: 10852 - DNA, 530 bp, Arabidopsis thaliana landsberg
ttcgattaggtacttttgtctaacttacataaattaagagaaagaactaataatacaaaaaaaaagttatatttttaatttttgattcttctgagcatagagaataatatagtccaaagtgttaacactccgtagaaaaaaaaaagtctccatttatgattattttattaactccatgcactaaatattttgactccaattttagatcgtactcatatatcaatgccccgcccggtcttgaatcaaagattatggaatcaatgtgctacttcttgtatgaaaaagatggcaagagaaccctaaagccgcctccaaggggggatatcagcaccgatcttgtccgaatcacactccagctgactcaggagaaagtcaagaaacttaaggagcgagccaagcaagaatcagcgcgctctctacatgatctatatttctcaacgttcgtcgtcacaatggcctatctctggagctgtctggtgaaggcgcgcggtggcagcaaagaaagaacggtgctgtccatgtattcatgc

SEQ ID NO: 10853 - DNA, 2593 bp, Arabidopsis thaliana landsberg
  unsure (1)..(2593): unsure at all n locations
gtgagttatcgtctaactttctcaaatgtacagcctctgctttagcgtaaccaatgcaaccaaagacccgtaaatgctccacatttggcttcttactctttaagacttcgtatggggtttgatctaccaaagttctcgtcgctactctgtttataagataagtcgaatgtctcactgcttctccccatagataatttgggacactcatgtgtttcaagatgcttctagtcatttccattaacgttctattgcgcctctcgaccactccgttttgttgtggagaatacggtgcagttaagtgccttttaatcccggaggcgtcacaaaacgcttgaaactcttgagaaacaaactctccccctctatccgttcgaaacgttttaatggtagcaccagtttcttgctccacacatgccttaaagcttttaaacttattgaacgcttcgctcttttccttgagaagaagtgaccacatataacgtgaataatcatcaattaggacaaagatatacctattttgtgctgctgtagaaggcgtaattggtccacaaagatctccatgtaagagctcgagtatgctagttgcacgatatggagttgcttgtggaaatggttttctagcttgcttaccaagcaagcatgagccacacatttctttctcgactttgatattaggaatgccaatgaccaattccttttgcatcattcttttcaagttgtcagttccaatatgacccaatcttgcatgccactttgtcgtttcactcaagctctcaagttgcaaacactttgtatcatcgacttccatgatcaccttgtaaagtcgatttctggatcttgtcgcttttattagcagctttccatctctatcatatagagttagatggtcatctcgcattctaacatcacatccggactcggtagcctgaccaagactcacgatgttgcttctaaaactgggaatgtaatagacatcagccaagatttttctctctccattcttagctataaacgtaatcgagccttttcctttgatatcaatacgagaatcgtcaccaaaacgaacctttcccgtaactctttcgtcaacctcaccaaagtaagccaagtttcccgtcatatggttgctcgcgccattatccaagtaccacacattatcaacatccaagctcgcctcaagtttatttggcattacattcttctnnnnnnnnnnnnnnnnnnnntgcatcattaatgcgtcagccttttgtgtgtcatcattcttaacatcttgtgtttcttgaagtttaagcaatctatcgggacagtcggaagcatagtgtcctagcttatcacacctatagcaaatcacgtttgtcatgtctctgttgccttgtgcattcccaaaccgacctctgcctcttcctcgtccgtatcctcgaccaccttgactttttcctttattgggattccaattgttctgagctgacttttcttcagagttcgcatacaaaagctttccctgatcatcttggttatcttcttcatcgcagattctctcttcatatgcctttagtctgccgactatatcctcgaaacttgttgtattaagatcaagaacttgttctagtgcagcaatgatatgtatataacgtttccgtggtaggctattgagaaactttttcaccaacttaggttcttcaatatcattcccaagatctgctgatttggtggacaattctgagagtcttccagcgaagtcatctatcttctcagtttctttcatctttatcctttcaaactcgcccatcaatgtctgaagtcttgcatctttgaccctatcagctcctagatttctagcctttatcgcatcccatatcttctttgcggttttaagttttccaactcgcaaggttaatgcttcagggatagattggagaaggagagcgcttgccatattgtttttatcgatatcatctaatccttcttcaatcgtttcccataccttgtgaactttaagagccatcgtcatacgtattgtccaaaacgtatagtttgttgccgtaagcatcggacattgaatagaggaagagctgctaccttctttggtgttgttcgttactggtactatatcgcccatgtcttcttcacgagttaccttctttctccgtacggaatcaacgctaactccgttgattgcctttgtttgatcgtaaagatgcttgaatcaatattatgctctgataccaattattgattcaaactatatatcaaactcaagaataagaacaagattatgaataaaagactctctcttttattgctttaggaaaataactcaaaacctaaaaacacacaatcttaatctctcaactcataagttttgcaacactcttgcaactcctttatataagaaaagaactagccaatttcctaatcctattacggacactcacataagtatgtaggcaacttcctaaacacaaagtctaattctaatttcctttttgcttgagtgcttcttcttcaagtaagcttcaagcttactccaacaacttatgtggtttcttactaatctttgacctaatttgtgctctagagtttcaccggtgtg

SEQ ID NO: 10854 - DNA, 1342 bp, Arabidopsis thaliana landsberg
  unsure (1)..(1342): unsure at all n locations
gaaccactagatttttacatatctctttcccaatagttgaaagttgaaactaatctttgttaataaaaagcatttggcaaatgaattgaacctaaaaagattaaaattaaatgaaagtatacatttaatatcaattgtagtttattctcataattttattctcaattttttttaataaatttttttaatatttttcttgatttgaaggacacaatcttgcggttgaagatgtctgtgcgacaaaagaagaatgcagaatcagctgtcaatgtgatgcagcgtattgagacttaagccgtaatatgtgcgtgtatatgttacatgttatggatacaattgatgccaatattcccaatcaaccttgtatttcggaaaatcaaaattgtggtaaaaaaccttttcattacaatgattgaaattataaagataaaaattaatttatataaaaaattatttattgaaataaaatatatttttatttattggaataaaatataaatttgctgtaaaaaaaaagtaaaaaaataataaattcttttaataattttgttgatgatcataaatatgcgaatactaatttaaaataaaaatcaaaatggataaaattacataaataaagcatagaaaaagagtaatttaacaaagatataaatagaaagaaaacttataatttacggtatttttcagttaactaatttaataaggtgaaatgaccattggcccacactagttaaataaagacacatggccacgtcttttagaaatatgccacgtctcctacatgattcgaagcaaaaatctctctctaaagcttcaaagtcaaaacctttgagaccatcaccatcgcattttcctctgtttcaatggcttcttccactacgatccttcttggtccaccttccgtcgccggcaattcaccgatcatcaaaccaatcaattcaccggaaacccatgtttccgatgataacactctaatctcccaaaccgctacactaaatctcgaagaaccaccaccaatgggactaacggagaatttctcgccgacatttctctcctccgggaacccatgtctcgatttcnnnnnnnnnnnnnnnnnnnnnnnnnnnnnnnnnnnnnnnntccaaaggctagcaatttcttggtctcacgatcctttgactacgttgaagcttatctgcaatctcagaggagttagaggaactgggaaatcagacaaagaagggttttacacagctgctttttggctttacaagaatcatccaaaaaccttagctttgaatatccctgctcttgttgattntgggtatttcaaagatctgcctgagattctgtttccgatctg

SEQ ID NO: 10855 - DNA, 1152 bp, Arabidopsis thaliana landsberg
cgtaatcttgacacagttaagttggaagacgtgagaatgtgatgatggttcttaaaatttttgaacgtttgttattagacagcaattcaattattttcctttgtctgcaaacgtctgaaataggaccccataattcacgtgacaaattggtcgtaaacaaatcaaaatatgtattatattctactgatggaacaaatcatggagtatcgaatatcgtaggtttaagaagtctgatgattttgtggatccggtagcacttgttgattcacactcaacacacctaataccttgtatctcttggcttttacctttatttttggcaagattacaaacgtttgattaagctattttgtaaaccctcaactttctttaatatgtatataaaaaaactttcattaatatgatatatattcacatttctatatatataaaaaaaagaagagaaaccaatccaattataaatacatccttaataaagaggtacatcccggtacatgtatatatattagtatattacaaaaaacggaatatacgtactttactaatctgcacaatctcagaatataaatatgctagtaactaacgatatgagatatatctctgtaatttgattcctaaacatacgtaatcttgatactctttgatttggtccattatttcatttgctataatgtattgtaatcacgacgttgactaattgattttaacatttcatgcatggtatcagtagtattttgatagtttagaagttagaacgctaattagagacgaccgaattaaactcttgtcatatttccggctaacaatggcggccaaggtaaatagctgcgagtaaaatgaacatggtatcgaccgggtccatgaatcacagtcaagccactcttaagacatttggttgtcatgaaagcaaatgcaaacatatgctttttagaggtccatgcacatccacaaaactgttacgataataagtacgaatttcaatccaaatttggaaatcgagaagttgaagagttaaatgtatagattgagaggatagtggatacaaaaaatttgctaatagaaaaacacaaaatgtaaaagtacaagacactgatctagttataaacaacaaatattactaagtacaaatccatacacaaagtcacgtacatt

SEQ ID NO: 10856 - DNA, 1369 bp, Arabidopsis thaliana landsberg
  unsure (1)..(1369): unsure at all n locations
gggatacttttcttcattttaaaatgattttatattttccgtaatttttttctatatttcatgttttaaaaaaataagtaatggattagtagctaaacacaacaagttggacaagacctgacaatttaatacgagacgcgttgaccttgaccttgacttttcgtcagcacaaaacgttatctacggtagtcactgagagagaacaaacaatcaaatttgtttcatatatcactcaaagcttgatgagaagaaacacagatcaagaaagcccaattatgtcttattactcctctttcttcttccttttcctcttctcctttctcacgagtttcagagtttctgctcaagatcccacttacgtataccacacctgtcaaaatacggcaaattacacaagtaacagcacttacaacaacaatctcaagacccttttggcttctctttcttcccgcaacgcttcctactccaccggattccaaaacgccaccgtcggccaagctccagacagagtcaccggacttttcaactgccgtggagatgtctcaacggaagtttgccgtagatgcgtctcctttgccgtcaacgacaccttaactcggtgtcctaaccagaaagaagccacactttattacgatgagtgtgtacttagatactctaaccagaatattctctcgacactaataaccaccggtggagttatcttggttaacacccggaatgtgacatctaaccaactagacctgttaagtgatttggttttgcctactctgaaccaagccgccaccgtagccttgaacagtccaaaaaattcggtacgagaaaaaacaattttactgcgttgcagagtttctatggactggttcagtgcacacctgatctcacgagacaagactgttcgcgttgtctccaactggtcatcaatcaaatacctactgacagaattggtgcaagaattattaatccgagctgtacttcaagatannnnnnnnnnnnnnnnnnnnnnnaatccgccgttccaccaccaccaccaccaccgtcaatttctactcctccagtttcagctcctccgcgatctggtcagagctctgtttttttcctctgtttttttttttgccctgatttcttgaaattggcaaaaccaatatagagagttttcttctatctgatttttaagcaaataatctttgaaatgcaggaaaagatgggaattcaaaggtgttagtgatagccattgttgtgcctattatagtggctgttctgctttttatagctggttattgtttccttacaagaagggcaaggaagagttattacacaccatctgcatttgctggtaaagatttcaagtgataaacgatctttaatgtca

SEQ ID NO: 10857 - DNA, 931 bp, Arabidopsis thaliana landsberg
agtggtaaggctaagaaagatcgaaaaacaaaagaacaaagatcttgattccattagttaggtaattatttgtgatttatgatcattcccctccttattattgatgggtatacataaaaagcatcctctaaatcaaatttcttggctaacacagatgacactagagctgagacaagataggaaccatttcgggccacggcttcggcaatgcaacaagcggctcagccttagccattgccacaccaaacacaggcctcatgtctatatctcctgcttctaccttctcccactcaaaacactgaaccaatgctccaacagcaagcgacactaccctcattccaaatccagctgcaggacacgcccgcctcccaaccccaaatggcagaaacctaaaaccatctctatcgccaacaaacccttcaaatctctctggcttgaaaacctcggcttcttcccaaagctcaccgtccctatgaacagcccaagcattcaccaataacattatgttttctggaatctcgtagttgcctaagttgaatctcttggatgagcagtgaggaagcaagagtggagctgcagggtatagcctaagcgtctcatagatgacacatcgaagataaggtaagctcgagagatctgagtcttgtataatcccgttgtgtttaacattagatttgatttcttctctgagcttctcaagcttatctggatggttcagtaaaagcgacattgcccattccattgccacaggtgaagtatccgttccaccattgaacattagcactacgattcctttgataacatcatctgcgtaaaattcaggttctgtttcttgaagcttcaagaatttctctactacagaaccagaggaatcaaatttcttcattcgaatatcatcaatgagtcgctgggggatcctctagagtcgacc

SEQ ID NO: 10858 - DNA, 643 bp, Arabidopsis thaliana landsberg
  unsure (1)..(643): unsure at all n locations
tcattgatgatattcgaatgaagaagtttgattccactggttcagtagtggagaaattcttnnnnnnnnnnnnnnnnnnnnnnnnnnnnnnnnntgatgatgttatcaaaggaattgtagtgttaatgttcaacgccggatcggatacttcaccggtgacaatggaatgggcaatgtcgcttttactgaaccatccagataagcttgacaaggtcagagaagaaatcaaatctaatgttaaacacaaagggattatacaagactcggatctctcaagcttaccttatcttcgatgtgtcatctatgagacgcttaggctacaccctgcagctcctatcttgcctcctcactgttcatccaagagattcaacttaggcaactacgagatccctgaaaatacagtgttgttggtgaatgcttgggctgttcatagggacggtgagctttgggaagaagccgatgttttcaagccggagagatttgaagggtttgttggcgatagagatggttttaagtttttgccatttggagttgggaggcgggcgtgcctgcagctggacttgcaatgagggtagtgcgcttgctgttggagcattggttcaatgttttgagtgggagaagtagaaaagaagacatcgcatga

SEQ ID NO: 10859 - DNA, 1059 bp, Arabidopsis thaliana landsberg
taagtcgcacatctgatatcatcaacctacaggttcaaatttagctatttatttttttacttataggaaacttcttggccagactatatacgtacatcgattacacatccatcgcaggcagcaaattataataggaatcagtgttttttgttcttaatttgttgaccagcaaagatgaactattttttagagtgaaattttttttaaaatatgtattatcaaaatgtaaattttgttttcacttctaactaataaaacctcactaggaagaaaactttaatatgatgtttttgatattattatattagacatgcagatgcctcctataagaatgcataatcagtttaaagttttaattcggatagaaaaagttctggacaataacacatacattatttatgccagctaatgactaatgcattagccgttttatagaaattataattaaatttacagttttataagcatccaattttgtcttcatactctatttatgccagcaaattacaacatgcattgggttgtctaaaaaaagagataaaacagtattaaatgttagatatgcgttaaatttttcttcttaaaaaagacaaaattgtaattaatgttccaactttgtcaagcgttaaattttggtttcacttcttttcttctaactgccaagccaagtagtcaacatagacacctttttttcgtaaaataataattgtttttaaacagtttatgtatataaatcttaaattctttaacaacaaggaaacaaatcgtaaatgtacttatctcttaaaatttaatttttactttttaattatgtttgtgtccaaaatgaattgtgagtagacccaaatttaaatttgatttacattaaaaagcatctcaaaattcttcattcaactagacattcaaaaataagtatttattaacggaaattcaaatattctcgctttaaaaagtacctataacaaacaaagatagctttgtaaaaaacaaatttagtcataatataaatatatgaattgttagggggactaatacaatactaactacatttctaatgtt

SEQ ID NO: 10860 - DNA, 871 bp, Arabidopsis thaliana landsberg
tttaggagtctcttatataattaagttgcagatctaatatcataaacctacaaatggattacatatccatggcagacaacaaattatcataggaatgattacttattgttctttatttgcacaccaacaaagataaactattttttagagtgcaagtcattttacaatttattttatcaaaatttatatgtggttaccacttctaactaataaagcctcactaggaagaaaactgtaatatgacgtggtgcaattattggtctagttattcatatgcggcatataagaatccatactcagtttaaagttataatgagtatagaaaaagttcttgacagtagcacatacattatttatgccagctaatgactaatgcattagccgttttatagaaatcgtaattaaatttatatttctataagcatctaattttgtctttatactctttttgtgccagcaaattacaacatgcattgggttatctaaaaaaaaagagataaaacagtattaaatgttagataagcgttaaatcttgtcttcttttataaagataaaattgtaattaaatgttccaattgtgttaagcgttagattttggtttcacttcttttcttctaactgccaagccaagtagtcaacatagacacttttgtttccttgtaaaataataattgtttttaaacagtttatgtttataattcctagattctttaacaacaagaaaacaaatcctaaatgtacttattacactatcaacataatctcttacaatttaatatttactttttaattatgtctgggtccaaaatgaattgtgagtagacccaagattaaatttgatttacattaaaaataatctcaaaatctttca

SEQ ID NO: 10861 - DNA, 838 bp, Arabidopsis thaliana landsberg
  unsure (1)..(838): unsure at all n locations
gctactggaaaatcccgaaagatacttcgagtaagtcaggataaaccgtgatctatactcttatgaaaagtgagtttaatctgcctttctttcttttgcaatagcattataaagctcagatattcatattaatctgttaatgctttctgatgaacagaatcatggagacagcaccaacacttcctgatttcgctttggcattgaaaccagatgagtatcaacttccactcgccgaagcttcgtagtctgaagatgctcaaagcgcttcgaaccaactttaaggagcaaacgaagagagagagagagagatgtgtaaaccttgtatagccaaaaaatcagtggtttccaatggctgcctgcaaattatggtatggctatagaatttacccaacaggtttctatgatctgatctctactgtgtgagaaaaaacacttatcaaaattgggtttggatcagtttacatgagagagatctttgtatgttaatgtactaaaatatttcttcaataaagcattattttttttcccatttccaagattgatatacttcaacaaaataaaaagtaatatgcaaaagcaaatggtgggggttctgacttctgagagagtgtataatgttcttggtgaatgaggttgctgaggtaagagaaggtttagcttggagcttgaagaatcagagaaaattgcacaaaagttttagaatataagcagaatctacattctagagaagatgttgcattctttcagagaacaacaggatcgttagattcaagaccggttcgctcttttgctttagacagngcttctttgtaactttttgactcaggggaaagtcaaa

SEQ ID NO: 10862 - DNA, 846 bp, Arabidopsis thaliana landsberg
ctgatctcttgcttgtagtgacagtgacatttagaggattagcgtgacgggatatgacattcagcttcctggtgaacatgtcgagagtgagttgaaaaaacttttctcttcatgtggagagatcacggatgttcatattcccgaaactcgcaattcttctctctggagtcatgcttttatttattttgtgggagaaggcacagcagacaaggccttgcaactcaatggaagtgacatgggaggatgggctgtcgatgctgaggccgatccctttccgaaagaagaagacaagtaaacggaatttatttccgagatttgtatctttaagattgttttctaattatactatatcatctgctgcaatccaattatttcagttgcgttgagttagaggttgaaggatacgatacgacacttcgcttagtgagtctgatatcaagtgcgagttgagtaaacttttctcttcatgtgggaaggttgatcatgtcatgattttcgataggtttgtggcttgttcctccccaaccatatttccccaagttagtaaagtctagagttaccatgctttttgtctagatgtttaagttattaagctcgctaatcatcatctgccttggttacctaacgcatgatgttatgtctggatgttagagttatgatatgtttaggtctggatttttataagttaatctctgttgattaggtagagtcgaatacattttcattaaaatcatatcatactcgaggattctcattttgatgaagggctgagagctaaacttgtaaaaatacaatgcatggtaactcaaacaatcatcttaaagtgcagatagaccaaagagactc

SEQ ID NO: 10863 - DNA, 503 bp, Arabidopsis thaliana landsberg
tatgactatattgattaatcaactaacacaagctaaatagatatccaattataaaagtatgcggaatgataaaagtaatgcttttgatgtgtaggcaaactaattacaaagctaacgcaactgaaacggactaaaacagagttaaaatgacttatttatggactttctaatcttctaggtttataaaaatccattttatatatttattttgataaatccagtgagtaatgaactatgagtacaatttaataggagttaagggacctaattgaaagaaaaaggaccaatctataatataagttgaactcacgtgggccgtgggtttattataacaaagccgaggggctccttggaaagatccctggccgaaggggtatccttttctctcagccatttgatccaaaactgagggcccaaattagagctctagtaacccgaatcggtacgcccccactacccttgatcccgagatcgacgacccgcaattaaaatcaccacgatcc

SEQ ID NO: 10864 - DNA, 1619 bp, Arabidopsis thaliana landsberg
ggtgtctcttgcaactctgattcgagagtcgtttctttaattctcagaggctgtgatgagcttgaaggtagtggtgttcttcatctcccagatttatcttcttgttcttcaagtaaaagaagacttggtggtgtaatctctcctgttgttggagatttgtctgaaattagggttttatctctgtcttttaatgatcttagaggtgagattccaaaggagatttgggggttggagaaattagagattcttgatcttaaaggtaacaactttatcggtggaattagggttgttgataatgttgttcttaggaaacttatgagttttgaggatgaagatgaaattggtccaagctcagctgatgatgattctcctggtaaatctggattgtatccgattgaggtagcttctattgtgtcagcttcagtgattgtctttgtgcttcttgttcttgtgatcttgttcatctacacgaggaaatggaaacgaaactctcaggttcaggtagatgagatcaaggagattaaagtgtttgttgacattggtattcctctaacgtatgagatcattgttagagctactggttactttagtaactctaactgtatcggtcacggcggtttcggttcgacttataaagcagaggtgtctccaacgaatgtgtttgctgttaaaagactctctgttgggaggtttcaaggtgatcaacagtttcatgctgagatctctgctcttgaaatggttaggcatccgaatctcgttatgttaatcggttaccacgcgagcgaaaccgagatgtttcttatttacaactacttatctggaggaaaccttcaagatttcattaaagagagatcgaaagctgctattgagtggaaggtacttcacaagattgctcttgatgtagcgcgtgctctctcctatcttcacgaacagtgttctcctaaagtcttgcatagagatatcaaaccgagtaacatactcttggacaacaactacaacgcttatctatctgatttcggactctcgaaactcttgggaacttcgcagtctcatgtcacaactggtgtggctggaacattcggatatgtagctccagagtacgcaatgacatgccgagtctcggagaaagcagatgtttacagctatgggatagtcctcttggagctgatatcggacaaacgagctctggatccttctttctcatcgcatgagaacgggttcaacattgtctcgtgggctcatatgatgttgagtcaaggcaaagcgaaagaagtcttcaccacaggactatgggagactggtcctccagacgatttggtcgaggttctgcatttggcactcaaatgcaccgtcgatagcctctcgataaggccgacaatgaaacaagctgtaagactgctgaaacgaatccagccttctagattgtgatacaaagctagaagaaagtgtgtttttagaggatttgtacagcagcaaacaagtgcctagccattagaatcttttctcaagtctgtttttttttttaattttcagggtagggagggtttttcataatgcattcatcaaatcaatccaaaatggttattttctcaaggtctaacctctctttaaaagaacct

SEQ ID NO: 10865 - DNA, 1561 bp, Arabidopsis thaliana landsberg
agtgtaatgggagaacagtacatggatactgctttggaatgaaaacattacatagagaaaacgtataaatgcaaaatcatagcttttcatcttgctgtatcttgtctttgctgtgtcgtttgaatcaggggttatactcatactggcaagaaccatggcctgtcacaatcatagctggatcagaaacagatggttcactatctactaagattcaagggagaaagagagagaggagaaagcttactggggtcaagctcagtgatcatggcagctcctttgaagtaacaagaaccacctttgtttttataagtttggtagtaactgttgaaagcaaaggaggcatgatctctgattgtgttaggcaagaagcaaggctggttttcctgctgcattttgctgcagtctgctccaccttttccgcaagcccagtctaagcctgcttgcaactcatcgtctggcgtttgttcatccgctatgcaccattgttccgactctgcctctgcttaaacatacactcacatacatctgcataaggccaaaaaagggacatagtatgaacattgcagtggtgtttttacctgaacgtcgaggaagagtcattgctatgataagcaaaggaagaagtatccttatcaagaaagttgacatgtttctagagaaggcaatgagtggtgcagagagatccagatctgatctatctagttaggaagtttgggagctaaggaaatgagtgcaacttgataccctttatactagttagaaagaatcattagtccaaaagttcaagatctatgactagggaatcttggtttgcttcagatgcaatcatgtgccagatctgcattggttttgacttttgaggaagattttgttctgcttctggaagcttttcagaacacactgtcatttatacgcttcctatcatgtaatcaagagccattactattactacacaatatacaagctgtttcatagttaagaggacagagtttgggtttatatatatataaaatgaatataatggagctataccctaggaatctactatacacacaggcagagatcaatgaagacaaagtgtctatacaaagagaaagatcggttttcgcagtttttctcactcaaccagacgaggtcttaagctgaaagagacctgtgaagaaaaattgacaatgaactggttcttgccttgatctcaagttgaattgcaggtcatggatgttcaagatatactacccgatgtcaaaaagctctcgggttgatatataatcctacaagggaaatggctttttcttttaacaaggttcaaagaatcttgctaccgctgtgtagagcacttcctcttcaaacggttttgatacataaccatccattccacatttcatgcattcttcatgagtagcctgaataacatctgctgtcattgctaatatcgggacgtgccaactactaaatttacagaacatttcagctgaaacttctccagaagctattttcttattgatttccctctccagctcacggactctccttgtcgcttcaaatctgcgcaaaaaattat

SEQ ID NO: 10866 - DNA, 513 bp, Arabidopsis thaliana landsberg
cagatcatttcaaaaattttaacatcaagattgaagaaacatttaccggatataatttcaccatctcagtctgcctttgtacctgaaagattagtctctgataatatattgattgcacatgagattgtgcataatctaagaaccaatgacaaaatctctagggagtttatggcagtcaaaacagatatgtcaaaggcttttgatcgtgtggaatggcctttcttaaaagacattatgaaggctcttggttttaatatgcaatggatttcttggattatagcctgtgtttcttcagtatcctactcagtattaatcaatggtcaggcttttggttacattaaacctgctagagggattcgtcaaggtgaccctctatcatcttcattatttgtcctatgtacggaagccttgatccatatccttaacacagcggaaagagcaaggaagatttcagggattaaatttcaggagactggtgtttcaatgaaccatctgctttttgctgatgacact

SEQ ID NO: 10867 - DNA, 1311 bp, Arabidopsis thaliana landsberg
agtggcatttttagtgaatacgaaactatgtggaagggtaaattggggaattaaaataacacagagatttaggaaactgaatcgtatgagttgccaagagatgaaacgaacctgtgaagtgggtgtctgtttttgcactctcaagagtctctctgcatggaccttatctgtcgttgcgtcacactttttttggcccgttctattttcctatatatatatattgttctttataagaaattatcaatacatcaatatcaatttaattagttattgttaatgacaaagtccagtacgtaacatacgtataacatcgaatgaatcatttaggaaataacaattgactaggaactttataagttggcaacgtaaatgtcaatttaattttggtcttattttgtgtgtgtcccgtactttgtagtaaatacaaagatgaccaaccattagttttagttgcagggttttttcgtttgtttttatgtttattttttttaaaaacctacaacaataaattttgttgacttaaattcagcaataaatggataatgataattcaatagtacacctctaaaataaattagtgaatgggttatgaaattatcaacattgattcaatggtcgtttgcatcataattaataaattatgatcatttaataattattagagttgagatacgatgatagagacttctttctttcagaatcgttcaattctctttgttccaatattagaaaaatcaaacatcagatatgatgttgatgttgttaggtgcatttcttattttattcattgataatttcatatcttgatttatatattgttttatttagagggcttgaatatttaatatttttgaaaactaactaaggtaggaaaaaaataaacgaacttgtgataggtaggtgatccgatagcagatcataattgctgggaaagaccagaagacatggatacaccacggactgcttacgccgttaatgccccgaatccggcttctgaagttgccggagaaactacggcggccctctcagctgcttcgattgctttccgatcatcggatccaggatactctcaaacattgctccaaaatgctgtcaaaacttttcagttcgctgatatgtatcgcggtgcttatagcagcaatgacgatatcaaaaatgatgtgtgtcctttctactgcgatttcaacggatttcaggtaaacattaattccaacatttgtgtctctaaaaaagttataaattatttaacaggatcatcagaacaagctaaatatctatacattcttggtaaatattatattttgggatttc

SEQ ID NO: 10868 - DNA, 1623 bp, Arabidopsis thaliana landsberg
taataatcttgatgctccgaatcaacattattgaccactgagtttttacgtctttcttcgtaacttgacatagattcaccactaccatgagagtactctagatcaaacctcgaaaccttgacgttactcttctcgatcgccatcaccacataacaaaacccccaattccactcaacagaaacagtcctatgattctttaaccctaaacacaaacgcaaagcccagaacacaaaataaaaatcaaaactttagaaaatcgaataagaaaaaacaaaaactttacagtaccaattgaatcaaaatcaaagattttcgatgaattatgatcggaagtaccttaattgtcaccaaaattgaacaaaattgaagctttaaggactctgcttcagcaaaatagaagaagttgttcgaggaggaagaaaaaaggaaaagagagatgaatctggaggaaaccctagagaaggaaccgtataaataacgcgataaacttaaaggaggaggagaagacggtgacggatagagagagggttgatgaagaagacgaaggtgacgtggaaggaagcatagccgtcagattagtgaaggttatgtgaaaagacgaaaaagggttaagccacagagacttagggcatagtatgacgaaaaatacggtgaaattacaacatcaaggaaaaaaaaaagtttttgggaaagagagtggaagagacggtccaagtttatgttttgagtcgactcggagcgagttgatacgagaagagagacgagtcctcgtggcacactctactacgacgtcgtttttaaacttacttttgcctttttataaaaacattcattttggtcaactaaaaaaacaaaaattgaactataaccatatttaaactcatattggctctgttctttttctacaatctttcatagagaaaggcttctggtaatacgccttttgtattacctgttccgatgtagtccggatcttgtatattttctcgtttttgaacgagacaaagaaattccgatttctaatcggatattttatctaccggttatcaccggtcttttctttcgcatctagcgggatcgatctccatgtcatctttgctcatccattgatttcgcggtttttcttccaagatctctgttttctccctttactcgaggagtaaaatctttatcacttccgtttgctcaagatgcacgagcaaagttggactcagattacatcaatttgggtgtaatcggtgatgaagcttccccgaaatcggtgatatcaagagatttttgaagcagtttccacaattcaatctgatagatttcgatgcttttcgtttggacaggagatcggcggaagggaggagtttatccatcgccttacaggtagctggtggtggctgaccggagttcggcgatgtccggcgagttgatgacggtgcgttttgacatctgacgcgtggattggaggagtacacgtctctacacatgttggctgctaaattaggttttagtttgggccgttatattcgtttgtatctttattgggctttatcccttctgtaaattgccctctagacttatgaatgcaatacttggccgacaaaaaaaaaaaaaaaaactcatactgaagca

SEQ ID NO: 10869 - DNA, 807 bp, Arabidopsis thaliana landsberg
cctggttccaagtagaaacattctcaactggtggccagccactgcattttgctgactctgtctctgataagcaacatccgagttgttcgcagcaacgttttcccagttactagttgagttttcatagctctcctgtgaattcatgcttgcatcatgaccatcaacttgaaaccactgaccagtacttgcatcatatttccatccaggatagagattttcccaagattgactgttatccacgtactgcccgcttgcagaatcgtggtgcaattgaccctggtgttgctcaaacccaacacttgtgttatttgtatcattggctactaagtttcctccagtggccacagctacatccgcctttccctgtaaatttcctgcagttgcatccagctcagtgaagaaatcagagtatgaaccaaacccacgaccgtcatttacagataaatccgcatcaaatgaaccccaatctagctccttaaccccaggaatcccgggctcgttaactatcgtgcattcttttgctgtttcagatagtggcatatcagctacctccgatctcatttcatcatctcttaattcccttgcatcactatggggaaattgaacagcttccggagcaatagatgaaggctcgtcttcccccaccgaaccgcttgcaccctcgtttgcaacatcgttccccaaaattgcttcattcagtgagccatctcctccgcccaaaggatctttaccaatagagagattccaaaaagctctgatatcattggagtcacattcatcgtcgaacttcagctgggtcacatagga

SEQ ID NO: 10870 - DNA, 1428 bp, Arabidopsis thaliana landsberg
gaagtcgccatcatgagtgaagaaatctcatcgtccgctacaacacactccggagtacccattttttacatcgatgatgcaactccaactctcatctccattaacatgtcaaacatcacaaagttgacatccatgaattaccttacttggcgtctacaaatcacggctcttctcgaaggtcatgagctttatggttttattagtgaaaccgatcaagctccacctacacacatagtctcaggaaatacaacaattccaaaccctaagtttacttcttggacaaggcaggatcgtcttctctacagtgccatcattggcaccctttctctccaagtgcaaccgatgatttcgcttgctaagaccactcgtgagatctggactaaactcgccaagacttatggcaatccgtccagagcacacatgaatcaaattcgacaacaactcaagggaatctccaaagggaatcaatcttttgaagactacatgaaaaacattgttactaaagctgataaattagcgcttcttggttcaccactgcgacatgaagacctactggaccacatcaccgctggcttggatgaagactaccgcccgatcgtggaactcgtcaatggacgtgaaactcccatatccattgaagagttacatgagaaacttctccatagagagaacacacttcttcatctagctgagacaacatcaacagctgctcctgcttctgcaaatatggcacaacacaagtacaacaactcctccaagccacatcagaatcagtactacaacaacaacaactatggaaaaggaagaggttctggtagaggatcacaaggacgtggataccagggtaaatgtcaaatttgtggcatccatggtcatagtgcgagaacatgtcgtcaacttactgcaccacaatggccacaacaatcatcgtacccgccaccaccatcacaaaacacgtggactccatcaccacaaatgccaccaccaaactggcaaccacgagctcattacactgcttctaccaactactcacaagctccatggttactagatagtggggcgactcaccatattgcaacagatttaagcaatatgtccattacggggcatacaatggtggtgatgaagtgattgtaggaaacggagcaggattaccaattaccactacgggtttcactactatccttacttcttctaagaatttgttacttgataatgttttgtgtgtaccgaatatgaagaagaacttgatctcggtgaataagctatgtcaatctaacggtgttatggttcaaatgtgtcctaatgagtttcaggtgaaggatctcaacacgggggcaacaatactcaagggcagagctaatgcaggattgtatgagtggccaacgattccttctggatcttcttttatttcagcttttatacata

SEQ ID NO: 10871 - DNA, 555 bp, Arabidopsis thaliana landsberg
  unsure (1)..(555): unsure at all n locations
agagtgacgcaaataggttaagggatgttgatgtggtgcgatcggaggtggatgatatggcactaactgaaacaggtaaagagagtaatatagtcgatggatctgggagtcctggggttaaggaggttgactggggctcgttttatgcagattcatctgtaaatgacggtggtgggtttggttcatactctgatttcttcactgagttggatgcaactgcaggaaatgtacagggacaggcggaggtagctgtggccactggaggaaacttagtagccaatgatacaattaacacaagtgttggtttagataattcggcaggctttgagcaacaccagggtcaagtgcaacacgattctggaagcgggcagtatgtggataacagtcaatcttgggaaaatctctatcctggatggaaatatgatgcaagtactggtcaatggtatcaagttgatggtcaggatgcaaccgttaattcacaggagagctatattannnnnnnnnnnnnnnnnnnnnnnnnnnnnnnnnataactcggatgttgcttatctgaaac

SEQ ID NO: 10872 - DNA, 722 bp, Arabidopsis thaliana landsberg
  unsure (1)..(722): unsure at all n locations
cgcgacgaattttcagagatctatcccaaaaaaacattatgtccttgagtttttagtaggtcttgtacataccgataccctttatatcctgcaattaatagttcatttgcaacttcaggactatccttcgcccaagaaatgatctttgatttgataataacgtcacttgcttgcttttcatctacaatatccacaccaaagtcatctcacgtaagattctataagtataatattaaagaacctttttctagaaatataatattaaattttttacctgaaatgactgaggtagagtcgatataggtagaatcaaagtaactgaaggtaccgaaaaaaagttcattagggtcaccaaccgccttaatcgtaacggggtcaacgtgttttgagataccataattttcggtatcccaatacacaacgtgtttggcaagtgtgtaaaaagtatcattttttgcaagtgcgtaacaattatcttcttcagaccatagaattacaaactaactaaaataatttaccttgtaatttagtagagtaaattttacaaattcttgtttaagttacttatgtattggtcttaaacagcttggtctttttagttntgagtttggatataattgatcttggatctaatgctttcttgagttttttatattacctatgttagtatgtttgcatttctgctactgatctcanatcatttgaaaatctctcatacatat

SEQ ID NO: 10873 - DNA, 792 bp, Arabidopsis thaliana landsberg
  unsure (1)..(792): unsure at all n locations
cagacagttcccctcggacgcgagaaactaaagagttttgtcatgattcatcgtcgtcgtctcgagaaccaaagcatggttgtggtctccttcgtacgtcacgattagcatcatcgcatcatctagtgcacgctccacatgcttacgcgccggacaacctcttacactgctgcacttgtaatatcccctgtcataaccattacaccgagtcctccccagttagttcgagttcttattaattaatgagaacagaaatagtcaacttaactctcggctttctatttcaaatttattctataggaaacaacaagtcaaaaagagcgtgaaactgaacccactactgtactactagacaacatgtttggtacaaccgatatagaaaaaaacaatattgacaatctctctggtactaatattgacaatacacaagttgcttaattttctagccaatatttgatttttggtgttgaatctagtgagtgattgtgatgtatgtgtagagtatatatatcgatggtaaaaaatgtaaaaaataattaccgaggatgaggagagcctttgattggtttttgaccatattttctccatgaaaactcatctgatggtatatcagccattttgctacttactgctggaactctaatcactctttttactcttgatttcctgatttttttacacaaattataattaacgttttattaatcaaatctcaagatttagatctaaaataagattaatttttaataatagaagttgaatcaaaaccttttcttggagcaaggcancggc

SEQ ID NO: 10874 - DNA, 1291 bp, Arabidopsis thaliana landsberg
ttagggcccctggatcaaaaaaataatgttgcaaaactggtttattaaaaaaagtcaacggaatctatctcttaactgttgttttgttttttgtttgtccaaaaataataaccggtttttgttgtctgaaaattattcattgtctacattagaatactatacaactgctgtcgtaaagtgtaattgactaattgatatcatcatataatattatggatttagattgaaacttgtcaattgtcattaagccgaagattacattctgcatcattgtgcgttcaataattagtctctggttgattgaataatacttagaagaaatatcacattattaggatcgtgttacaatgagaggatccttgcaaaaagagtagaggtacaacggtacaaggaatcaaacgattcaaaccactaatgagatcattacaaacagactacatttatcataccaaaaaaacaaacaaactacattttcgtaattcattctggagactgctctctctgttctttgatgttcttgaagatcttagaactcttgtcaaaaatctttgctcttctgttataatctttagggtccttcccatcatcagcccccatgatagcttccttctcaaggtaatcaacaggagcctgatctctctgttcatttaagttcttgaagatcttagaactcttgtcaaaaatctttgctcttctattgtaatctctaggatctctcccatcatcattccccataatagcttctttctcaaggcactccaagagctcccatactcctctgtttacttctccaccacatatccctcttctctgagtcaattcctcctcttcctccggcgtaattggctccattgccgccgcataatccgatcctgaagccacgcatctagcagcagcaacccacctctccttcttgactttaaggctcagctttgtttgtggaattgccgtgactggagatgaggttttatatatcctctgagatgggttggtgatgatctttgtgcaggtttgagagatagcttccattgttttgtctggtagagttttgttgggtctctcggtgggtttatataaggtttgggtaatgtgatccattggcacacgtcattcatcatacgtgtgggaatggcgatgagtaagagagttttcgagattccccaagctggttcttgtgccacgtgtctcgagactctttcaccgacctactttgactctcttttcggctttatccaagctttttgttaaaataagtaaagcttactgttctaaatcagacacgtttgtttag

SEQ ID NO: 10875 - DNA, 1068 bp, Arabidopsis thaliana landsberg
cgattgtttagttaaaggctctttcaacatgtgggtatcaaaatgttatgtcaatttcggctttggcatagttattatctttccaagggatatcttttttgatatctgatgtttaatggccaggttgttggaactctcttcacgcaccatcaaaagtgtgttcttgtagacactcaggctgttggtaataatcgcaaggtcaccgcttttattggaggtctagatctttgtgatggccgttatgacacacctgagcataggatactccacgatcttgacactgtatttaaggatgatttccacaatcctacatttccagtaagtttattattatataccggctgttatcaagcttgaatcctaattctttagttattactgatacatactctgtttttacttcctcaggctggtaccaaggccccaagacaaccttggcacgatttgcactgtaggatagatgggcctgcggcatatgatgttctcataaactttgagcagcgatggagaaaggcaacacgatggaaggagtttagcttacgtttaaaggggaaaactcactggcaagatgatgctttgatccggatagggcgtatatcatggattctgagtccagtgtttaaatttctgaaggatggtacttcgataattccagaggacgatccatgtgtttgggtttctaaagaagatgatccagagaactggcatgttcaggtccttgttgattccttccaaactatacttatttcatgttaacaaatgttgttgatttgatctaaccacgcggtttctttgacttctagatattccgttctatcgactcaggatccgtgaaaggatttccaaaatatgaagatgaggctgaggcccaggttggtcaatcaacttatttgctattattaattatcttccttgaagaatcaccgtttattcaatgaaatttctctttataagccaccaatggtatagaaattgcactacttacaaagtcttcaatataatttaactgcagcatctggaatgtgccaagcgtcttgttgtagataaaagcatccagactgcatacat

SEQ ID NO: 10876 - DNA, 1284 bp, Arabidopsis thaliana landsberg
ggacttactcatcacaccatttctgcttttagatatttgtgaaatcctctctatgtttcttaatcgttttatttaattccggcgatagtaaatattgtaataaaagagatacacttccaatcatactttggaggaatgacatggtctcataattaagtcatgttgttggatgtttcgtgtttttcgtcctaatttatttgttatgtttcttgttgtgggctttagtttaaagagctatgttcatgtacttcagttctcattttggctataaaacatatacttcatgatcactaaaaatgcaaaaagggtgaacttatatcacatcacatcaaattcttgcatttaacaacgttaaggcgatggaatttgataaaactatgaaaatgttacttacatcaaactttaaaagcaaaaatatcatttatttttccaaagttaatcttaatattttgatggagataggattaaatctaaggtccttcagaatatttggcggattttaagagcaatagagaagaattctccacttttttttttattattaatttctcgcagatgtaaaagcggataatttggcacgaaaactccgtatcgaaccacatcatatcacatttataaacaacatactccacaaatagctcgtttgagttgttgtttttttagtaaatcggttgacaaaaaaaaaaagaggattaaatctaaggtccttcatgtaatcaagatcctaatttcagaaagtttaactattttgagaccatatcgtttaaaacccaaaacattattccaacttgaattgatgatgagataagatatgtagaccctactcaactaaatatatcatttagtctctcgacagataattcctttcataaactgaaacctaactgaagaattaatacacaaatatttccctttttagtcatatccctaatcatataactacaaaaatttagagagtacacacatagcaaagtcaatccaacggtaaaagagagcagtattgatggagcggcaaacgaccaaacaacaaatcgtgctgaaaataataatgtctcaccagaatttttcagcattaattgaaacacacaacaaacctctccttattcaatgaaaccacatttcaaacactcatgttttcttataaagagaggcctctattcttttatacagctcatggaatcacactatcacaatcataaccacaaaaacaaacactatggacacctcaaaagtctcttcacaattcttttcctaatagctatgtcttcaaccgataacaattgc

SEQ ID NO: 10877 - DNA, 1021 bp, Arabidopsis thaliana landsberg
  unsure (1)..(1021): unsure at all n locations
aaacactagttttattttatgccatagaggcatcttaccccatgttctctgtaacgtgatctgcttcgacaaatattaaagaaactgaatactcactagaacacagtataaaaaacagagatgcacttcataacattcctataagaaaggtttgaattatgaacaccaaagtcacctgtactgagcgatcgccaagaaacactctgccaccatatttgtttgcctcttcaaatcccacacgaaattcagcaccaggaaaaacctcaagcttcttggcggcctacacacataagaaaatgatgtatattattagtctggaaatttaagatacaagcaaagtagatcttaaccacagaagcatgcctttgcaagaatatatccgtaaactatttcaaataggttgtgtttcttcttccacatgtatatcatttccatccaggttggtggttcctgtcaaaccaaaacattgcacctttcaagaataaacaaaaaaaaatggatagaagagatatagattcattataagttatgtcgacgaccataatatatatgctaagaaatcaactgaactggacatgttataagacttgacaacaaaccttcacagtctgaggtgtgagaatagacaatcgacttgaacacaactccaaaaagacagcctacaagcatcagccacgtactaagaagtgagtaaaataacacatgaggatatagcagttgagtcctcaatgaactgttaggataagaacctgtggtttcaaggcgctgattacagcttcaacttctcgacatgattcctacaaaacaaatgcaaatatgaaaacaaactttttttttttttttcgtcatataaaaacaagcttatgaatgctaatatattatagtccaatctagggttaaaaaggggattgaaaagtgtccatcattattcaacatttcaaccaatcacaaaaccagtcaccaaattctaagaagcaacttacaaattcctaatttatggaactaanccgaaattgaaaac

SEQ ID NO: 10878 - DNA, 1253 bp, Arabidopsis thaliana landsberg
  unsure (1)..(1253): unsure at all n locations
ttttttcaattttccaaaaaaggctaattaatcctgttacttttaaaggtatgttttgtttatagattaaatcttgttatcaccttgatgcatactttataattattatatgcatctttttagttatgatacatggagaacacaccgtggttcattaggttaaaagtgctgttttgtgtattaatagtattgagaacttttcatattattagggcatatatatattaaataatctttcaagaaccttgtttattcaatcttgttttgatgtttttttttaattcaatcttggtcttgatgttttggagcagtttgagaaccttgtgtacacggtgaagctgaaggattcacaaggctgtttcggaaagaatgacaaaaccgaggagcgaaccatcttgaagggcttaacagggatcgtcaaaccgggagagatcttggctatgcttggtccctccgggagcggcaagaccagcttgttgacggctttaggaggacgggttggggaaggtaaaggaaagctcacagggaacatatcttacaataacaagccattatccaaagctgtgaaacgaactacgggtttcgtgactcaagatgatgctctttaccctaacttgactgttacggaaactctagtattcactgcgcttcttaggcttcctaattcttttaaaaaacaagagaagatcaaacaagctaaggcagtcatgactgaactgggtctagacagatgtaaggatactatcattggaggacccttcttgagaggtgtttcaggtggtgagaggaaaagggttagtatagggcaagagattcttataaaccctagtttgctctttcttgatgagcccacttctgggcttgattctaccactgctcaaaggattgtgtcgattttgtgggaactggctcgtggtgggagaacggtcgtgactacaattcatcaaccttctagtaggttgttctatatgtttgataagcttctgctcctttcagaaggtaatccggtctacttcgggcttggatccaatgctatggattattttgctagcgttggatactcccccttagtcgaaaggattaatccctcggattttctcttggacatcgcaaacggtaagcctctccttgtgatatcttgctggccaagtnagccgtcatattatagttttttgggtctccgtgttgaatctcacatggatatattatacttctataggtgtgggttagatgaatcccaagaccaaaggctt

SEQ ID NO: 10879 - DNA, 800 bp, Arabidopsis thaliana landsberg
  unsure (1)..(800): unsure at all n locations
gcaattgtcaacatatgatcatggcaatgcttcaataatgttaaaccgactttgaacacgattttaacaccctatgccggaaacaaacaaaaaacacaaagatatgatgacacaaaagaaagagacttttgagattagaagatgttgattaaaagtacctcagctagaaacacatcccaaattcgtagcgctgaatggaaaggaagtgaatacgaaaagacggttatgaaccattgacttgcatacatactcggattgatcatttcttgagtgaaatgttctcctagtttgggcattagctctcttaccaactgatcaaactgtaacagatattgctgtacaagaggaagccctgcctacatttacacaaatcagaacatattaaatcattaaaattgtcttaaggaattgacattctgttttcaagcataatgttcnnnnnnnnnnnnnnnnnnnnnnnngcaagaagcacgtttgatagagactgaagctaatcttggagactcttaaaagaatagaaagtctctctacaggatagttggcagagaatctgaaaaagcagtcataaactaactagttgatgaagggaaggatttttatcttatttatctattggactttatgtcattttcttactatccctcaaacaatcaaagcggctctatcgattatcaaactcgcgtgaccaaagaggaaagtagcaactaatagcgatatcggtatcttctagagtaagaagacagtctcacctgatacaaccttctattggggagtggcagtcgtttgagtatgcactaata

SEQ ID NO: 10880 - DNA, 1062 bp, Arabidopsis thaliana landsberg
  unsure (1)..(1062): unsure at all n locations
gactttcccatacatgttttctttagaagagacatggacctgggcaaagatccttgtacaatgtccttaaggcatactcagtttatgacagagatgtcggatatgttcaggtctatcctctagatatttcccttgtttcccatttttctttcttttagtatgggactaagattcatgattctaatatctgcaggggatggggtttatagccggtttgttgcttctctatatgagcgaagaagatgccttctggttattagttgcattacttaaaggagctgttcatgctccaatggaaggactgtatcatgtgagtcttttaattattagaagattgcaagaaaatgttgtatagttgaatgaaacaaaaagagtattttctgcgtgagttagagtttgtgaccacgtttaaaaaagttctctgtagattaagtttataacgattctggtgagaagttttcgtcattgattatgaatcaactatccaatttaaaaggctactgtatagttcgttccttgatttaacaaggtaatgtctttgccgcacatttcatctatttcttaagagtcagtggtttgtgtgtaatgtaggcagggcttccccttgtacagcaatacctgtttcagttagaaagcttggtaaaagagctaattccgaagctcggagaacattttactcaagaaatgattaatccgagtatgtatgcaagtcaatggttcatcaccgtcttctcatactcatttcctttccctttggctctacggatatgggatgtgtttctctccgaggtaactaaatgcgcatccttaaaatctctttaacgtttgttgtgatcaaagtttcattctgttatcttctatggtcattgtttcttaagggtgttaaaatcgtgttcaaagtgggcttagcattgctcaagtattgccaagatgagttggtgagtgaggtttatttacgagctgtaagttaatttcgcaaaaccaacctttttaaaanaattaactctgcaggtaaagttaccgtttgagatactaatacatgctctgaaactttcccgaaga

SEQ ID NO: 10881 - DNA, 613 bp, Arabidopsis thaliana landsberg
cgaagagaaaccggtttttaacaagaccatctttacagagaatagagagtggaatgacagactacggagggaatgaaacagcggttgatgcgtttgatttggaaccatcaaataggaagtttacatatgcagagattgtgaacattacaaatgggtttgatagagatcaagggaaggtaggatttggaagaaactaccttggaaagttagatggtaaagaagtaactgtcaagcttgtttcttcactatcttctcaaggctacaaacaactcagagcagaggtatatgctctgtttactaaccaatttttttgttttttgttgagagttaatgaaaagagacttagaagagtttattgtaggtcaaacatcttttcagaattcatcataaaaaccttataaccatgcttggttactgcaacgaaggcgataaaatggcggttatatacgagtacatggctaatggaaacttgaaacaacatatctcaggttttgaaatcttgttctgccttacatacttcttcaagtaagaccaatatctcagttatgatcttctcttgtgcagagaaaagtacaacagtttttagctgggaagataggctcggtatcgcggt

SEQ ID NO: 10882 - DNA, 1429 bp, Arabidopsis thaliana landsberg
  unsure (1)..(1429): unsure at all n locations
gttacgattatattccgttgtattttaaatttaccaactctgttataagaagaaaactttcttaaattccaaaccatttaactctcaagaaccatttattgtgtgggctacgaatatttgggccttccaagcctaaatttatttttttgccatcctagtaatttctagaagctaagtcgtagatgttgtacgtggatatttcattaatttctgcttaaagccttaaacacttgacacatgaaagtggcaaataacctacttcaaaacaaaacaaaagtggaagtcgttttacaagtcataaaatgacatgctgtcttcaggtcccacacatgttttatgtatatttgtcgttaacgctatttcacctactccacacacacacacttattttcttggtcatccacgttttagacttttagtttttccttaaatctctgatccataaccacgaaacggacgatcttcaatcaaaacccataacgtatctcattaccaaacaaacacattgttaacatctatgtctcattgatgatctaatatctatgttacttttgagattacaacaagtgtttaaaacttaaacaaacggttattttaactattgacgatagacgatggatgattttcttgaacaatatttaactataaatgcaccatattcttctaagctgatcttaaacttacgaattaatcaacagccaaaaacatatacaaataaaagttgagacaaacgaagcaaagaaaagtagaacatacatatacatacagaaacacatttgcacaaatcccaccgttgattatacaaatcatattagaacatcaaatatttagtggttgccattttgctctaactcttttttgtgggctttccactttaaggccacaagactaagtgcttttgtcgaagtcccatcatccttcaacaccctacaagctgcttccttcaattccttcatcttgttcctcactcctttgccttcttcaccttccatcaatccttttaccactctagccacctcttctcttctaactaacccatcgtccccggcacgcggcctaagtgccgcacgaatatcttcactcaacaaaaccgcattcatcttctgttctgcgtataatggccatgctataagtggaataccgcttactacactctctagagtcgaattccatccacaatgagttaaaaatcctcccgtggatggatgcgccaagacttgggcttgtggagcccaaaaagggatcacaaaacctctttttttagtccgctctaaaaatcccggtggtaaaaatgtcaatggatctgtttggctatgtgaatcaaaatacgacgaattagcgaccccactaggacttcgtatgacccaaagaaaccgttgctcactatctgcaagaccaagagcaagctcatngagctgcttacatgtga

SEQ ID NO: 10883 - DNA, 880 bp, Arabidopsis thaliana landsberg
ggcaaatgctctttcaactttttcttccttttttctaactatttatttacatggttgatgaactaaaaccttaacgtgtcataaatcaattccatagtacaacattacacatttattatataactttctaacgattaaattaaaaaaatagtgcgatatataatataggaaataatataatacaagtattaacaacattagaattaaattattcaatgcgttggtgtaaagtgacatgtacacacttggccttacatgcgtactcgcgtatataagcactactaccaaatgtaattcacaagccacacatcaaaaacaacaacacaacaataagcaccaaaacctcttttcttctcttcatttgagtctcaaatcgaaaaatactaacaatggaggcaatgaagatgaagctttacgtggtggttttggtggcagtgatagcgttctctacagttcaccagacggttgcagcggttgacgctcccgcgcctagccctacctccgatgcttcctcatttatccctactttcttcgcctccgtagcggtgatggcctttggattcttcttttaagaagtttcttctttgctttttatgtttaaatgaatttaaagtaaaatcaactaattgatgatgtttaagtctggtcttgttttgagttctagttgatttcatgttggttatgtttgatgtcttttatctctctattatgtatcgctgttgaatttgactcattcgaatatcaataataatataatcaataataatataatattattattatttgtctattttctttatttctttgatagtaatagaattgatttatttaaaacttcagaaatctataaatgcagatatgatgcaaacagaaccgagaa

SEQ ID NO: 10884 - DNA, 1020 bp, Arabidopsis thaliana landsberg
agacaggcttagtcagttaccagatgatttccttttacagatattatcattgcttccaacaaaagatgttttagtggggagtgttttgtcaaaacgatggcggtttctttggacattagtccctaggctcaactatgatctaaggcttcatgataatacatgtccaaggttttcacagtttgtagataggtctttgttgctgcacaaggctccgactttggagagtttgaatatcaagattggttcgatatgttttactgcagagaaagatgttggtgtatgggttagaataggtgtagaccgctttgtgcgtgaactgagtgttagttattgttctggtgaagagcctattagattgcctaagtgtttgtttacttgttcaacgcttgcggttctgaaactcgaaaacataactcttgaagatgcttcttgttatgtttgcttccagtcgctcaagactttgcaccttttagatgtgaagtatttagatgaccagtcacttcctaggattatatctagctgttctagtcttgaagatttggttgtgcaaagatgccctggtgacaatgttaaagtcgttactgtgactgcgcctagtttaataacgttatctttgcataaatcgtctcaagcttttgaaggagatgatgatgggttcttgatagatgctcctaaactgaagcgtgtagacattgaagactattggggtggattttgttacattgagaacatgcctgaggtggtggaggcaaatgtcgatgttatttataaaaatacggagaaactcctgggatggagcacctatgtcaagcgccttgcgctatgtctgatcacttcacatgtactctcactttctattacctgaactagaaaaaatgacggaatcttgtgattagattttggatacttgatgttctaagatgcttgctgattatccaccttatactagcttggttatactggtggctgtagaaccattcacatgtactccacgatggtggtgtttgctgagaacaccga

SEQ ID NO: 10885 - DNA, 961 bp, Arabidopsis thaliana landsberg
  unsure (1)..(961): unsure at all n locations
gagcgagtgacagctcatcaagtattgcgtaagtctaaccagttgctcctatttcaggtcctgaattagtgtatctgctagcttatttagaattttgcaggccatccttggatctgtgaaaatggagttgcgccagacagagcactagatcctgctgtgctttctcgtcttaaacagttctctgcgatgaataaactaaagcagatggctttacgggtaagcccccggccgcaagccttttggcctttattgtgaacaattttccataaatgtcttctgctgtgattcaggtaatagctgacagtctctcggaggaagaaattgctggactgaaggaaatgttcaaagcaatggacacggataacagtggagcgattacgtttgacgagctgaaagccgggttgcgaagatatggttcaaccctcaaggatactgagattcgtgaccttatggaggctgtaagcactttgctctgatctgatctgtgtgagtacctgcttgaaatcagtatgtttagtattaatctgtgactgtgatttaccaggcagatattgacaagagtgggaccatagattatggtgaattcattgctgcaacaatccatctgaacaaattagagcgtgaagaacatcttctgtcagccttcaggtactttgacaaagatgggagcggttacatcactatcgatgagctacagcacgcatgtgctgaacagggaatgagtgatgtctttctagaagatgtgatcaaggaagtcgaccaagacaatgtgagtgacttatgcatacatatcctctggcttggagagtacatggtcaaaggccagggatcatttttttcttcttgtttcaagatggaaggattgactacggngagtttgtagctatgatgcagaaaggcattgttggaagaacaatgaggaaaagcataaacatgggcatcaagaacaatgccgtctcgc

SEQ ID NO: 10886 - DNA, 1010 bp, Arabidopsis thaliana landsberg
taatgatatcagaatatcggaatttgggggttaattatatctttagtaaaaatgcaacaaatgaaattagtatcttatttgtaaataatttttagaatgacaaaaaaaattgcttttgttttctaaggtgaggaattaaaattttaaatttgtcatttttaagtttattcaaaaaaacatgctagtttaattggagaatcgagtccgatttttgaagaaacatgtctaaatccacatattgaagaaacatgactcatatattctctttctgttctttttctacaaattttggcgttacaaaagtaggcatggtagtttttgttaggtctcgctaacaaataattaatagcatgtcagttgtcaatgcctcatccgaaatccaatccaagattattttgttccacagaaaagaacaaagtttataaaaataataatatagcgactataacgtttactattcatccctttatgggtcagtgtatatgtaatctcttcttttatcccaaatcacacattggcattgccattgacaatcaataaaacatcttgtgagacaagaacgggtaagtgataagatcatggagcatcctcacgtgcttttagtcgctagccctggcttggggcaccttatccctgccctcgaactcggaaaccgtctctccttcgtcctcaacgtccacgtcaccattcttgcaatcacctccggctcctcttccctcacagaaaccgagaccatacatacagccgcggctagagggacctgtgaaatttcgaattaccctctgtcgatatagaccacctagtggagccagatgcgacagtggtcactaaaatagtgagcaagatgcgagaaatgaagtccacggttcgcgatgccgtgaaatcaatgaagcaaaaaccgacggtcatgattgttgacttttttggtacagcgttgttgtccataaccgatgtaggtgtgactagtaagtatgtgtacataccgtctcacgcgtggttcttggcattaa

SEQ ID NO: 10887 - DNA, 476 bp, Arabidopsis thaliana landsberg
tatattccacaaaattataacgtagcttcgaaatatacaacccaaatttcttgcattatatatcgacgatcgtaggcatgaactcgtaatagtctttctctccatctccatagtaaacaagtcggtttctgattggttttctgattggttttttctagaaaagagtatctttctgattacttaatagaaatgatgttttaacgaaaaaaaataatttatattgacgattcataattctttaataagagccaacatattacgtttcttgaaattttcattcatgatttgttaacgttgtgttgttagtatattttgtgcatctttgaactttaaaagccatacaagaccaatatttagtgaataaattataaatttataaatttaaatatgtcttaaattaaaataaagtaacattggaagtcaaccaatatggaagaagtcaaacacctacataataagatatttctggtataaag

SEQ ID NO: 10888 - DNA, 501 bp, Arabidopsis thaliana landsberg
ctttgatttcaaagaaatcgaagaagtggttaagtattatccacaaggatatcatggtgttgacaaggaaggaagacctatctatattagaggctaggccaagttgatgccacaaagctgatgaaagtgaccacaattgataggtacgtgaagtaccatgtgaaagagttcgagaagactttcaacgtcaaattccctgcttgttccatcgctgcgaaacgacacattgatcagagcacaacgatcttggatgttcaaggcgtggtatgtgttcaattaagctatacaaatgtattcccctcatagattctctgtaaggacgattcaatctctgtgtgtttgcaggggcttagtaacttcaacaaagctgcaaaagatcttcttcagagtattcagaaaatcgacaacgataactaccctgaggttcagttatgcttttggacgttcttctttgagtttctataatggttctgacgcagcaacatgacctctgtgtttgtg

SEQ ID NO: 10889 - DNA, 758 bp, Arabidopsis thaliana landsberg
  unsure (1)..(758): unsure at all n locations
cggaaagatttcacagtgctccacagaagcctgaattttttactatcgttgataatgaacatacggttgagggtgtatatgatccataaacacaaaaacaattcttagtgccattttaacttgatagagataattacaaactatttcaaaaccattaagaaaacaacatagtaacctcagggtagttatcgctatcgatcttnnnnnnnnnnnnnnnnnnnncccttgcagccttactgaagctcttcaacccctagaaatccaaaacaataccagaagaatcactcactcattctctctttctctttgatctgtataaccaaaacaaatgtggctagagattagagtgcataccacgctttgcacatccaagatggtggtgctctgatcaatatgcttcttggcagcaatggaacaagctggtaatttgatattgaaagtcttctcaaactctctcacatggtacttgacatacctatcgatggtagtgacttgcatcagctttgtggcatcaacttggcctagcctctcaatgtaaacaggccttccatctttgtcaacaccatggtaaccttgagggtagaacttgaggacttcatcaatctccttgaaatcaaagtccttttgaaagaagaagtaaaaaggatcagactttaattaaaggagaagaaaaagaagatgatcttaaaaagtttaggacctccatgattgtgtcaacaccaaactctttcctccaatggatcatatcagagcacttt

SEQ ID NO: 10890 - DNA, 480 bp, Arabidopsis thaliana landsberg
ctcttcatacatatccaaagctgatggatgttccgtctgcgaatttatacacaccgtttattattttaagaaaaaaaagatgtaagaagaaactagagcttggatcaatggatgatatatagacgtacgagccaagagctttgtttcaacaaagatttaagatgagtaggggaacaagctctcattgaatcaacccatgaattgatcaatcctactccattgttgataatgatatcttgaagagctttcttcttcgttgttgttacatcgttgtttgatttgttcccggtttctttttctacaagttttgtgttttcttctatgaatctaactgaaataacagaaaacaagataaggattatgtaagagattataaacgtttgtatgcattaatctaaggaactctaaacaatttacccatttctgtctgtaaatgaaaagagatttaaggttgtagaacagagtgagaatgagtgtgta

SEQ ID NO: 10891 - DNA, 1210 bp, Arabidopsis thaliana landsberg
gagccaacgggaccaccatgttccatggtagtgtcatcctctttgcaattggtggcattggaagaagaagggcttttcctgtgagttacagagcttaaccaatttgataaacccaaaaagggtttgaattcagagttatcttgagacctcaatgaatcagaaggagatggttctgcatcactagacttattgcttctgttagagactgaaccttcaccatcgtctcgttgattgggcgtgatacgaagctttttgagaaatttcttcatgttcatcttcatactccaaatgttagagcagcgaacatcgacccgaaaactccttcatccctcgaatacacagaaaaacgagaactttgtgctaaaaccctaattccttggtaccacgacccggagatctggaactccgtccagatcaacggctcgtcaaaatctaataactgcagcaaaagaattctcgagaaaaccttaaatcggaatccaaatcaagcagcaagactctcaatggagatcagatttcgatttcaagaaaatactttttttttttatctccggagctgatcaaaaacccaataagagaaagtttggagcttttttctcagcaagtaagcgaagcctcttccttctctttgactctctcctgaattgagaaagtccacaaagacgccactttctctctcttaaagtccgacaaaagaaaatcaactaaaaaaaacttacgtaaaacagagtagagtagatagatagatacgagtatagtagaggatgaagagtggatttttgagctggagagaattgaattttgttttgcttttttttgctactgtaattaaaaaattactctattttttgtacaatcagtcaaagcttaatgcaaatatagagctatttaaaaacttaccaattcatttttaatgcaaatatatcatgcaaaaccgtacattttgttaaaaaaaataagaaatgataaatcgcagaattgtttacgatcgtgctttccatattcaatattccttcgcgtatctggatttgtttgatatcatttattcaaataaaattttgtctttttggctgaaaaaatgcttcgctcaccaccttatgcattatcctcccatgacatatcacatatatcatcaagcgtattattcactaaaaaatgcttagattacgctactggcggattcatttatgacccaataactatgatgtgc

SEQ ID NO: 10892 - DNA, 833 bp, Arabidopsis thaliana landsberg
agcttgaacgtcactttcccatctacttgttccacaaaatcctcaagccaagcttctgtgttctccgacattgtatacgcttcgtcttcgtttgcttcaatctcatccacaggaagatttagatcaagaaacgaacgctgagacttaagggctcgaagctctgtcacctctgtttctgcctcctcctgtcttctcttattgggaccattcttgttaacatttgaagtgtctgctagttttatctgaagtgtccagtttttggcattgagaactctttcctcggagtatttgactggttcttcaagaacatgacaatcactggctttatcacttccagaaatagtagcaacaactataacatttttcatactgatctctctcccatgcgagtcacggagttttccagttctcatagcctcagacaatctgatctgatcagggaactcggccttttccacgttttcgatgaaaacaacagaatccgcacgtctcgccacttcgccagcaatgtaatcaacaactgttttccctctgaatctatcgtcaagactgtcttgtgacttgaaatccacacagatgaagttgtcttgtccaccacagaagacttcagcaagagctaatgctactttcttcttcccggctttatcaggtccaagaagagcaagccaaacattacttgtggttgctacgtggtttgtttcttctcctggactcatctctgtatccacaaacaatttcgctaatcgcattcacagcttcgttctgaaaaccgacttttcggagagtagttccctggagacttgaatcttgcagtatctgaagctgacacaatg

SEQ ID NO: 10893 - DNA, 478 bp, Arabidopsis thaliana landsberg
gcctttgagttcaactccaatttcaccgatagaatgcgcagaatcaaggtttgtgacgttaatagtaatactcaaaagtctgcaagtttatgtcatgttttacatattgttaataactaacatcaacttgggtgatttgcgtcacagatccctcttcccccagttgatgaaaggaagaaagtcgttgaagatgtcgataaagacagaagatatgcaattgatgctgccattgtcaggatcatgaagagcaggaaagtattgggacatcaacaacttgtttctgagtgtgttgagcaacttagccgaatgttcaaggtaaattatacatataattatatttatacagagacatttgaagatgcacgtggtgatgaaactcattggatttgtgatgtttgttgcagcctgatatcaaagcgatcaagaagcgtatggaggatttaataaccagagattatttggagagggacaaggagaa

SEQ ID NO: 10894 - DNA, 1304 bp, Arabidopsis thaliana landsberg
aggcagttttcgtcctttgcacgagaagatccatattattttgaaagcaaaactttcgtatttcattttgctaatgaagaatcaagaaacaataatattcctttgaaatgttcgacattcgttaggcactaaccttaaatttcaatcttatagacgtagatttatatcatattctatgttttcgaataatttttttccaattgacgaaaaagaataatctatcttcttaaaatttatatattaattgatagtgtaataccgaatttataaactctattttaaatacactttttactaaagttaaacgttcaattttttcaaattttgaacaaagctaggaaaagctatattccaatgtctttatagatatgataatacatcaaggagaaacgagagaggagtatctcaagagttgacttgactcctacataaaaagtgaaccaaaggcacaaataatgtaacaaagaagaatgattgaatctttataagctgaggttatccaccttaaaattacacaaatcacacgcacacaggtatgtatgtatatcactctgacatctcatatacatatctacacatgtacgcaatttcaagaacatgtttggttctatggacacaaatgcccacagatcaaatcatgcaaaaaaagaagttaaaaacattctgaaacgtccagggcttaatttgcagatgcaccaaaaaaattcctctgaaatgggagactcattcattacttctttaaattttctcgagaagattttgaatctgcattaaatgaaagagtatcttgcatgagttcatgaaagaaaaacattgtaacttaagagattttatcgttgtgtcttaattacctatacttggaagaagattttgcaagagcttgaatgatgaaggttggatcatatctcgagaactatgactgtaatcaaaagaaaatagaatcagtcgtttgtttttgagttttactaaaaaaataatgaggatctgatgaaaactcacaatcagaatctgttttgacccatttatatccatcgctactacttcttctttcgctagtttcttcttcctcactcttcagtgagagctgtttcttgtcttgcaagtatctctttgttgtcaatgatgttggtttcgaggaggcttgagcattaatcttcttatggagcatcatcttcaacaactgtaatttgatttgatcagaggtagatattaaaaaacctatttcccctacgaatttgaaattcgttcctagtttaaaatctccattcttgattcttgaagcgtgtctctcaagctagcgctgg

SEQ ID NO: 10895 - DNA, 1324 bp, Arabidopsis thaliana landsberg
tacacgagtttctaccatttgagattgtataacgtaatatttacttggttatatgattaataatcggaaaaatcatccaacaaagataagtacaaatgtattgctttttcttcttctttgccatcatttatttgataaagtgaaatgaatatctcatagtaaaagatactgcacatcagcacatctttagatattcttaaaagacaaatattgtgaaaaattccatgagacactgttcttaaaaataagaatatatctctcatatgagaaaaggatgagacacatcatttggttaatgaagacaataattaaaggctttagagaaacaagtttcttgatgcttaaaggcataagattgacacacaacgtatgtattaaaatatctctcttttcttcttgattaattgtatcatacgaaacataaaatggcaaaagtatatttgaagttttactaatttgatagaataaactagatcaatatcgaattctcatttccgcaacttcaaagtcctttgccaagttttcttgttattgttctttgcacttttctctcattgtacaatatcaaaagcggcgactgatatccgccggacaaaacggtgtaccaaagctagcccggtggctagggatgttgaaatgcctaagtcttccttgctgctctttcatgtaccctccacacaagaacgccaccgagaactcgtcctccaccggccggttaatatcgtgaacaaaaacatcagtctccccaccgtcataacggttacgagccaataaacccgcagtgtaaatagcgctcatcctccctggagcttcatcgtggtaaccagtgggagcatcgaccattatcacatcccattgcgtctcgtacacgtcagctggaaaacccttgagagcacagagcacatttggaatctctaggatcagacacggctttgcaatcctctgttctctttagctccataagcttgttggaatctttcacttttgtgtcgtatacgacgtggtaggattccaagtttgggaatttcttagttactgtctcaatccaagcttcatcttcctcgaggaacactagcaatgtaagaagtaactttataaatgaaaaacagagatatgattaatctttatagatctgttgttatgaaaagcttacaagtgcgtccaccgtgattgagagatgcccacatcaagctatcgtgtcctaagccaaagacgaggaagttacaaggagacttcttgtccaagactctctttgagactgagacttcatcaaacgtaagttgtggtgtgatctctgaggtgacatagtgaaccaatgcgtcgg

SEQ ID NO: 10896 - DNA, 745 bp, Arabidopsis thaliana landsberg
tacgaccaccatggttaagagatgcccacattaaactgtcgtgacctaagccaaagacaaggaagttacaaggagacttcttgtccaagactctctttgagacagagacttcatcaaatgtttgttgtggagtgacgttactagtgacgtaatgaaccaatgcatcggataaagaaagtggcatctttgtgcattgttgtgttgttggacatccttcttgtttatgctgagtttcttcttcttcttgggagagattagttttggagattggctttgaagaggaagaagagatgtttgatcttgctaagtagatgatgatcaagatcaagattgaggaacctatgaatatgaccttgagattaagagaagatggagatttggtcctcattttttctgactaaagaatcgatttttcgatttgggtttttggatctatgaatgaggaagatgttttgataatgatgagaagtgtatataatatagagaggttatggcttaatcattgaggaagttgaggaggacatgaaagctactaaggttgctgttcttccaatacaacagaagttggtgatgaatacacatatactaactaattgttttttttcatattgtatagtaatattttatattcatggtaattggaagatgtgaaacgtaatggagagatttctgattttaaaattgatgcttgaaagagaaaaagaatttgatagtgatccaaaaacaagacaggtgttaaaaagga

SEQ ID NO: 10897 - DNA, 759 bp, Arabidopsis thaliana landsberg
ttttttttatcaactatgttaatttcgatttgttaaagtaaaacgtcttgacgtagattcatgatggattttgacaaacgatattaattgtttgtactcatttttttgcagaggagatcctacggcgtttcaagagtattggatgaagaaaaaggacaggtgtacggtggggataccagcatgggatctgatgagttacttcagcgacacgaagaacgtgtgttggttcctagagccagagcttgagaaggcgatcaaggcgttgcatggtgcaatcggtaacgcagcgaccgaggaacgctacatcgtggtggggactggctcttcacagctttgtcaggccgctttgtttgcactttcatcgctctctgaggtcaaacctgtcagcatcgtcgcagcggttccttattactccgtaagcccccactcactgaatctctccttgtatctccataagcatatcaagatggtttgctataaaaatttaagatatttacaagcactcttattttagggttgtgtaagtaccacatgtttcttgaccacagcattagtcatcccaaagaaaatacaaaaattgaccaaagtttaattaatgcttcccaaaaacatatattcttcctaaaaacatatattcttcctttaaagtaagttcatatttttgtttttatgttttgcatagacatacgtggaggaggcatcgtatcttcaatcgacgctatacaaatgggaaggagacgcaaggacgttcgacaaaaa

SEQ ID NO: 10898 - DNA, 830 bp, Arabidopsis thaliana landsberg
cctcaagagttataatatcagtggggatattttgctggattcaattgtatttaaggggtgagaacgtgacgcaccatgaattcattcaggtaggcaaaggaagggatgtgggtttgaatcagatctctatgtttgaagccaaggtagctagtggtaacggtgagcaagcattgagcagagacgtttaccggttaggtcacaggctggacttctttagaatgctctctttcttctacacaacggttggctactatttcaacacaatgttgatagtatttactgtttatgcattcttgtggggtcggctttatctagcacttagtggtgttgagaaaatagcgaaggataggagtagcagcaatgaagctcttggtgcaatcttgaatcagcaatttattattcagctaggacttttcactgcacttccaatgattcttgaaaattctctcgagcgtgggtttcttccagcggtttgggacttcataacaatgcagctgcaacttgcatcgtttttctacactttctccatgggaactcgaacccattactttggccggactatactccatggtggagccaagtatcgtgccactggaagagggttcgtggtggagcataagaaatttgctgagaactacagattgtatgctcgaactcatttcatcaaagctattgagctagcgattattctattggtgtatgcggcttatagccgcgttggctaagagttcgtttgtttacatactgatgacgatttcgagctggttccttattacatcttggattatttctccatttctggttaacccttcaggcttcgattggcttaa

SEQ ID NO: 10899 - DNA, 1181 bp, Arabidopsis thaliana landsberg
aggagcttatgaatatattttgtatagatcttatttttagaaaaggtatactaatcatatcttaagtcgaccaattttttcgtaccattcactaacaaaagcttcagaaatatcctccatgatccaattattgaggttattctcttggcttcctccaccggcgcgggtaaagcttatgcttgccggcgtcaggatctttgtttctctgctttcattggctcttctaaatcccctgtatctcgctattgctggcctttatctcagtcagccccattcttcccctttaatccaaagctctttgatgtttcttcggatgttgaagctaagagacgtttcccggcaaccccgttcccttgccaagctcaacccacgatctatccgtcgcttttgaacctcgaggagccatcctttatcagcgagactccatactcgcaactgtgacgatttgctccggcctgcccagatgtgctatggttggatctctctcgtcttcccatgaagccgtttctcaccggaaactgcaaccagggggcggtgcaaccctaacatatgaagatgcctctcgattggatcttgtttctcgcctattggactcaagcccatatttttgtttattgagacccacccctttaaggtgctttccacgccttcttctgcaaaagaccaggttctgctttatctcttctctgattcctcactgcaaattgttgtgtcgatctatggaaccaattgttcatggacgccgattggatcctaatcaaactttgttgcaatgtgggttcaaactttgtctgataacctggccattagaatcacctaggggttttacttttgtttttagcaaccatgttcgaggccaaatgaatttgtcgaggaataacgacattatggtcccggctccaaggagcggtgattaccgtaacttcctcgacctcttatctccatatcccttgtttactgaactcattcatgtgccatctatcatctttagtgatacctttaacactctcaaaactttgaagcccatgtccttttatcatctctctgggttaaaccgaagacaaactttgtatggatttcttaatctccatggccgagaactccatgtgggagagaacccacctgttttgttacgctttattacccgacatttacgaatccttgtttttgcttcctctaat

SEQ ID NO: 10900 - DNA, 614 bp, Arabidopsis thaliana landsberg
cccagtcatatgttctcttcacattagacaaactgatctataagctcatcaagcatgtaggttttcttttgatgttttgttaccttctttatctctttagtcgtcacatatgattcaactgaccaatgtgatcctccagctccaagcagtagcagctgatgagatggacaacaaattacaacagctttatgcttatgagaaatccagaaagcctgaaaagtttctggatgctgtttattacgaaaatgctcgtgtgcttcttcccgatgaggatatataccgcattgaatgtgtatgaattatttactagagcacagttttggaccaagcaagctcaaggaaacttcttaatatatgtatctttgtgcttttattctgcaggaacaatcgacaccaagcaaactctctattcagcttctggactatggacatgataagcctgatgtgacatccatatccatggacccaacttttgcagcttacctccacaaatgtattcctttctttatcaacctaatgcgaaagaaaatccttcgaatctatttgaaacggtaaagtcaagaaaattaaactagaggctttcccatccttttaaaagataaaggggccctaat

SEQ ID NO: 10901 - DNA, 1147 bp, Arabidopsis thaliana landsberg
gcttacgatctatattcattaaatctaaccagtttccaactatttccaaggttatatggacatcccaacgcctgaatccatataaaaacaataatcgtttaaagtaacatatcaagaaattgtttagcctattcaatgatctataatgactaaccagatcaacaattgatggaagccttcatcccacaaaaatcccctaggaaaccggggccggcttggaactgctgtgtatagctcagctggccaatatagcaagaaatcatcctcacttttagcctgcaattgaacattgttattaactctatgaatctgtttttggagtgcaaaaaagcaagagaactataactcaccagaggacttttaggaaaatgaatctttgattgaccatagaagtaaccaatgcctccaagcatgttcccgattgctgctttaccaaccaccaaagtttcaggatcaagctggagtcacataaagagagagtcataaataatgtgcaaaagagatccttcataaaagtatttttgtgtgttaaggaaaggagtagaatcacaccttgtcagaaaggttgaagcattcattgaacttagcattaaatgctatatgtttctcttcaagtagactagagagtggcaaacctacacgaaataaagacggaaacttagcttaaaggcgtagaagctaagtacacaagataacatgaatcccagctaatcaaaaatggtgttagacaaaacatgttattatatggaaactatgctcttagacctacaacagagaaatggtgtccactatccaaaactattaacattttgcttgttgagaaaatgtaggccatataaacctgtaagactcattatacgattttccatgttggacgtttcttcttttattccagagacaaaggcaatgtctatagttgattggttcgtcgtggaaatctgcattgcaaaatgaggattatagatcaagaaatcatagaattcatatgagttatttagggatgctagttttgtttttaagtaaatctgtatttgcatatcttgatcacgactgattacctgaaaaacataaatgttggaagagtcctctgatgagtcagagagctgaagtagtccagacttctcttcctgaaaagtgaaaatataca

SEQ ID NO: 10902 - DNA, 1236 bp, Arabidopsis thaliana landsberg
acgcacgaactccctctttagttataaattatgaacactgacacaagtgattaacaaaattagttaaaacaaacagtcataaattaaattaatacgaatacatatctgaaaaaaaaaacagaaggtatgtcagtttactatttttttcttatacatcttatatttattttaaacctattctattttctttttattgtttttcgtttttcttttccatgaaagctcagttttttagaacttatgcattgtttacttattaatttaacaacttaactattcaatcataaccaccggtcaaccgtttatattaatcaacccgccttttacattagtgttactgtgtataaccgttttcttttcagccaccgaaaaacttctcttttaaagaaattgtgttcaccactagcactatatatctatcttttgtgaaattaataagacgttatatatattgctttgacaaagattaaagcttataaagaagacaaaaaagaagaaggacttttcgatgattcaatgccaaaatcagagtcaagtgttgagacatgtcttaaaaatcaaatttttaagtagtgattattttttacatcatgacactgctttagcgtcagatacgatgacctgagcattatatagcattatatgcaaatttaagtattgatcttttttaacatcatgacactctcacctgtatatcagtgtgtgtgcgataagtgtatgttcaaaatctaagttactctatatgtatgattcaactcaaacatatatatatacgattcaactcaagcatatatatatatacgattcaactcaaacatatatatatatatatatatatatgggggttatccttacaatacaaacaagagtataatacaattttctatcatcagatcatagtggttatcagcaaaaaaagttgttacaaattagagaaaccttacttatttgtgacttttttatcactttatatgcttacacatatatatactacaaaacttttatcaacacaaacaatgaaagggaaaacaattcaagtacttcaaacttcactaaatagtaaatactaaacaaattaaatcccactaaattaaagttgtgtcttatctctggtaaatgtcctgcttcccaaaaccaaaaaactattttgcttcatgcatttcctttttgaaattgtacagtatgtatagaaatagttgcaaatttcataattaaattttcatgagtataggatct

SEQ ID NO: 10903 - DNA, 896 bp, Arabidopsis thaliana landsberg
tgaagtgaggcctcattccacagccttgaagaccttgtctctaatttttctgaagagcacttgcctttgtgtcaaacgtggctttgaattatgggttgtcatcgctcaatggtcaccaagtagctcatctatcgccttcaagctcatcactatgtccatcatcatgtttcattgtctcatagtgtatgccgctattgatcggagatttgtttgccttttgtgttggatcctaaagctaaccttaaccgactatagaaccatagtccttcgaatccttgctatcctttttccgtgggtattgcagctagccccggtgagatctatagcttcgatgtctttgtcaacgtcactacgtcccttgaccatgaccaacctgttgtccttcgactatctcgaggatgatccttcgatttactgtgacctcacatgttgcactgtgcttctttgcctatgcctcaaagctctcatggaatttaaatcgatgcactttatctttctttttatggtattggggaataccgtttgttgtaatgctttaatctttgagttcttaaactctatttcttgtaattgttctttgttccattgaaatgaaagcaagatttgacaaaaaaaaaaaaaaaaaaactctgtaccacttgaagtgaaatggaagtgacattggctccatctaatcgagtgctctattctttttagagttaattgtatgagtagcttttaaataatttttaaaaattcattaaaaaccatatattataacttgtacgaattagaaaagtgacaaattatattacgagttatataatctacgatcaaactcacaaattgttggggcgacgtacatgttgacacgtgataagatcctaacgagagttcagattcttgatttgtgatgt

SEQ ID NO: 10904 - DNA, 1314 bp, Arabidopsis thaliana landsberg
ctctgttctttcagaccaatgaatgagcttacatgctctgtttcttgagagctaggaaatataagaaaccttaagattcataaacttcaatctcttcaacattataccacggcgacatccatgagttcgtatctcaacttactgatcacgaaatcaccaagctttagcacaagattgatgaatgaattgggaaacagagcatttttgacacttttaaaaaacaaaaaaaagtttgctatttcagattttaatgtgagaattggagcattttttgaaaatttggtataagcctttttaaatattttccttcttttttcttgaagatcaaagctaagtagagatttgctaacacatttgtaaaccaggtactcttatttcttgtaaaagcaaaacactaaacaagcctcagcttctccaataattacaatatctgaaaaacgaaaaaaatgtaatagtacaacaagttacatgtttttgtgtttttttttcttcttccaaatatagtaatttaaaacggagtggttgattaatttggtagttacattagaaagaaggaggaggcaagagccagctagatccttggatgtagccaagcgagatgaagtacttagcttctatgtcatcaatgtcttgtgtatactttactctcttctccttgtgcgatcctgttcctgtgcacttatattctccatagaacaccgtcctgctcatcaatcagtgcattttacattaaaacttatgtcacatagtttttgattgatatactatggtttggactttggactatacatacttgtcacgtccggcctcgcggttttcttgccatccagatgggttcacaacacttgacatatccgtgtatgcataaacaaccttggggtggctcatccatgatcgacccaagtagatcccggttccagtccctgtaaccttgcagtggacgaacgagtatccgcttttctctgcagcgctttttcccgcatgagctgtgatcactctgattccatctcccacaacgtttagttgtgtaccctattttcattaacatacaaaacgattaacgttaatgatcatcgttattgtatatatacactatggagcaagagatctaattaggtaggtacgaggtacagagagcgtccgcttccaaagatgaaatcaaatgtgccttcgatgtagcagtctttgaagaaatggtttccggtgtcatcgcaaatcgtgtcttgataaccgtaaaatttacagttgtagacaagctgctttgttgccagagattctcatagataaagcttgtgctcccttcctcttaccatc

SEQ ID NO: 10905 - DNA, 848 bp, Arabidopsis thaliana landsberg
tgctagattgtatggctgcattttgatgataatttcatatccgctacttttggattagagtgctgctttttttttagtctgcttgactcattcctccatgggtttaagagtaaatgtcactgttccttcaaaatgttccgtacaattcagtcttcactatgtgtgggtttggctctcttagcttttggtctctccatgtttcccagcttaagattatgtcttattaatgaaaatgtgttcttttttgcagattattgttcataatgggtcaagacagcaatggaattgagtttcatcagaagagacatggtctcttgaaggatcaagtccaattggttaagagaagagactctattcggtatgaaattgtttctattcaagatcggttgtcatttgagaagggcttctttgcggttatccgtgcttgccaattgctttctcagaagaatgatgggatcatattggttggtgttgctggaccttctggtgctggaaagactgtattcactgagaagatactcaattttctgccaagtgttgctgtcatttcaatggacaattataatgattctagtcggattgttgatgggaactttgatggtaagaattttcatcttgataggtcccatgaggaatgaagtcctatgacacattgttttgaaacttgaagtatcttgctgctgacaaaccttatgttttgaaacttagatccacggttaacggactatgacacattgctcaagacccttgaagacttaaaggaaggaaagcaggtaaaggttactatttatgattttaagtccagctctcgtgttggacacaggtaatgcgtgacgtgattgtgcacg

SEQ ID NO: 10906 - DNA, 938 bp, Arabidopsis thaliana landsberg
ctaacgtagcaattctccagaggaagtggatatacatcagtcaattgtttcaccagatggatgcctcacgtttgggaagcaagcgggagctgatggtaaagtgctacattgtgttaactcagttttctaatttttattttcgtctgaagaagctaaatcaaatgattactctatgatttaagcaggttaggaagttgattacttgttctgcatttgttattgactttgtatagtccaggaatagatatccatctgtctagtacctgtaaaccaattcgttcaagatcgtgtaactttatttcttagttcatgtaggaactcagcgacatgccactggaaaacgtacaccacgggttcctgtacaaacttcatttatgagggatgatagagaaggctctactccaccaaataaaagagccaggaagcaattcgatgccaatgatgatgtagcacattttttagcgttagcattaacagatgcatcgagaaggggagggtctccaaaagtttctgaatcaccaaatagaagaacagaacttagcgatagctcaccgataaagagctgggggaaaatggtatctctcagcttgacaaaattttaagcggttatctttttgatttcttttctgtgtgagtttgcttcactgaaaaacactatttaactgtgtgcttctgactagtcgcgaaccagaaaatctcagtctaagcactgtggcagctccattttagaggagtggatggaaagtagccgagaaaggaaacttgactctgataaagatactaccttgttgatggatatggaaagggctggcgaaatggaggctccgcgaaaggggaaaagagtctacaagaaaagagtgaaagtcgagaaagcagaatgtaatgattctgatgacaatggagaagcatgcagtgcacacaagggcttagaagtaaat

SEQ ID NO: 10907 - DNA, 502 bp, Arabidopsis thaliana landsberg
cgcgaaacatcttgcaccaattggctaaatctgataattaaaactgacttcaagcatactccaaaaccaatgaccagaaaagtctctcctcaatctgaatgagcttaaactccttcctttatgtcaaacctaccaccccattaaagtttaactcctcctccaaatatcctccttaaactcaactagatggttttgactcgctattttgagccagggttatacagtcatcaatctgatgagcatccatcatccaggaagggaattactatgtttgaaacacgggtttgaaacacaagtatacaaacccgtgtttccttccatagacacaccctatgataagcagcttagaagcttctcctagtagcagaaataatcgaagaccataaaaagagcccatgttaacaaacagatcagagaattatctgtagcaatctagaccttgattgattcgtattagtcatccttccaccattataaggtctaccacgcggagtagcagaag

SEQ ID NO: 10908 - DNA, 487 bp, Arabidopsis thaliana landsberg
  unsure (1)..(487): unsure at all n locations
gnnnnnnnnnnnnnnnnnnngacctatgctttggcgtgtgacaaacgagaggatttttgtaaccatagcctaaaatttgctctcatgggagttgaacccaggacccgaggagtgctactcagaccacctaaccaactcagctgaaggctattttgctctcattatactccattattttttgtttgttgcggtttagttcaaaaatgaactagcaggcgacaaatattcgagaacggaggtagcatatactaatgcctaccttaattagggttagggtttcgaacatggtatctagtcagttttccttttctctattcctcctctcctagccgctgtttccctctccctacccgccggctgctgcaaccatggatggcgacgaccttccccttccctctccactcctctccctcccctctatctcgtcactggagtgccgtcgtggtggacccacccgcccgtcctcttgctgcgggcgcaagcgacg

SEQ ID NO: 10909 - DNA, 405 bp, Arabidopsis thaliana landsberg
ttttgatctttgtcgtactctcccgacaccttatgggatttgtggtgccgtcagtcacgtgaagcgctgatggtgctccgcgtgtctcgtcggctattaatggcgtgacacaggtcgttcgtaggatgagcgaagggtagaagatgattggccgcctgagtaagcagccgccggtaaccttccgcgtctggggttcgcgggaggccatcaactatctgcactagtactccttcaacttcactcggcgtgttcagtgcttgagcgaaatcagggtacacgtttccagcgaggagagggttctcttgtcggagccttgcgtcttgttcggctacatctcgctctcgatcttgagcctataggcaatcacggcggcgggagttatgcctttctcggtgtactcattca

SEQ ID NO: 10910 - DNA, 1150 bp, Arabidopsis thaliana landsberg
ttttagtttctctgcatgtagtaacaagtttgcctgtccgtttgttaaaattatacgtcttaaaaaatttcttctctcttctctgatcatctctctttgtgtgctcacaatgaagcacaacaacaaagtctccaagagacttactatgacatgggttcctcttctttgcatttcttgctttttcctcggagcaatcttcacctccaagttctgtttcttcttcttcatcaatctttctacggttactttaacaaaacaaaaaaaaatctttctacggttacacaataaataatttcatgtcttcttgctttctcattatttttgttgttgttgttgttgttgcattttcagattacgatcagcttcgtcggattccggtagccagctcattttacagcaccggcgtgatcaggagcttaagattgttacccaagattatgctcatgagaaagtttctttcttagaacaattaatctcattgaatctgaatttctcctatgagtattaattttggtgttaaaacaaaaaaactcattattttcaatcttttgatttcaccaaaatacagaagaaatcacaagacaatgatgtaatggaagaggttttaaaaactcataaagcaatcgagtgagtgagaaatgattatttttttgtgtgaatcttaaacttgctgttgattaataatattttgatgatcatatactcttgtgttgagacaacagatcattggataagtcagtttctatgcttcagaagcagctctctgctacacatagccctcaacagattgtgaatgtctcagcaaccaattcttcaacagaaggaaaccaaaagaacaaagtttttatggtgattggtatcaatactgcatttagcagtcgaaaacgtcgcgattcgcttagagagacttggatgcctcaaggtatctgtgatgtccatccttcaaatctctggttactttcaatgcttcattgcctctaatcttatttagcttttgtatgtcatctatcacaggggaaaagcttgagaaattggaaaaagagaagggaattgtcgtcaaatttatgattggacacaggtgaatgaatgcaatgtagtctaatgtgtgttttttgtttaagtagactaagactcttactatgatgtgttg

SEQ ID NO: 10911 - DNA, 1390 bp, Arabidopsis thaliana landsberg
gttagagagttggcagataatctccacaagagcagctactatctctaaaatgatgaaacgtcttgttatctcttacatatgatctatctatcttcaatactcgatgataaataaacgtttgaggaaaaagcattggaagttgcataaatggcttatgcccatagtttagtataactttgtagaatttcacatcttttaatacaaaagtctaccaataatctccacaagagcagttaccatctctaaaatgatggaacctcttgttatctcttacaatgatctctctatcttcgatactcgataatatctttatgaagttatggcaatctccacatatcctcagattcttcatcacccttattgtcgtccctggaggagtgtttataatcccgaaagcaatagctaaccgttcactatgatgcatcaaggctttctctttagcttcttcatcaatgtcgtgaagaacatacttagtctctggtacatagcctgcgtctctcacttctttccctaaagatttcagctttacgtaggccttgcttctatctacaatagctttcttctcaccccctgaaatctctggcttttctcctctaacctttgttgaatgactagaaggtgagatatgtcgtaaagtagtatcttttcgtacagtgtttcttactactgaacctgaaagtcctcttgctgtttctctgccaccgctccaagtatctaaatttctttcaggcagtttatcaaatactttgggagaagtttccttgacttgagtctcaactccatcagagctttgaacttgactctcacccgcaattccctttgctctcgaggtgattcgttgaaaagatgaagtttctctctcacagaagattgctttagggacagagaaggagcaaaaactcatggagaaagcagcttccagagccatccctttgtggtcaatccaagaagcagataagctttctttggagagagaaatagagaaatcaaatctctcacacacatatctacaagaaaacaaacaacttaacaaactgccaataaaatcactggtccacaaaaggtttcctgcataaccaccatcccataaatcacttgtaagctaagtaagaaccacaaaatccttcagcattccaatttgaatactgtttgcttttctatctgaagctgaaaaacttcagagaattcctttagtaacgactcatgagctatatctaacaactgcaaatcttcaagcttattataatgttctccatcctcaatcaaaccctttacgcttccaaccccacggttccttatcccacatggaactatggagttaaagggtgttaaatctgttgtaacattaagagctagaccatgatatgtcatccatttcgacacacgaata

SEQ ID NO: 10912 - DNA, 888 bp, Arabidopsis thaliana landsberg
cttattttgctgatgttatggaccattatggttttattgattagaaagcaaatattataatgtgaaactctagtggtagagatttcttgcttgtcttttactagtttccagctactcttgttttgtccgttttggctattccacgatctacaactttcgggttcatatcaatgtccaagaggatatttactagcaattcctcctatgatgtgaaatcgtctagtgccaaaaatatatcagttttaaaagcattggtttaacttaccaagcataaagtaatgaagacattactttttttgggcacaaactcatagaaaagtattatctatgattcttcaaaataaaacccaagtagttttatgagaatttatattttgaagctttgtcatacaacaccttgttgaacaaccacaactagattttaatccgcggtacaccgcatgacaatttatttttaaaattagtttatataaagatttacaaattatatttatttataaaatttatatttatagtttacatttattattaagtgaaagtataccaaagatttaacccgtatgttaatatttattttgaattatataaatacaaaaataaccgaacggttattgctttagaccgatttcgtaaacaattccacaaacgaaaaacaaattcgtaataaaggcgttgtgggttttggttaacacccggtttgtaacggtctttgcgccttatccaaaaaaacctcctaaaaccttctcaccagccattgattcacaatctcaaaattcatcacagcgaagaagatgcgatcttcgtttctagtctcgaatcctccatttgtaccttgtctaatccctcgttacagctctagaaaattcatcagacgtagcagagaacgct

SEQ ID NO: 10913 - DNA, 755 bp, Arabidopsis thaliana landsberg
cgtgacatggcatgcgataatacatccaacaaacggtgcttataagccgcacattttcgtttttactggcaaacaccgcaagcaactctgtagaggcgtgtaactctccttggtcttcactttcttcttcgaatctcaacgacatgtgtcagtcaaacatgttggagaatcgatttgattcttcaagaagcttgatggacgaagccctaagcgtactctaccatcttgacacatcggagacagccctcaagagtcttttaaacaacaagaaaggaacaaatcttgtgaaaacgttgacgaagattatgcaacgtgggatctacgagtcaagagcctatgcggctttgcttctcaagaagctcctggaagttgcggatccaatgcagatcatattgttggaacgagaacttttcggtgaggtgattcaaatcttgcacgaccagatctctcacaaggcgacaagatcagcaatgcaaatcttggtgatcacatgtccatggggaaggaatagacacaaggcagtggaaggtggaacaatctcgatgataatcgagcttttaatggacgatactttctcatcagagagaaggaattcagagatggcgatggtggttcttgatatgttatgtcagtgcgcagaaggaagagctgagttcttgaatcacggtgccgctattgcggttgtgtctaagaagatattgagggtctcacaaataactagtgaaagggcagttagggttttgctttcggttggg

SEQ ID NO: 10914 - DNA, 1637 bp, Arabidopsis thaliana landsberg
aaaataagggtttttccgattcacatccatactattttagtatttacacatggccatggggctgtgaatgcatcaatcaaaattttagtaaaataatagtatgaagctttgtctctcacgtttcgaagaagaatccaacggcagtgattgtgcaataattgcgagtgacacctacttttacaccataaagattcttgggccaaaatctcttgcgatacatataaaataaatgccaaaatttgtcatattaataatatatagagcaagatagcagtcagattccgtggtaatcaacggattctatttacatattaataatataattttcataatttcgaggtcaatatttaatcgagaccggtcatcgatgtacttaaaatgtctctctttcagtttacttcccaaaattaaccaagaaaattactagatggaaaggatcgatcagcagttcagcacttaaaatctttagaaataaatactcctcacatcaagcacaatagtttttgaaccttgtttaaaatcaagcacaatagtttattctcctcacatgttcaacatatatatattttatttttttgatcaatttcaacatatataatacacttttttttaccatatataatacattaatacttcaatacggaaattaaagaaacggaaatcattcacaaaaattgtaataattatgatggaacaaatcttacacttgatgatctaaacaatacttaccgactggcaaaagataaagaaaaaaaagcatttttgtgtttcagaaagaaagagtggattaatggaaaattttacaatggattttattatcagaatttcttaaggttataaataggctagacttgaaagaaagaaagaaaaatacagaaaattacaattatgcccataaggctccaacctcgacgagtctaggaataagctgaccacttaggtgaagtgctacaagtgactcgaagccaccgacgcaagtaccaccgatgaaaagcaccggagcggcttcaacggcgaggtaagcaatttctccgtcgtcgatctcgatcactgttgggtgaactccaacggtcgatagaagcttcttcatgacgtggcacatgcaacatgaggaaaatcgagtgaatatgatgactggatgctctgatatcagccgtccgatctttgactctgatgtttcctcttcatcgaacgacaggctcgtcgaggcggtggaggaggagactgttggtggtgctggaggaggaagaggaggaggaggaggatgaaccgtctggtctagcgttacggcgtcgtttgagcagtttcgtaaacctcgcatcgtcttcattagagagaaagagtacttagagagggagagagagagtgggagtttttgttgatgtcaacgcgagatgagagcgaccataaatggagaaattgggtgtcactataatgacgtaaccattagctaattaattattttatttgtttttaatttatatgacactttaataaatttgttttcgacgggcaccttggtcgcttcttatttatgacatatatagcttggttctgttttctttaacaaccatatagcttggtctaaaaatttaaattataatttaacttaatatatatcgaaaattggcatataa

SEQ ID NO: 10915 - DNA, 1313 bp, Arabidopsis thaliana landsberg
tatatttatcacaaaatccgacaaaagtatacaaaaatctataaatatttaacctataatatttatctttgcatattataataattattattttaaaatcgaaatggttctacaataaaaatatccattataaatacagaaccctaactctcttttcagttgctgactcaaatctccaaactcctagaaaatctccaaattcccaagtttgtttctttaatctctctattcctcacaaactcatcaatttccaacgaacccacaagatcaaatatttatccttttttcctcgttgagatcgatcacacacacacaaatctgaaatctgagatctttaacatcaatggcgtcatcgtctagcctgactcgatcgggaagcgtccacctagacgagaagtggaaactgtcaaagaaagacggcggcgcgtcgatggatcacgcgctcttcatcgacctcatcttcttccttcaacggcaagaaacaggggagatgtgcttttacgagaaagtgtgcaagattggttaaagaacagagagctcgtttctacatcatgcgtcgatgcgtaatcatgcttatttgctggagagataattactctgattcttaaaaaaaaataaaataaccaaatcgctctctgtatctagaattctctgtttctatgtttctgataccaaagtagatagttataatacatgtacataaagggttctgttttctgttggtttctacttctttagatgaactttagattttgtttatgattctggttagagaagctttgtttaagatcagttccagtgtgaaggaaaataaaaaaaaaacgaagaacagacaaattgtaaaatattttaatcaagtataaaatagtgaattagattcgtctttcgacttcttgtgacgattttgtttttgtttgttgctcttttgttcgtttgtgttttttgcatattttcctcttcttgttgttcattaatgatattactctgaagatgacgacgatgaatgtggcttttctctagagtctatagaggtgggagagagagaaaaagattccattggaactgttacgattaagctatgtgtggatcttgtgtgcttagtctgacaaagttattagtttttctctctttttagtaataaacaattatgatttatatatttttctaaaatttcatttcttaattagttatgattaatatttgaagttgtagtcaagctcttccctttacccttaatgatataaagctatactagtagaaaagttagactaagccatgattagacttgttcaagaaattagaatgtttggata

SEQ ID NO: 10916 - DNA, 894 bp, Arabidopsis thaliana landsberg
aaaatcttgcattacctccttggtgtcattattagaaaaatatattcatgccaagaattttattatgtatctgaagtcatcactttgacttttatcttgcttatcaaagatataaacaacaacaaaaactgaattatcttcttcccttgtaaaccactcaatcaatcattgatcatgcctcgtaacttcaacttgttgttagttctggtgatcattgctctgtttattactaaaaactcacttggcaggcttcttgagggatccactggtattatcaatggtttcctgacgtggacaaacaccaagaagcccgtggacgctgaaagctgtgtcgaggtcggttgtgcaattatatatgacgttgttgctctatatattttatgttgttcattgtattgaatgtatcgtgtggtctgttatctactcaagtcggctgtaacattgtgaactactttatctgtagaagctattactttatcttcagattttggtttgggaactgctctaacatgcgctgttaccatcaggcgcctggacaaacaagcagacatgatgccagattcccaggtttgtaaaacataagatatatcttccagagatttgataagattagaattattttccttaaacaagattgtgcttctgtggtgaacagatgatgtcataaggtatacaaggtcgactatattttaaaatgttgatgtagaatattatcttctgaccaaagcataactaaatagttttcttgactaactcatcggttctacaatggtccatggagggttgggacaccattaactagttaattaattgatatcaagtgttcacataacataactagttcatatgtttattatgtctgcagtcattactttactttcatatatatacaaa

SEQ ID NO: 10917 - DNA, 648 bp, Arabidopsis thaliana landsberg
  unsure (1)..(648): unsure at all n locations
agctctccccgttgtttgctttgttaaagattccaaggtactgatcagcggaggcaccattaatgcctcttgtgggagagatcacgaaggccataccatgagcgcctttgtgcttatcctcaggggcgatagcaaagaagaacgtgacagagaaagaagtaactgtatcgttggccgaattcttgaaagggactatctcgtcctcgaaggcttgaccatatgcgtgcttcttggtgctcgtcaacgtcctgtaacctttaaaaaatccagcggatccctgcataaccagtttgccacgggagttttcagtacaacagaagagagcaaggatcaagaaaatgacccgtgagccgattgtacgagacatgatttttgatcgacggttttagaaactaagagcttagtttctgcttttgtcttttatatctttgggagcatgatggaagtcatctaagccaacaaaaaaaatgcccatgaactagtcaaggccctacaaggaataaaatcagagagattgctannnnnnnnnnnnnnnnnnnnntcaaaaccaattatttaactagtttgtatatatatgaaagtaaagtaatgactgctgacataataaacatatgaactagtcaagacatgtgaacactcgatatcaat

SEQ ID NO: 10918 - DNA, 1474 bp, Arabidopsis thaliana landsberg
gtttacttttgatgtggagtggtgggtttagctcgtgtcgcaacaagaacacgaacagaatcagaaccagagatctcttgtgtgtaaccatcctaattaatagaggttaaaattgtattgtttactctgaaacaaaaccaaatcagattacaaaaagaatatggtatatgaaggaaacacaaaccttacactttcctcttcctattccgcttttcggtaagcaagttggatctcgcaaacccgtctgaacatgaccactgtgaactcctccaagggctaggttaaattttggagttcttctattatcaaagaatggatttgagccatctgatcttccataaggtttgtttgaagtaacaacggttatgttcatatactccatctccgcgaaatcgttctcaccatttttgttgttcttattagcagagtttctcatgattgagactgcaacaccagccgtgaaagaatcccacatgaagtagctctgaagaatatcaccaaaaaaaatcaaaaaagaaaagaaacattcttgatttattttaagtttggggaaatggattcataaaagttaccttgtagaattcatcgtcgaaccaagtgtctctggcgattttcagagataagaaaacgtattgagcttcgtatgttctctggtaattattctcgaatgtctcaaagaacttctggttgatcggaatagtgttggttgcatctagaggaaccagagtcactggaacacctgaatgaaacacctgtaataaaacacatgtcatgtcttgttttgaaagacctaagacaaatgtcatatttatttttataaaacattatttagacttaaaaaaaagatagtttattaaccaaacaaatccttgagagttgagagaagataaaagagtaggagaatgaacctggtaagcagcgaaaggatcagcgaagatgttgaattcagagtaaggattacttgtataatctgtgaacaagttttcacggttcccgcactgtcgtggttgacattccgccaccgtggagttcgccggacaacagccggtggggttttgtgatcggacaccaccgcccatgatgtagatgtgttggatgttgtgtttcaagtgagcatttgacatcaagaagagtgcaaaattggtgtgggatccgagaaggattacggtggttggaccttcggaaattttgtcgaccatcactttttgtgccgttggttgttggagaggagtgtatcttctgtgtgggtgtggtcccacaaaaacataaccaaccacaaaaagtcaaaaaccgtcttttaaatatttaattcgatataaaattacacttatgatatatataaaaacatcacaaactaaatcgattcttcgctactataccgatattttaagcatttttgctctttctttctgttaattgcttttttaattttgaactaacacggatttatattatttttattataaaaaaaaac

SEQ ID NO: 10919 - DNA, 1158 bp, Arabidopsis thaliana landsberg
gcacacagactcaggctttcggaaatatgccctttgcccataagctggttcacgggtctctaaagttctttggtttgggtggggtgggtaataaaagtgggtgggtcgggaaaagcggctccggaaaaagagtcaattgaaggctggatcccagggagggggggtaacctaagggaatggtttttgggaaccaggccttaaactcctggcaaaaccacctggttttaatcgggaggcccgggtcgggaataggtaaccaaggagggggttctttcgaaaagaaaagggagccattgtgccctagcagggtgttggcccccggtttggataggtaggctcgcttgaagtgtccgccaccacatatttatcgacgcataaaataacctctattacaataagaaaattcaaatattaaaatccgctaaattaaaagtaagtttttacatttttttccaaccagtttgcaaaattttcttctttaagggaggttagatcatctccggttattccaagcaacagccatgctatcatcaaaaagccaatatatacaaaaaaaaagtttcactataataagtagcaaaagtagaaatttcttaattgatgtattgttccacaatcgagccttctacttttgccttattcttcacttttttctttaaatggtccatgtatcgttcaaaaggatacatccgtctaaattgtacaggttccccaagtcgaggttcgtgtggcaaatgtataagcaaatgttccatgacatcaaaagaggatggtggaaatatcttctccaaattacaaagaacaatagaaatattgtgttctaacgttgcaacactatcttttaacacaaatatcctagaaaaataagctcacacccacaaaaataaaatattatatagttaatacatatataaatttttaattatgacacatgtataattaaataaatctagtacataaaaacaaaaacttaacaaaaaaagtcaagatgaatgcaatgcaatgaaacaattttcttcttatgctctgtttttatgttttcttttgttttatgttttatgttctgcaactcttcttttcaattaatgtaatgggatgattaaaaaaaaaaaaaaaaagtctgaacctttgttacttaaatctatgatgttagttcgt

SEQ ID NO: 10920 - DNA, 1394 bp, Arabidopsis thaliana landsberg
agatgaagcatgagcttatctaatacacgagggacaaaggagaaatcttgtcattatcccgatgggaacaaaagagaaatcttgttcacctacactttggagagaagggatgtcaaacaaaaatattgagagaacaagtaagaaagagcatcactacactctgcaacaagacaagagaaaaaaaaaaaaaaaaaaaaaagggggtgcaaaaacaagttctctcactgacatctcgtctcactgcagaaaggagcagtaagaagcaacaataagttctgaatacaaaagatcagacttgtaatttatcaatagcctgattgttgctgcacagtctgtcacactccttgttaaaaggactcgctaacactctgagatatgacggtgtgaagactactcttggagaatcaacattctcttttgtgttgtgtcagcagattatgttctgaattttttgatacaagttacaatgagcttagtattgtacaatcacctatgggacagttctggacctcagcatgagggagagatggttattactgtgctgatactaatggggacttgttctgtatatatatcaagatggcttcagaaaaatgagttgactttcaaaggtactaagttcaattctataagctaattgggttgttcggttttgttttatggtggttattgtgttttatgagatttgaccggaccaaaatccggttagcactgattttcggttttgagtttctatggtttgcataaagggatctatcgaatgaaacaagtgagaaaacccagaaaattgagctctcacgccgaaacactagcgatgggagaacacgcagcgatgcccggcgtatgcgaaagatgtttaatccagagtatgtgtttggcacatccttacctgtagatttaagatatgtctctaccttgctgacgacaataacgacacatatggaaggtatggtgtcttggtcctgtgctcagtgtctggtttaattggtagagtgtctagatagagtttttgatcaattgtgtcatgcaagcagggggagattatggactggtccctgagaactctaattcatttgtaaactctctagatgttgataacgaagaaggctttgaagatacttaatcttctgattgtgtttagatctagttgtgggggagtttaggattaagggggagtttttaagctgtgtttgttaatcatgtccttttggttttaataggtctttgtttctaagtactggatgatgtgttttgaaccttaaaacttatttctgcaatctatgatgagaccctctattggttatttccgctgcttattatctctatgacttgatgtgtgcttgtgagttttctttgagggatctcttgcaggattgcttgaattgacaaattgt

SEQ ID NO: 10921 - DNA, 1461 bp, Arabidopsis thaliana landsberg
atttcctatatgaaaactgttaccttttttattagattattagacgttttattatgtttgaaacgattagatcgatcgaatacatactcggtttttgagctggcactgaaggaaacgttgaaggggaaaagacaaagtgaaggcgaaatgaagcggtatgacccaaatggcgacaacaccggacagctcagcgatatcgtccggttgaccaagaaatttaagaaccggagtagtgaaaatataagttggtaataacaagacacagcaaaagaagagaacaatccaagaacgctgcatataaactcccaacatatgatatttcttcgctccaaacgcttgtccacacagcgtttccaacgcactcgccattccaagctaaaccatttacatatactcatattattatttcttagaaaaatgaaggaaaaaaacattttaatcaagattgtgtagatactataccaagaggccaaagttgaagcctacggtgacgttattaacgatggatatggcggcgagttcaagatcgccgagatgaccagcgaaagcttgagtgattacaagcatcgaatatgtcgttactcgactgaatatggccggaccaactatttgccatagcttttttgtctcaaccaaaattctatccttcaatccttcaccgtcttcctccgccgtgtgaggacttttcaacagtgcaactcttgactccgatccttcttctccatcacctgccctcatcgctaattcctttttttttagttatgtggaagaaatgaaatataaggagaaaagaagaagtgagaagaatggtgaagacgagagatgagtcgtgtgtgaattggtttttatctatatataaagtctgtggctagtgttataattcaattgtggtataaaaaaattcctattcattcatttataaacgtttatatgataaacttcgtgtctttttctattacagagaatataataaatttcaaatatatacagtatgaaaaagaaaagaatgaaatatttatggcctcgcaatttacaaatatgacgacaacaaatagataatttcctaactataatatttgacagcaaacataattatcttttaacgaggtccatgccatggattttgaatctatgaaagtattcaaataaaaagtttggtacgagtttattttaagaaaaaatcttgagatacgtcatttgacaaactattaagtttccgtactagccttaggatttcgggttaggtttgctatctaagtgaatcatcataataagttaattaacactgaaaaaaggaaagccatacatttcgagtcctattgaaatcgaataaaatcgacacgtgagaggcacgtggtatatattgaattcggttttttgggtgaacgtcgatatatctcgatcgacatgcgtaagagaccccatgtgatctcattgcttacatactaatggcctaatgaa

SEQ ID NO: 10922 - DNA, 1450 bp, Arabidopsis thaliana landsberg
gcaatttgactaaatttgaggttcattgtaagtaggatttagagaaattccatctttgattagtttaacttagctgggagaacgcataatcgggccaattagggattttagatcatgacattgttctagtgttgtctaataagtggccatttgatgcagagtcaacaagatactattacaccgttccagattttgggtggtgaatcccaagttgttcaggtacatttgctttcttaatatagcgtgatcttcgtatttgtgggttatatgccatataattttaacttctctaaccattgctcgtatgttggcagataatgttaaagtcagaggagaaagtcattgctaagcctggtacttccactgaataactcgcttctctactcagttttgtataatggtttcaagtttcaactaattttgtgttatggtgatgtagcttccatgtgctacatgtctggctccatcgagatggaaaatacatacactcctgaacaagaagttggagttctgcagtggattttgggcaagagtgtaagcagtgttgttcttcggaatactgggcaaaacgacgggtttgttggtattgctgcaccttatttggctaggattctcccggttagtgattttagcttgtccatgttggcataatcatcttccatttcacccttaatgtataccgcctgattccttgttgtttttgtgatctttgttttccatgtagattgatttggcaatgtttggaggtgagatcttatgccaggtagagtcttttttcctagattttgaacacttagctatcagcttcttcttcactcagatcaagctcttacagagtcgcctgaccttttcttcactttctgtagccagatgcattcctttgttctgtccatgatgtgaaggttgtcaactccgttgaccagagagcaagaaacattgttgccgctggtgcagaggtaagaactaagaaggaaaatacgttgatttggtttctgatgcaattattattcttaacaaaattctgcaacccgttgtctggcttctactcacaaattgctggtgcagggatttctgagacaacgcctatctggacaaggtcttgctttcatcctcgcaggtggctctggtgagattttatcccaatgaaatgctgtttccgttgaggcctcatccccttcaataaaactgacatttaacatcccaaacatgttagttgtacaaaaagttctggaggtaggagaagttttctccattgacgtttcctgtattgatgctctcacaccctctatcgatgtccgaatcaaaaacaatgctccttttagacgagcagtattcgggagtacattttcacatatactttgtttcaatgagaagaagattaaggtttatgttttgtttgtcaaatgttttaatctttcaacattcaaaagggtgataacgtagtaatggc

SEQ ID NO: 10923 - DNA, 968 bp, Arabidopsis thaliana landsberg
taattacagaataaatgcatttggtgacttgcgatcaatctctttcacagagtttaagtttctaaatatgttttgaaacatctctagttttcttgtttctgattatagtcttttggtgaaatgtaaatgtttagctggatgatatgattggtgtgagaagtcatcatatgggaggatgggaaggcggtgaacagaatgttacctacgcgcatcatcaagctcagtctcagggactataccagcctcttgaatgcaatccaactctgcaaatggggtaaatctgccttgaaaaatcatctgcaaatcagtttgtgtacttaactactaagattgtccttatttaaggttctttagttgcttggtgtaaagaggatcatcaatgtgtgtgaaccttctaagttgatgttttggcgatgatgatgatgatgcaggtatgataatccagtatgctctgagcaaatcactgcgacaacacaagctcaggcgcagccgggaaacggttacattccaggatggatgctctgagaatcatgtactgtgatgaagctcacccacaaaagaccttatatatatataaagtatagatacaagacttggatttgtagacataagtggctaatataatggtcctgaggatcttctagacatttgtatcttttgggaatccttgcttatattaagaattcaaatgtgtggaacttgttttaacactgaaccatgacactggtttattgtcatgtaatgagagaaacatttgggttacaatgtgatctctccttgacccaaatacccaatgtaaaccctatgccaaaatacaagcatcacatatatatattcataaaaggtttaagtaatcatacaaaatgatgtaaaaagtttcatgccttgaacaaaacactgcgccaaaggcaaattctaagaaacatgtcagattcctgtgggcattctgtttgctgctgctgctggtt

SEQ ID NO: 10924 - DNA, 495 bp, Arabidopsis thaliana landsberg
gttaaagtagaaccgtgggaagcccaaatagcccaaaatgtgctcgactatacaatttatagacaaatactcggtttactaaatctgtttgaaacccaaataggacccatattttttgaattcaaaatacaaattaagttacgatatactttatatagttattattttaaaaataatctgttgaaataaaaatatttagtaattattttaatatttatttaattattttaatatttatataattaatatgacccatattcatactaattaaatgttttgcctatggtgtttttaataataatttatttctgaacatttggaattattttttttttttggtattttaatgaaaaaggaatatttcaatcaattatgactgaaagtgtaagattaaattggttcgaacataaatattaagaaaaatattgattactatttaaaggtcacagattataaaaacaaaattatgtttacttatattgatttcttacaccc

SEQ ID NO: 10925 - DNA, 845 bp, Arabidopsis thaliana landsberg
  unsure (1)..(845): unsure at all n locations
ttcaatcagtcttcttgattcattacaactattattctaaagagctcaaagagatgatttctcatcatcccaagtttttggatttaagctttatgaagtatgactcttaagattgaatatagcgtttagtaatgaataatcatcaatctattaaacaatgatttaatacataaattgcaacaaaaagagtttaaattgataagaaactttagtcctctctaacgaaccatacaaacattatatgaatatgtaaagaaagaaagatttaagagaaaagaacgttaaattgccgctataaaacgaattttcttcgttgtatgttttcgattagattctcccaagaaagaaatctcttgtgaatgttgttttgttttttcatgttggaggcagtttttggcctcatcatcatcatcatcgtaatcactccaaatctctgaggctttcacttgtcaaccacagtttcttctggacaatgagtatcacattgtccgagtcttggtctgattccgaggctgtcttggnnnnnnnnnnnnnnnnnnnnnnnnnnnnnnnnnnnnnnnnnnnnnnnnnnnctacggattgtttgtcccttatgagtatgaaaccgcttggacgaagtatacgatccatctccaacagcaaatcttctgcgctacaacctctcttcttgatatcagatatgatgtcctaagcgtggagtaaatcgtaagtcctcgggtaagtcgagaacgcttcacacctgctatattatcagacgataaatcataagaggcacatatatactaatggattttgattaagtgaaaggttagggagaaactgaccagctatgaacagcacccatc

SEQ ID NO: 10926 - DNA, 1142 bp, Arabidopsis thaliana landsberg
atagcaggcatgtactagtagtcagtctaagattcagggagtgaagacattatagcttacttgtgtctgtgcaggtccgttatcgaagttcgtgatggtttgacatttcttgatcagattgttatccagattcaggtatggcttctttttttgtttcttactcttccccacttaatgtttgctcatctaatgatcaatatattgctcactcacagaatctcaacaacaagtatggctgcaaggttccgttagttctcatgaactcgtttgatacacatgatgacacacataaggtacttctctttcactgtggatcacatttcttcacttctatatttctgctattcttcttggctgactgtttttgtcatattcagattgtggaagagtaccccaactcaaatgttgacattcacacttttaaccaggtttgtgatgtcgatgcatatcaaattaggaaacgaaaatttcatttgtatgtaaaaactgatatcagatctgcaactcaagtcgttaacttgggtattgtagagcgactatccccgtgttgtggcagatgagtttgagccatggcccagcaagggaaagaccgatcaaggagggctggtatgatttcaaatatttatgtattagtttctttctttgttgggccttgtgcttcattatcactcaagtttatcaacttcgtcaaaacgattgaaatctgtcattctgcagtttagataacaggaaacagactatcaaaacagtattcattacttaatcttgatactttaagtggctattgttcatgttcatattaagtcgcattttatcttcttatgcaagttagaactggttaatctacctacgtgatgaagtatcataactgataactgaattgtaatgccttgtgctctctaagatcagtccatgattgcagagaacaagaagttgtgaattttctaacaggttatactgaaatctatttgagaatacggcatgttttcaattatataagtttcatctgtttgctggttgaccatatgctgtagtcgtcgcagattttcttttttttttgcctttgtttgcgttttcattagagattacttttgcatttaaagaatagcttctgttggttatcagatcgcctactaataaat

SEQ ID NO: 10927 - DNA, 1318 bp, Arabidopsis thaliana landsberg
taaatattagcatttatttttactaacatttttcttcggtttttacgtttaacaattcatccaaattcttcaaaatcatataaaaactcaaaataactaaaatcactcaaaatataagatttaatacatttccctaatgtacgaatctacaaaacgtcaataataaacttttcgaagcatatttactcgcataaaaccaacataatttttctctaactcactaaaattaagtggaaccaatatgtatataacgaatggccgacactttttttttaatggtgtatccatttcaattcgtatcttattccataaaataaaatcttctagcgatgtgatcgatccacagtggtttaaaaagtctcattctgcttttgttgacttcttccatactctacaaaaagtctatagtctctaaagtcaagctttcacattcaaactattctttatgcgcgtgcttcgcaagttcgcatgcaactgatgcaagcctataacatatatgtatcaatgtatgtacctagctaactaactaactattgatacatatgtgtatacgcaataaggggtaaaagagtaattttcttaccgtggcattctttgaacgagtccttctccgaaatggttaaacgcaattgtgacttgcatgttcttgtcctgcgtgtaactatcgctatgtcctaaaagcatgaccttgtcatggtgcgtcatatgattgttcgatatggttatagccgtggaaccatgtatagcgtctatgagtccatcatcgcagttcgaaaacgagcaatggtcaatccacacgtgtttccctccaaatatcgccaccgcgtctccatcggtctgcatccaccacccggtgtgatgtggattatctttaatcatgccacctataaaacataacatatagtagcatattttatgttttatgacattttgcctctattatattaagcacatctactaaaagtttgaagtctttgaattatggctcacctgatcctggtttacagtcatggatgttaatgccatgaattatgatgttagttgcatagtggatctttaagcatggtccatcggtaatgtgaacactcgagcctctaccatcaatggtcttgaaagatgtgatgataagttcttttttgagcctaatgaccatatctctcttgaaaatgatccataatcgttcttcttgtgtcactgcatatcttagagttccaggtctaggatttactggatcgtcgttggacggatcagtaactacatagattctgccatcacggcctccgatagcatttttgccaaacccaatggcacaatctgc

SEQ ID NO: 10928 - DNA, 1812 bp, Arabidopsis thaliana landsberg
  unsure (1)..(1812): unsure at all n locations
gaagatttgttaccttaatgcattatatttgaaaatttattcatatatcacaacaacaaacccactaaggggttgggtgacaaatccttaaaacagatctttagttggaacagtggcggttgaatcagtttgatcagagatagttgtgttggtagcggctagaccgtccagcattctgattatctccgcagtatcgtctaaatagtattttgctttgcttggcttttnnnnnnnnnnnnnnnnnnnnnnnnnnnnnnnnnnnnacaaagctggaccatctttagcactcattatcacctcaaacatatcctcatcagaccgatcatcaccgacgcagagaatgaaatccaaaagtttccctttttcttgcatcgttgttagaagcctctctgccacaagacctttgttcacaccctgttttttttatcggaacaacaaaaaagtttagctatcggaactttcatgcttgaaaagagaaaacagacaataaaccaactcttttaacgtcttacctgtggtttaacttcaacgagttgttgtccagtcttgacagagactggatcattggtaagcacgctttcgaggtgttccataagctctttggcttgacaagatccaaaatcaggatctgcgaattggtaattccaaacgagagcagtctctttagtctctattgttgatccatctgtagtctcagtgtaaagtctcatcactggctctgctatttgtttccactcaaaacctgataccaaactggacgtttcccagtctgttccatcatttggcctgtccccaatatgaacaaaaagatcaaaactttatatccaaaacatccatcttttcaaaaaataagagactgaaaaagatatgaaagcagtcccatgtgcaataaccataactttattatcctaaagtttgatcttttcaagtgctcttagtgattcaagaagatatgaaaacagcctcaaaatgtaaactcattacttcaatatccaaaagattgatcttttcaagtaaagaagataagaaaatataactttgctttatatccaaaaatcgaaatcaacttttaaaaacaacttttcaagtgctcttagtaatttaaggaaaatgtgaaaccaagtgttaccttataaaatacccgtgctctgcacccaaaccgagatcgtcacatgaagaaaaccattcacttagtgtccttatgtctttcccactgacgaggtacacgattttcttgggatcactagacaggttgttcaagatatcgattgtttcgcgggttggtgttgccctaatggaacctggctgcaccattgtgccatcataatccaacaaaatggctcggtttttggttctcttataagctgagacaatgtgctcaataaaaaagctttttaaaactcggatcaagagccacaactctaaagcttaagcggaatccaatcccccaacacctcttcctcacatgatcaccgcaagccctttcaagatgttgtataaagctacgcgcccaataagcaacatcatgtgtgctaacatatttgtgatgcttctcgtgacgcatatgcttctctgcttctgaaactatcaatgcatagtccattgcttcagtcacagcatcaatgttccacggattcactctaagggcgccgcttaaagaaaggagaacaaccaataaactcagagacaacaagcatactcttctttgcagcagaaggggcaaggcctatagtctcgttgagtaaaggaaccccttgcctgcagataatgtactcataaggtaaaagatacatnccatctcttnccgctgtc

SEQ ID NO: 10929 - DNA, 1489 bp, Arabidopsis thaliana landsberg
atagactatgcatccagttgagcaggaaagcaaggtaatgcctcctgtttttttttcatgaacactatctgccctctggttaatttttgtagttcatatttttctccatttttcctcttggagttctcaagaaatttatgacattcacctttcttttggtttgtatcttttttgctggttttagttcattttgctgtgaaaaatcgagtcggcattaaatgttaatcatcacctaacattgtgcatccttcttacccgtcctgtttttcaattatttttttccagggtgcaagtagaatctattctggtcaacctgaaagagaagtcagatgtagaaaaattgcttctggtcaggcattctttaccctaacttgaaaatttcaatatatttatcagatggattatatttttatgagagcattgttttacttctcaaggaaatttctgatgattagaaattcttatttcctgtttctttttatcacaatgacgttgtatttccggaaattgtgaaatttctcaggtttctattaaattttgatatcattgaatgatcaggaactgaaaaggacgctagagtttgaaagggaacttgaaatgaaatttggtggtggtgggagtatcggagatgacataattggtggagggggaaataatagtcagaaagtgggatttgtattgacattgcttcttctttttcggttctactaatattatgacactcagtgaccacttgagccattgctcactagttacttgacctggcagtttaacttccgtggaatgatatcttcttgcttcgagcctcatttaaccatatatattgagaaggaagagatggaacttatgcaactcctggagaaagttgtgcaggtaatttaatttttttgcttaacgtttacgcccaaggttactaattttctttttctttctgtcaggaggaaacatgggatattgaggaggaaagtcaaactaatattctatctagcagcatacaggtgagttacctaggcaagtttcttgaagtagggtaatctgatagtcttttactttggcagatatatacatcttcaatgagtggattaactgactcacgtggattgtttttatagatgcgtaaatgagagattgcgattttcctctttacttaaaacctagaacccataattcttcagtagccactgagttggtagaaattttttatcatgtacaagatgatatttttcttacttgctgtaaaagttctaccagcgtttcgtacattgtgtgaaactgaatatcatagtctagatttactagattatcttctgtgtacaatgactatcagtgttactagattagccagtgagaacttgataacattcctagataaattatatccttctcattatctttagtaaaaatccaaatatattactttttaagtattttacaatttccttgtttgcagttgcttttcactatcaaaaggagcttgaaacgttgtagt

SEQ ID NO: 10930 - DNA, 1233 bp, Arabidopsis thaliana landsberg
aaacactaaggttctaaacttctctgtctctctacccatatgttttttctgatattatatatctactacagtagtggattggttcaaacttgaaactactgtccttaattatttttattcccacgttattgtgaaaactttaaaatatgcctaaaccttaaaaaatgcctaaattttaaattatcatcgactaacggacaaaataagggaaatatttttttgtataatttgcctcaagtgtcgttggttcattggctaatcgagaaaatagaagtttgggtaggtggcttagatagttacatattctgtgtgattagtcgattagattagtcttatatgaaattttgaaacttctttaaattgattagtaaactgtagattatttttcgatgaaattaaattaattataaaaattgtcgataaatagatgccactccaaaacattttacaattgttacagttaagtgaaaaaggcacagaggtgaagaatggaaaagacacgtctttctggtacgacaattggtcacacatgaggaagctaattgacatcacatgtcaaagaggttgcattgatatgagaataacgatttattccacactggaagatgtgatagcaagtcataggcagagaaggcacagactcgatagtctcaacaatatagaggcgttgattgccgagattcgataaaaaggtctcatacaagagaaagatgtggtgttatggaaaggaaaaggtgatctttacaaaaacagtttcagcacaaatgagacgtgggaagcaattcgagaaggcatacgtcactagtggattggtgtaaaggtatttggtttcttcatgccacacctaaacactctttcatagcatggcttgcattaaagaaccgcctagcaaccagcgacagaatgttgaattggcaatgggagcaaagccggcttgtgttctatgcgacaacttactagaggacagagagtcagagaccatctgtttttcaagtgtagttatgctgaagagatattgtctggactaagccgaaaaattctaggacagaaatttactactacatggagtagcgttcaaacaatcctcacggataagtcatcggggagacttgatattcctaaccaaatatgtctttcaatttgcggtctattccatatggagagagcgaaatggtaggaggcatggagaaccacctctaccaccatcacagctacttcgaattgtggacaaac

SEQ ID NO: 10931 - DNA, 1271 bp, Arabidopsis thaliana landsberg
cctttactctgttttcatgttcggagagagattcatgggttttggaggttttaatggagacttcaacttccgaggagctttcgatcatcttcctcttggttccggtgggtttttaccgagtctcgacacaaacccatttcagaaaaaccacaagagtggtgaatctctggatttgtgtaaaaagcttcacaaaatgggtatctgttgtgacatgagtatctggaccaaacccgaagaacagttccgggtcgacccgagtgagtttggggctagaactcttcatgggtcttctgggtttgaccagaatctcaccggagcttctcagattcatgatgggtttcgtaacttttcctctgttcgtctgcaaaacaacaattttcatggagtttctccatctccgggagagatgagattacttggccgtcaagattcctttaacctaaacggatttgaagagatgttagctcttaagaatcacagagattttctcttagatcagatccatgaacccataaagcgtcctccttttctcagaggcaacgatgctctcataagttcgttgatgtttgaaggaaataatagggtttctcaaaccctagccgccatggaagcttctagaggtttttatccagaggaggatagttctctgctgagtccatttcacgagaaggtttctggaaagcttggagcttcttatctagaagatacagtactaatcggtcaaggctcttatgggaagatgagtccaaaaagcaataatgatctcgtctccatggttgagatttatggatctgtgaacttaatggcgaaagatcagattggttgcagagttttgcagaaactggtcgaagaaggaacatttcatgaagctaaggttatattacttgcaatcattgaccatgtcgttgaactttccatggatccttttgggaattacattgttcagaagctgtttgatgtgagtgatgaggaacagaggacgttgattgtgagtgtgttaacgtcaaatccaagggagcttatcagaatctgtcttaacacttatgggtaagcttcacctttttttttatcaacttttagtaaatttgattcattagtttagtcaacaagtccacgagctcaatagagatggagacatttcagcttttgaggattaagatgagatctttcttgtttttttggggaagatgaaatcttttctgtttatggaaatatttgaaatctctgcattagttttgtagccatcactatcagtctatcactaaaagaat

SEQ ID NO: 10932 - DNA, 1390 bp, Arabidopsis thaliana landsberg
  unsure (1)..(1390): unsure at all n locations
ggcatcaccaccattcccaatgacaacatgatcgtctctctttccgtttgaattgtttgcagacgcaccctcagctttgtgctgtccaacactctcattccatggaaagctatcaggagcgagtgactgtaaaagataatcaaaaccaaaaacaaatctgagaactcaatcatcttttcaagacaacgaaatttcccagaacttatataagaacgggtttaagttgtagagataactcatcacacataaagcttaaaacaaaagatggatatgaaacatacagtttgtcttctccagacatgttgccagagatttctaagctcattcctcctcaacggcttaacaagataatcagccgcacctttcaacatacacttgtacacagtattanccgagtccctgnnnnnnnnnnnnnnnnnnnaaaccaatacataatgagccaaaagatcatttcaaaacgatggaagaaaaagatgtaaaatatcaacgtacttataacaggaatgttcttgcaaatatcatgctccatgataagtgttagcagagcatatccagatattgaaggtagatcaacctctgttaatatcaaatcaacactttcaggctttccttttagcatctcccaagctttcaagccatcaggtactgcagcaactgatcaatacacaaaaccaaaccacattaatacaaatcctttaagcttgttgtagaaactaagtgttgataaagatttctatatgaacacaaaaccgacaaaaaatcgttgacttttctaaatttgactttgaattgtaacatttagccgcacgcggatcagattcacaacattagcatctcaatcgaattcatatttctcagattctatacaaacaaaacctaaatctcaagcattgaaaccagaaactaacctctgtaactacatttcctgagaagagcagcgataatctgtctagtagaatcatcagcttcaacgagcaaaactctaagcgcgattttcgggagaaatctctcccacttcaccaaaccatcaacaccggcgtctttcttccgaatcttccgacgtgataactttcctccgccagcttcaggtgctttcaccaccgtcacttcaactacttcctcgctactactcattatcacaacacaaacacttagctttgaaaaacctaaatcgatttattgaagaagaagaagaaagctccagagaaagagaaacagttacaaaacaaatcaaaatatttgtgagtgggagagataaatgagaagagagcaaaaaaaaaaaactttattctttctataatagtgtggagaaaagaaaatatctagaaaaaatctagcgaatgttataacggttgtgatttaaagtaggcggcgaaccgaccatgatcta

SEQ ID NO: 10933 - DNA, 963 bp, Arabidopsis thaliana landsberg
aggacaaggattccttttcccatattctcaagaagatcgcaaagttacagaagaaccctggttctgaaaagtatgttgttgttttgagagataatgttactccgcttgcttctgatctaactcgtttatctatttcatgatctcatgtgaatttagtaataataataagcatttttctcgtgtcgtgttttcaaaacgttttcatccggaccgatttggttcccggtggtgatttatatgttaacacaattacgaaaatattaacaaagatgacatcagatcttttcgatgataattaatagtttgtgttttcatataattttctattttgtggtaatcaacatatgtatcgacaatacaattaatttaacacatttgataatctaattaacactacagtaatattttggctaaaaataggttatattttgtaacacgtcttagtaagacggtcttacaatatctttttttttttttttaacacgtctcacattatcttaccgagtttaaatttgcaagcttacaattacatgcaccaacaatgtcaaatacaaatcaaaactgaaacatttttttttctttctaaaagtgatgtactttcaaaagaaatcaagtaattaatagtttcagtgtttactattaaaaaaatgtcaaatcatctttgtcaaattttagtttacttttaacacgtgttagaattgaaaaactataaatctatatatgtcatgataacatcaaactatttattaaacaaaattagtgttatttagtaaagacaaaacatatttaattaattgttaatctcacaatatttatgaattaaagaaaattgtatctgcttattatcattatatatactttttttttttggacgaattgtcattatatatacccttaacacataaacaaggacataatagaaacctgacataaatatttacagagtaattaaggaacattaaa

SEQ ID NO: 10934 - DNA, 1339 bp, Arabidopsis thaliana landsberg
atgattggtaggttcagtttaaaggtcacttttaactgtgtaggatggtgtgccccaaacatcatataaaggaatagtggtgttacgaatccagactagaacacgtgtgtattcctagttggaccaaattctgtaatgcagcttcgaatttgaaattcctaatgcaaaaataaacaaagattctttaccattgtaggcagtctggttatctcataggttttgaagctttgaagggtcaggcttaaacacatttcaacttgtatatatattgccaatgtaccattcacaggtactagtaaatgattcatattaccgcgaaattctcatattcgacaatggagagaatattgacctttgtgaccaaactaatgaggaagaggatgcttttatgagcatctttgttgtgcaacagtctcattcgcgcaatacacacaacttcttcttcttctttctcgcgaaagactcttaataaggcgaagggtccatgtgtaggatatttttaaaaaattagtagctgcaaataaacaaaatgttgattgcaaaatgaaattctctcgaatatttatatactctaaaagtacattttcaacaacaatgccaatggtggaattggattctaaaacgtaagatttgaatagtaatataacaaccaaaaaggagcttttgctcacatcatacatcaaaaagacagagagaccaagtagattctaaattaaactatttggacgtaagcattttgggttaaaaatgtaagaatacaaaacattataaagaaatccataaaatcaataatgtataaggacatatttataaaactcaaatatttccgcccttataaatacacattgcccaccagacaaaagaaacttcacctgtcatgtcttggttctgaaacagagaaactcacaaaccaaagaaaaaacttttgtggaaatcttttttactttttgccatttttggtaaaacagaaattcacatcacgagagtgttactacagagacagaacataaactgattttttttttactcatcacttaaaagaaaaaatggattcttctacagatttctatatctttgatggttcgtcttcatcttcttcctcagtgttcagaaattcgagtccagatatgttttcttcagacacaacaacaactacagatttgttctgcaacaatgaactttactctgttgaagaatcactcaacatttttgaccattttacccctcaacacattctctcttcatcacctccaagtgatcttctcggaaccctaagtctctctcagcatattcccaccggattatatccaaatttctcagatttccaaatctacgacgc

SEQ ID NO: 10935 - DNA, 1244 bp, Arabidopsis thaliana landsberg
gcatgaatgttatcaacttgagacattatctttgcagcatcttccaaaaggtttaaccacctcgagtggtctgagtaaactgtgcaagaagattattcttatggatcaaaaaggtaggtcatcgatactagacttgagctacagtatatcagatgatcggtttactgtcaggcgaggctggaaagctttctgctgcaggaatgagcataaaactggttgtttcttgaggctcatattggtccaaaatggaaaaacacccgtactccggatttttcctttggagagatatgagaacagcattggtaagttcaacacacccttgctttttatatgtagttaggaatgcaatgtttatgagggaaccttttctattccagcaaagaactctaagaagattaagcaagaagtagaatatgagtctgcgaaagaagagaagaacctggaatcattgtctttgtcagataattctagctttgtggtatctgtcacagtttctaatctaagtgaagatatactggttagcacttcacttttcttctattcttatataatggcttttgcatttcattgataaatagaagtatctgtctgattatttgttgttgcagcatcttccaataataaggctttcaagatcaaacttactggacaaaaaaattcacgagatagttttgatgaacaaagagggaagaacatggatattaagtttaaaatacagcaagtactccggtaggtttagaatcacacgcggctggaaaagtttctgcgaggcgaacggtcaaaaacctggatgtaccttcttactcaagctggtcagaaacagaactgcccctgtgctgctcatgacttctctagaggagaatattcaccaaagaaaaacaggtttgtgatgctaactacgtccaattttgttccagttctagaaattgtagtcaagtattttagagttgctctgtgttgttttcttcagcatctttcgatgactcggtttgaccaagacggagtagcatgggacaagaagtgaaaataatgggttgaggcacatgaatcagaccaggatttagaagagcattacaagattcatataaacatattgctttttggaacctatattatagttttgtgtaactggttttttgtaactttcttgtagacagacaaaatgatatccagtgactatgtactatcaaccagttttaaattataagcacaatattcgagtagaaccgagagaccttcaataa

SEQ ID NO: 10936 - DNA, 942 bp, Arabidopsis thaliana landsberg
tcaggtgtttctcctgtccactatgagtaagttttcttttactctccctcttttttcccactttacctaaaataacgttttcaaaacattgattttcttgaaacagcggaagagagtggaacgaaccattgaagtcgtgcaatggtcaaactcagccgttcatgggacaaagatatccaggaggattgcccttaggttgggttgtggttaacaaagtgttgagccgaattagaaaaccggtccatcttctcgatctcactactctctcggagtatcgcaaagacgcacatccaagtctctacaatggtatctcaaaggatctagactgtagccattggtgcctccctggactccctgatacttggaacttacttctctactcatctcttacttcctagtccttgttttacatatttgtttgtttctaccattttataaatagtttgtgatgatcctgtgtgattgtgattgatatttttccttcgttaatttaatcttaaatgtaattaacattgttactagtttacttgcagcatcgatcagcttaaattctccatacatttgttattactttaatttattttccaaactattataacgtgcgtatttacactttcaaagtctttaacaagcaaaacttgtgtgaaggaccaatacttacacgcattatccaaacctttgaacactccaaacgaattttacgacggcacaaagaggaggaggattggacagaagagaagcgaaaatggtaggagacatcgccacgagatggaaagaattgagcggtagtagcaagtggaaagacctgcttgatcctcttgacttggatctacgccgttatatcctacactatggtgatatggctgaaaaagggtacctagcctttaatagtgaccgccggtctaaatatgtaggagatagctgctacaccaaagaagagct

SEQ ID NO: 10937 - DNA, 775 bp, Arabidopsis thaliana landsberg
agcaagcaacagcttcacacgatcaacattcttgccattgaataagcacgcgatatgaagaatgatagccttatctttctcatctaacccttcataacatactcttagtagtttctctattttcccattcaaactagttctaagtcgcggtagagcgtttatccactctttcttactcatccctcgcaaagatgcacctaaaacgctgagacctaaaggaagatatcctgcaagttccacaacttcaacagctagatcattgtatccttctggtgccgagttttttccgaaagcacattgacacaagatctttaaggcttcatctctagatggataatccacttcatatacatgagtaatcccatgagccttcaaaagctgtctatcttctgtagtaactaaaattctggttccattaccaacccattgagtttgatctgccaaggcacgtagttgttccagttcatcaacatcatcaagaacaataagagctttctgattctttagcctttcttgtgctacacctaaatggcttacctttatctttctttgggtggtaatttcagagagaaacctttctcgtaaatgcaacttcatgctataaccatcgatttcctttctcctatagcttcccttaacattctccatgaaaatgaacaattgaaagtcgtcatcattagatgaagaaagttgattgtataaaatcctcgtgatagtggtcttccctattccagcaggaccccaaacacctatcatcttcacttcattagactct

SEQ ID NO: 10938 - DNA, 1225 bp, Arabidopsis thaliana landsberg
  unsure (1)..(1225): unsure at all n locations
cttaacaacaaaatgaacaaaaaaggctgaatcatctacatttttaatcacttaattaaaaccccattgaagcggaatagacgaagaaacacataaatcttaccaatgcatccaccaggaagataaggattccctctgtaaccaatctgattgcagtaacagttactgtaaccaaagccagagaagttaccatactnnnnnnnnnnnnnnnnnnnnnnnnnntaaatccctgtttccgtcaaattcacacaacccacaggattcgttaaccgagaatctgatgtatcaaagtaccaaccaagctcaatcaccgtaaacccattagtataaaattgttccggctctgtaacattcgccggagagtaagtctcattcgtcaagaaagcaactttacagtttcctccttgagttgtgttaccaccggagctttcaaggtcaacgccgattacttgcggtctatccgccggaatcttcgcctgacaacatgtgtaaccaccgcagatcttgtctaaacgactcttatctccgtcgcagctcgattcgcatcctgtgatctgagattcgatgtctgtaatcaatgctctgttgtcacaaccaactgagacgagacgattcgagtcggtgatgaaaaagggacttcctttaccggtgaggtttaaaggaagaggctttacgggtcgttgagaacagccggaggaagtcaccggagatttaatgtgaacaactccgtaggaactgtcgatgctgcttcgaagagtgatgctaactaattctctgttgatcttatagaggaacggagctaaggatttaccggaggtggtgctgttacagacaacctcgtaccagtcgttgagaaaacagtctcttcgtccgattccaaaaggaaaaggaatctcgattcctccacagatacggttacatgaagttgaagaagaaggtggagattgagctgtcgttatcaaaggaccattgatgaacagagttaggatagagagtagaacagagaaaaaaagtctccttctcttcattttttttttctctaatgacttttatgtatgaaagttctattttagaaattattgagccgtctcgttggaatttggaagttctattttgtcaacggtcaagggatcaattatcattacaagtttacacaacttattgtccaaatcaattttgtaatttttcataattagaatcttaattttagttatacgatttgctt

SEQ ID NO: 10939 - DNA, 1010 bp, Arabidopsis thaliana landsberg
catcccatgacactggtgttgtgccaattcaggtggatcttcgtggactactggcgatgaatccgctttcgctgatctcaaggtgtgcttctttcactgctgcagcagttagcttgtgacatcagcacggacacatcccgtaagctaggttggatgactgatgtggttacagccataaacccatcagatcagatgatagcggtccatgctcgcccaatctttgaacaagtttatcagattttgcaccatcaccgtaacgcaccaggcagcgacgtctctgccgtcagactgataatgcacgtcatcaactcgttacttatgagctgcaaatgacatctcgctctctctgtttcttcttgttagttacatgcataaaacataggaaacctctcttctctgtatttctctctctactctagttagattttttttggttacccattagttcaatttcctttaaatgtaaacatctggttggttctacgtctataatgttccctttttcttctccgagagaatgagtttgctaggatctggaaaaccctgagaaaacatgaagatcatgtatgggcaggttatactgattttctaatgaaattggttttgaagtaactacaagttacctgcagaatagacagatgagtttgaagacattatgggaatctggtgtggcagtaagcagagaaattgtcaaaattgagcaattgcaataaaaaatctttttctttacttttgagttcagttgatcagtttttggattgaagggtatttgctgttgggttcggttgcctttacttgcatgtgagctcagctgaccatgaattcagaatccttgtcatcttcttctcttttgttggaggttccgatgaagagcaagaagttggaaacaaatgatgggtgaatctctggaaatgtaaatagggcccaataattgaaattaaaggcccaaacgagtaaaatctgaaaaatgtaaaacagaagcggtctcatagtttagatataaacacgat

SEQ ID NO: 10940 - DNA, 504 bp, Arabidopsis thaliana landsberg
ttttcatcattttcaccaaatcttttaggaattaaaatgtcaaaataatttttaaaaatgtttaaatataaaattgtaactcatgaaaacatgaatgccagcttaactgaatcataattttaatctacgtcatccaatatctgctgataaattacgttacttaaagtaatcaattatgtattcaataatagggaaatccttgcttccgagcaaagaccaagaatggtacttcttcagcccacgagaccggaagtatcccaacggctcaaggacaaaccgggcaaccaaaggcggttattggaaggctacaggtaaagaccgccgagttagttggagagaccgagccattggaaccaagaagacattggtttactaccgtgggcgcgcgccacatggcataagaactggttgggtcatgcacgaatatcgacttgatgaaacagaatgtgagccttctgcatacggcatgcaggttcgttgctaactaactggattcgactacaa

SEQ ID NO: 10941 - DNA, 522 bp, Arabidopsis thaliana landsberg
  unsure (1)..(522): unsure at all n locations
agtgttgatgggagttttatggtgttggctggagcaactgtaggtggtggatctgctgtgaactggtctgcgtgtatcaaaaccccgaagtcggttcttcaagaatggtcagaggatcaaaatatacctcttttcggtactaaagaatatctaacggctatggaagttgtgtggaagaggatgggtgtcacggagaaatgtgaactggagagttttcagaatcagattctgagaaaaggttgcgaaaatctcgggttcaatgttgaaaacgtgccaagaaactcctcggagagtcattactgtggatcttgcgggtatggatgtagacaaggagacaagaaaggaagtgaccggacttggcttgtcgatgcggtggggcacggtgccgtgattcttactggatgtaaagcggagagattcatactcgaaaagaacggtagtaacaaaggaggcaagcaaatgaaatgtntgggagtgatggctaaatctttaaacggaacatagcgaagatgttaaagattg

SEQ ID NO: 10942 - DNA, 621 bp, Arabidopsis thaliana landsberg
gcaaacacacatgcgtgtgcatattagaaaagagaggttatttttgatgttaagagacacagctggggggaggggtataccttctcccagctaagattcgagccatgttgccgttgttgtttgtgacaaatgcgtcactcttatcacagacaatgaagtcaagagcagccatgcgtgatgagaagtttgcaaacggagccagttctttcttggaggtcagtgtctcttttgtatgaagattcggaaacagagctcttaaaggtgccaatgtatcctcccctccgtatacctcgcctgatgcaacgtacaagtgaacctctttcccaaaacctaagcctctgagcatcagaccaatctcctctggcgtcaggggacatctcccgtgccgccgtaccttttcagggtttgccgcctgcacattgcaacaaccccaataatagaattaagaagagttgatactgcacctaacattcatttatggtattcaaattaagcaatgcatgatgttctcacatgtaacgttttccaccttcttctcatagctccgagttcgagtctctccttttgaccaccgcagtaatagcatccggagaaggccagcatatcaggttcgaatctagg

SEQ ID NO: 10943 - DNA, 1336 bp, Arabidopsis thaliana landsberg
cttcatttgtggcacatgtccagcgtatgtgaattttaaatcatcaaactcatagtattgtgatttttgggaaaaataataatttgatagagaaaaaaatttggaaataagattggtgtcaaaaaaagcaaaatctaaaaatgtcagaaatatcatcaatcgtcataagttaccaaatttggggaaaatatcatatcattctctacaaaactaacacacacttctctctttttttgctacactcatttttttttataatctttgcttctcagctttcataacaaaagtcaaaagccacatattataactcctaggagaatgagaccttagagctcagacaaatttcatacatatcattcaaagtttcaaaacccttctaatgagctttgatcgtgcggctagacacaccatgtagcaatttcacaaatccgagaaagctaagcttcccatcggtatgtctaagccaatcgtgaagcactgcgtgaaccggtacagaagggccaagaccaagttcctgaggtaagtttaaccaatgagttaatttgagcatttccaaagactttaaacagacttgtataaagaggcaaaagagacagaccgaagcgagttcatcgatcatgattggtcggttcccttccttttcgaaaagctcataagcacaacgagcgtgttgttcccatcgatcaagagcttctagctggtgaacactcaatgccgctgcacagaattcctcaaagtccattcttctatattgaagagcactcagctacaaagatggtccaataagattttcaatcaccaagtcaaactgtatggtttaaacattgaatagaaagaatcaaggctcttacttgtcctaagaactctggaatacgtgagtccttcattgcatctgttgccattttcatcagagcctaacaaagagagttcgagccagtgtcatgatgttaaccaaaacataccagaagataaactgaaacaggacggaagatagaaaacttactgatttgatgttttctagacttatggttccgttcttactaggttctaacaaagcaaactgctctctcagataaaacagttcatcaaccgtaagtgttttcgataaagcctgcaagcaaatggcgaacggtaagtgaaaacaaagtgaccttttaagtagaaatactgaaaaactgatccactcactcttaatgcagctttacggagagatgatgatcgtaaataagctctcataagtttgaaaaccagaatatccattggaacctttgcgtcgtttgagtcctttatccatggatgacctgaaacaataaacaagattacaaatcttttcaca

SEQ ID NO: 10944 - DNA, 294 bp, Arabidopsis thaliana landsberg
  unsure (1)..(294): unsure at all n locations
ttcttatgtatagttgcccaagattttattgcacataacttcgatcgtatccaaccattcttggcagggttctttgaaatgttttttgaacttgaaatgatagggcagtcgaacaagttctttctttntcttttctcctttgagcttcggcatattccattcctttaacgtcggaaacactctattggctaggtattcctgtaccaaatctctagtaccgatatgctcagacacaactcgaaattctcccacagcttctcggcatggtgacccatgtagcatgtcgcataaagg

SEQ ID NO: 10945 - DNA, 1538 bp, Arabidopsis thaliana landsberg
tctagtttatattggtttttgggttcataaaaatcagttgttatgttaaaaattaaaaggttatgtgctcggagactgggattggttcaataaatcatatctcaagattgacgaaatcatatctctctatgggaggatcaaactctacgacttcacaaatcacacaatgtaattgtcatacaaaggccaaaacatgtcagtttactattataaggcaacaaatgaagctagtagttagtaactgttttcatactagagttctatttgaggacttccgagaaaggataaataaaataggtggtcctctcatggacgagccttaacttctctatacacaatcaaggaaatgatgtcttacagtttcctagctagaatagtggtcttttgtttattagcgagtcttcagcaatagagcttctcgatacattactcgggctaaaattttagacttcataataaagtatcattcacgaccattaagtctttgtttattattatgagatatagaagctagaaaaacaagatccattttgtggggttgggaggaagacatgactaatttattaaacacaaatttatgaagagagagtgaaatgatagatcgtagatacgtctaatttattaaactcaagagacgaaccggagagagtgaagcatcgtcacccaggtacgggaagaacattcacttttgcataacccggaaaatagaagccaccgtctggataagagtcatcaccaaaagaagcgcagcggcgacagtagcggtacctctccatagattaccgaaatactggcgtccgaggatggtgcgtgacctgttgactggattttcataataggcgttgactctagacgctataccagcatagtaagaacgactctccaccacccccgaaaatagcgtgttcaccatctccgccaccgccacagaactcttctccccccagttgtttagtatccctttcaaaaccatatatatcatattactgtcacttattcaagaaaaattaagcaagcagtataacctagcgaacacggagacgagcagtacttaattggaattacaagattttatactgtttaaacatttgtattgataaaagtaaaacaacatatgatatataacatgctgaaaaacatgatttacagataataggggttcaaatatttctaaacatcaatatcttcgttttaagaataaatgctagaaatgtctatctaatcaaactcaagtatgaaattcgtcttaagtattgataattctatgcatcaatataaaatttaaacgtcaaatcttgtaaatttaaccaaaaatagctaacgagtacaaaacaagacaagcattgataatgtggaaaatggatatttaacacacaaacaatatatatatgtatacgtagaaagggaaccgttctccatgagtaagtccacgtctttatcagtgtcgatgaggaaatccaagaaactgacgaagttacagacgtatgctttgaaagggtaatggcattgctcaagcgccattatatttctcagtgtga

SEQ ID NO: 10946 - DNA, 813 bp, Arabidopsis thaliana landsberg
tgtaaaaacacacacacatgtcgtagtaaatatacacctttttataattaattatattgtaacgaatttgttgttttgttataatatatagattaatgcatgatgttttgcgattaaagccagacgagttgtaatatccacagccttgataagctctacatgcagtgaacaattttatacatttagaaaaaataatcactatctcgaccatatagaccaggccactacattacagctaatctctggatttacttgataattaagacaaatatagaacattaaaatactaactcgatgcctcaccttagcctcctctcaaattgtcaatatctagatggagtgttacatccacattcctaacagtttttactctttattttaatatatccttcaacagatcatcatcagaataatcatcaaatcattattatatatttaactagcccaaattgtaccatacctatcaatttaaatttctctttctatctactataaaaagtgactctctaagaactccaaagattagaacattgaattgaattagccatggagaagaatacttctcaaaccatcttctccaacttttttcttctccttctcctttcttcatgtgtctctgctcagctccggacaggtttctaccagaactcatgtccgaacgtggaaaccattgtacgtaacgctgtccgtcagaaattccagcagactttcgttaccgctccggccactcttcgcctcttcttccacgattgcttcgttcgtgtacgttacaattttcttttgatattttcgtacaatataagaagtttattt

SEQ ID NO: 10947 - DNA, 707 bp, Arabidopsis thaliana landsberg
caagatccatcggaaacctctcgatctcgtgacattcttcccggaggtccactagaccttcctccaccataagaagagaatccaccaccgagacgaccaggttgcatttcatcctcagaacgttgtcttggaccagtaggtagctgaagcatctgctctctcgtcaatccagcagaactcggagcagtgtatgctcctttggtaaactccgataaagtcatcttcttcttcttcttagaagacttagcagtcgcagcctctttcagactcgggaaactctgtgaatctgccgccgtggctgtagcttcagcagcttgctcttcatcggcacgctcagcctcatcagcccatgcgccgattccaccccaaggtttcgacatctgtgaattttccaattccaaattcggagattcccccagatctgaaaaacgcaggacagaaattgagagtgacgaatctaaagattccaattcaaagtagctccgagtgagaaatcgaatctaaagattctctcgtcgtcgcctaaagatgaaattttttttatgtaaaaatcgatttatttccttgtgaagctggtttgtttgtaggtttcggaacggaggagcaatggacggagaaagagagatagcaatacgcgacgtattggagcgtgtggtacacgtagaaatcagttttacgaggaagttaatggcttgaacgttgtgcag

SEQ ID NO: 10948 - DNA, 507 bp, Arabidopsis thaliana landsberg
aaattaagaaaaccaaccaaaactacagctaagctgatatccatacatacttctcacagaaacagaaactaaaaaagcatctcgttccaaaagcttcaaagagaaaacacaagaacgataaagtttacagcaaactcacatttacaccagcagttttacggggaactctggcaaaaatttcttctgcaaacgaacgagtatcaccagaagacgaaaacccgtaatccaccaactctcccacaagttcagttggtgattttgtttttttagctgcacacaatttgttaaagttttgggacagtcaagcaaaagttcttacataagctccatgatccaaaatcgaaacatcaaattacccattgcaatgagatagttaacaacagccgcttgagagtagccaagtagcatcatcagcttatccgaaacccaagtcttcaaatcattgctcgccattcttactgtatttgaataaacaaagcaacaccaagaaaattcaatcaaaatcca

SEQ ID NO: 10949 - DNA, 1032 bp, Arabidopsis thaliana landsberg
agcgttggtcttaaaaaggaaagtattcaagaagtgggattgaaagagaggagaaggaacaattaaattttcattaccgggttggatagtattgttgctagtatcgattgtcggtgttgtaatggcgttgcctttgcttcagctgtgatttagatgcaaatgcaacgcaacacaacatgactgcaaatcaatctggtaaaatctgtttatcattgtctctcagtctcagtactaagtagtgtcttttgttcttccccctctcttgaaaagaaaacagatacattgagtttggtatggcatttgaagttacgtataaatataaatgttagcttaatttgattaagaacgaactcgccacctaatgtggtggattcatggactttacgacatcatctttttatgaaatcaaccctaaagttatgaaatacgtccatataaaaaattcgagtatcttgcagcaaccaaaaatgccaagctttaacattgtcattgtcatttggaaatgctgcttgcattgtattcaaaagaatcgaacatgtaagcatctttgatctgtgaaaaagggattccactgaatcattgtgtgtgactatgtcatgtgtgtgtgtataaaggatctttgatctacatatatatatgaattataatatacttgtctataaaggaatcatttcttgttcttatttttgatatttaaatacatacaaatttatgtgacaaaaaaaaaacatacaaatttgtaaattgaacttatgacaccactaacataaatatcacatacaaatgtgaatggatttcctgatttatttatattcgatactaattgaataaatgtttaagacatacgttatttttatttaaatgacgaactgattcctagacatattaaatacacttctataaataagttatatttgaacaatacagagaatactttcaataaccttgatatataacaaaacgtccactaatggagtaacttatgcttatcataagtttgaaaaagtatatacatttgaaaccctaggaact

SEQ ID NO: 10950 - DNA, 1354 bp, Arabidopsis thaliana landsberg
actgcctcttaattcgaaattgcaaatttctaaataaaaggtgagaatgggacaattgatggacaaggagaacctttgtgtttgaaaattcaagagaggagaactaaaatacacaagaccttatttgattgagattatgcattctgatggtatccaaatctccaatctcactttcttgaattctccttcttggcatattcacccggtctacagcaggtaaattaaactcacccggttatcaaatttaacctattaaaccggttttgtttattaattaattttcaaatgcagaaatatatttatccaaggtttgacgatcttagcaccagtcacggtaccaaacactgatggcatcaacccaggtacgataacgaaatcataccgataaaatcttaaaattccaataaccggcttttaaaaatctggctgaaattatttccggtttattacagattcttgtaccaacacgaggattgaggactgctacattgtctccggcgacgattgtatcgccgtgaaaagtggatgggatcagtacggaatcaactacggcatgcctacgaaacagctcttgatccgacggctcacatgcatttctcctgatagtgccgtgatcgctctcggcagtgaaatgtccggtggaattgaagatgttcgagctgaagatattgttgccattaactctgaatctggaatcaggtatgtaaccaccccgttcacacatatgaaccggtttaaattcggtttggctaaccttaaaccgataaatctgcaggattaaaacagctattggacgaggaggatacgtgaaggatgtatacgtaagaggaatgacaatgatgacaatgaaatatgtgttttggatgaccggaagttacggttctcaccctgatgagcattatgatccgaaggcgttaccggtgattcagaacattaattatcaagacatggtcgccgagaacgtgacgatgcctgctcagttagctggaatatcgggagatcagtttactggaatttgtatctctaacgtgactatcactctatcgaagaaacctaagaaagtgctttggaattgtactgatgtttcgggttatactagtggtgtgactccgcagccgtgtcagttgttaccggagaagcagccggggacggttgtgccgtgtaatttcccggaagatccgattcctattgatgaagtgaagcttcaacgttgctactccagaagaaggaatatgtgaacatgtaataagatcttcttttttttaacaaatacttttcttgggttataagtaaatgtgttatcaaatggggacatatttgattgaataatagacaaagcttcaaggagaaaaga

SEQ ID NO: 10951 - DNA, 621 bp, Arabidopsis thaliana landsberg
ggaaactgatctccttcttttggaatataaccaggaggtaaagtcatatagatttcttcctgcagatcgccattaagaaaggcattggacacgtcaagttgatctaagaaccattttcttggtgcagcaacagaaagtaacatcctgactgtagccatgcgagcaacaggagaaaatatctcaacataatcaagaccatttttctgagtatatccttttgctacaagacgtgccttatacctctctagacttccatctgcattcaacttcacagtgtaaatccatttacaacccacagctgttttaccaggaggaagagaacaaacagaccacgtgttcgtacgctcaaaagctcctatctcttcagccatatcattgcaaaattcttcgactttactagcttggtgatagctagtaggtgtgggatatttagtcaatgcattaatgtaggcatgaaatggctcagagagattagaataagataagacctctaagattggatgagctgtggagtgctgtgtagagtaacactgatagtcttgtaagtaaccaggaggtctagagattctgcctgatttggtggaggatccgataccacttcaacagcctgtaaatccccct

SEQ ID NO: 10952 - DNA, 797 bp, Arabidopsis thaliana landsberg
ttctcatgttgtttttctttcctagagataaaattcaatatgataagttttagtatttgtaactatgaaatgaatgacgatgtgtaccttttgtgtttttggaagttgatgcttcgtggttactattcttgttgtttactttttgtcattttgactgttgattttgagacaccgatagtgtgtctcgtggctgccattttttggacagaagaatttttcttcgcataaaccttacttttttacaaagaactgtgttaaacagtacgatatcataaatacgctaatgctacaatttgaaattataaattaattgtaaatttcagggtggagaagcttgtcgtagatggagcaggtgtgacaaccacctattaggaaaaattcaatttcaatgttagatgtctatttcaatattcccaatttgtgaagatgaggcacatatgtactctttattatttagtagggtttaacagtaacttacaattatagaagttgattgtggagatttctatattttcactcttttgacatgtaggtgaagatgttcatatgccttcagggagactaaaaaagtatgtatactaacgctttttgaatgtattgtataagtaagcttatggtgttgtaccttcatccgtcggaccttttttctttctttgtttatcttctctcattagttgaggttggagttgttgatctgtctgatccttaggttaaactatctacaatagtaaaaagagatttgtagtggctatttgttgctgcttctgtaaattttgaattgaaagtgtgcgtatgac

SEQ ID NO: 10953 - DNA, 766 bp, Arabidopsis thaliana landsberg
atgaaatagcatgattgatgtagatctttccatattcaaaacatctttcgcatccacctatattttgtaatttgatttgttattaggtgataaaattatatacgattttatgcacttgatgtggcgtaggttatagatggaagtagagaactaacttacagtcattgtagctgggtgtcggtggttttgctttcttcttgatgtaggttccttgaattaaaggtttagctgagtatgttcagtataagtatgtttaagtatttgtaactatgaactgactgaagatgtataccttttctgtttctggaagttgatgcttcgtggttattgttgatgctaatttttttcgctttttgatagattgttgtttttcagaccctgattttgtgtctcgtgccctccatatttttgacagaaggattgcttttcgcctacaccttgcttctctacaacggactgtgaaataacatacgatatgattaaaatggtaattctacaatttgatattgaaaattgcagggtagagatacttgccgtagatggagcatgtgtgacaaccacctataaggagaaattaaatttcaatgttagatgtctattttcttactcccagtttgttaatttgaggtaggtatgtacactttaatatttagtagggtttgacagtaacttacaattataatagttgattgtggggattgctatattctcccttgcttggcctgttgcgaagaagaagatgttcaactgtcttgagagagaggca

SEQ ID NO: 10954 - DNA, 1604 bp, Arabidopsis thaliana landsberg
aaccaaaacacttcacttctactactaattaagaacactaacaaaccaaatatctcacaaaaagaggtaacaaaacctttcttttttcaactaaaagcattttgataggtttagctaggtagtgtttcatcttacggatttttttaagggtttggtacttttcactcttcatcatcctcatctccatcaccaccagaagctttcttagctccggctctctcgttccttctcttcactcttccaggtcgaccaccaccgaatggactggttagagaaaagtctacgtgcttctgtgactctactctcaccataaacgatggaatgttcacaagttgcctcccaaccctataccgaatcaaaaacaaaccattaggtcaagaatcaacttttgtaacaccctttacacaattgagttcatctatagatgtgaagtgcatcaagactctacccgagttaagcaagacaaaaccgataagctagcctcaaaaacgctactggaagtaaacgttgttctcaagattataccaactcaaaaagcattacctgatatgcctttgtcggataaggacacgagcgtggtgaatggacttagccataccagacttaaagacaatagtttggagacgacgttcaaggaaattctcaacagtcaaagcaagaacataatcaagcttgttctgggtttcatcaagaagaccatatcgattcattctcctaagaagagcttcaccttcaaagatacgacgaggattcttctcatcaagagttaagagttctcttgcagcattacggattctgctaagtgtatattgaactctccaaagctctctcttacaacgaagaccgtattctccaacaagctttagctcagcatcaagacgctctttctcataaggacgacgtggcttcttgaatgttttcccatcttaaaaacaaataaaaatcaaatctttaaaaacatcatacgataacgaaacagaacaaggtaataacaaaacagagtaccagacaaaaaccctaattttcacacataaaaacagagtagagttaaattccacaacagataaattacaataccctaaatgtaaaccatatcctataacatgaaaacataataataatacacagatgatcaaaatcagactttagtaagtaaaattcgagaaaaaaaacagagtattaatctaaattcagcatgcatgagggaagaaactagtttcgaaaatagaagattgagggaagagagcttacagtttcggtagaatctgacgttaaccatagctgctgctgctcaaaactaagacagagttgatcgcgacgatgaagacgaagtgctttttatattacacgactatgaaaaacctagagggtcttaaggcctcaaatgatttcttttggttgggttggcccattgggcttttttcattgacctctataatttgttaggctcaatgaatctgaattattttgaaaatgggaaaataacgtttttaaccttctaagtggtaccggatagtacggtaaactttgacatattttcagtagcactataaacttccaaactaattttattaaatattaaaacttctaaattaagtcttttg

SEQ ID NO: 10955 - DNA, 629 bp, Arabidopsis thaliana landsberg
tctctattcatatgactacttgtcttattcttatgttcgtgtgtatgacaaaagtcttactatataacgttcggttgaaaccgtgcatatattgtacctaattctagcattttaattggaatgtttgagtagtgaattataagtttatgatagatttctccaaccttccgagtttctaaatcgaatttactcaaagctcatacctcttataatcgtgtgtaataaacaacttgcaaagtttcttcaaaaaccaaactacttgctaattgcaaaaaaaaaaaatcaaataaatacatccatttgtcacaccattttgtccctctctctcaatcaattcgtcaccgcaacttaaaaacatcggcccaatttgtctttctcgacacaacaacttaggaaataatgggtcacgtttgggccttaattttgggtcacttacggaaaacggtttcggttagctggagatcaacatccaatccgaattcattggtaaataacttttatccttacggaaaacggatcggttagctggagatcaacatcctcctagagactgaatgatctgacaatttcctcagcgtgtccatgttcatggagctcaacaagtattttctttaacctgcgggcgagac

SEQ ID NO: 10956 - DNA, 629 bp, Arabidopsis thaliana landsberg
  unsure (1)..(629): unsure at all n locations
taattttgggtcacttacggaaaacggtttcggttagctggagatcaacatccaatccgaattcattgttaaataacttttatccttacggaaaacggatcggttagctggagatcaacatcctcctagagactgaatgatctgacaatttcctcagcgtgtccatgttcatggagctcaacaagtattttctttaacctgcgggcgannnnnnnnnnnnnnnnnnnnnnnnnnnnnnnnnnnnacctttttctcgagtattcttccaagtgtcagagtacaatccacaaggggttgcagcagatgactgaaaaatcaaataaaacatgcatgtgagtatgcatcaaagcaaagttgcaacacaaagtggtaatgtcctaatctgagatgtggatatcatggggaaccaaatgaagataggttaatgatactttggacgtgcgtagacccgtttttttttgttttgttttaatgtagacacacatcttagtttctcactctcacgttggcaatcgtatcaaaacagtagcttaatttttcatgcacactgattgctatgactgaaatgggacatactatgcgacatcacaagctcaatttcacagccctggactatgagtaaccttgat
